United States Patent Application Publication US 2020/0377945 A1 - sequence listing, part 20

SEQ ID NO: 3882 - DNA, 32037 bp, Unknown
  gut microbiota DNA sequence
aaaaaaaacaccgaaagtttttgagatttaaaataaatatctaactttgcagccgcttaaccattcaaggcggaatggttgtgaagttagatatgacaagcctctttagctcagttggccagagcacgtgatttgtaatctcggggtcgttggttcgaatccgacaagaggctcaagaaaagatgctgagaagctgttgttctttgaaagtaagttgggcaaataccagagtggccaaatggggcagactgtaaatctgctgtctttcgacttcggtggttcgaatccatctttgcccacattcttaagacttgaaaggtctttggttttttgcggaagtagctcagttgatagagcattagccttccaagctgagggtcgcgggtttgagccccgtcttccgctcttttttttcttgctgttatagctcagtggtagagcacttccttggtaaggaagaggtcacgagttcaagtctcgttaacagctctttgataacgtaattgctgattattaatcaaataaataacaagtaaagctatggctaaagagaaatttgaacgttcgaaaccgcacgttaacattggtactatcggtcacgttgaccacggtaaaaccactttgactgctgctatcactactgtgttggctaaaaaaggtctttcagaattgcgttctttcgattctatcgacaacgctcctgaagaaaaagaaagaggtattactatcaatacttctcacgtagaatatcaaactgcaaatcgtcactatgctcacgttgactgtccgggtcacgccgactatgtaaaaaacatggttacaggtgctgctcagatggatggcgcaattattgtttgtgctgcaactgatggtccgatgcctcagactcgtgaacacatcctgttggctcgtcaggtaaacgtacctcgtttggttgttttcttgaacaagtgtgatatggttgatgatgaagaaatgttggaattggtagaaatggaaatgcgtgaattgctttcattctatgatttcgatggcgataatactcctattattcgtggttctgcattaggtgctttgaatggtgttcctcaatgggaagataaagtaatggagttgatggatgcagttgatacttggattccattgcctccgcgtgatattgataaacctttcttgatgcctgttgaagacgtgttctctatcactggtcgtggtactgttgctacaggtcgtatcgaagctggtattatccatgtaggtgacgaagttgaaattcttggtttgggtgaagataagaaatcagttgttactggcgttgaaatgttccgtaaattattggatcaaggtgaagctggtgataatgttggtttgttgttgcgtggtatcgacaaaaacgaaatcaaacgtggtatgattttgtgtaagccgggtcaggttaaggctcactctaagttcaaagctgaggtttatatcttgaagaaagaagaaggtggtcgtcatactccgttccataacaagtatcgtcctcagttctacttgcgtactatggactgtacaggtgaaatcactttgccggaaggaactgaaatggtaatgcctggtgataacgtaactattacagttgagttgatctacccggttgcattgaatgtaggtttgcgttttgctatccgtgaaggtggacgtactgtaggtgcaggtcagattacagaacttcttgactaatcactagataattaatataatcagttctcggtcgtaagacaccgggaactgatttttacgggagtagctcagttggtagagcaccggtctccaaaaccgggtgtcgggagttcgagcctctcctcccgtgctaaacttgaaagaatatgtttcagaaagtagcaaattattgtaaagaatcttatgacgaattagtccataaagtatcatggcctactcgtaaagaactttctagtagcgcagtggttgttttatatgcttccctactcattgcgctagttgtttttcttatggattcagccttccagtttgtaatggaggatattatctatccgcactaattaattgaataaaatgtctgagattgaaaaaaagtggtacgtattacgtgctgttagtggaaaagaaagcaaggttaaggagtatcttgatgctgacattaagaacagtgatcttagcgagtatgtgtctcaggtgttgattcctaccgagaaagtgtatcaggttcgcaatggtaagaaaattgtgaaagaaagaagttatcttcccggatacgttttagtcgaggccgctttggtcggtgaggttgctcatcatttgagaaacaccccgaatgtaatcggtttcttgggaggttccgaaaatccggttcctttgagacaatcggaagtgaatcgtatacttggtacggtggatgaacttcaggaaggtggtgaggaacttaatgtaccttataccgtaggagaaacagtgaaagttaccgttggaccgttcagtggcttcagtggtctcattgaagaggtgaataccgaaaaacggaagttgaaggttatggttaagatcttcggacgtaaaactccgctggaacttggctttatggatgtcgagaaagaataatgcattctgttacgtgcattggactttcgctataattaatatataaaaattagaaacaaaatggctaaagaagttgctggactaatcaaattacagattaaaggaggcgctgcaaatccatcacctcccgttggacctgctttgggttctaagggtattaatatcatggaattttgcaagcaattcaatgccagaacccaggacaaagcaggtaagattttacctgtaatcattacctactacgcagataagtcttttgattttgttatcaagactcctcccgtagctattcaattgcttgaattggctaagattaagagtggttctgctgagcctaaccgtaagaaggttgccgaaattacttgggaacaagttcgtacgattgctcaggacaaaatggttgacttgaactgcttcactatcgagtctgctatgactatggtagctggtacagctagaagtatgggtatcgctgtaaaaggggaattcccgggtaataactaataaacttcaattataatgggtaaactgacaaaaaatcaaaagttggctgcagaaaaaattgaagcagggaaagcatactcactgaaagaagctgcacagttagttaaagatattactttttctaagtttgatgcttcattagatattgacgtacgtttaggtgtagaccctcgtaaagctaaccagatggttcgtggtgtagtttcattgcctcacggaacaggtaagcaagtgcgtgttttggttctgtgtacacctgatgctgaagctgctgcaaaagaagctggtgctgactatgttggtcttgatgaatatattgaaaagatcaaaggtggatggactgatattgatgtaatcattacaatgccgtctatcatgggtaagatcggtgctttgggtcgtgttcttggtcctcgtggattaatgccgaatccgaagagtggtactgtaactatggatgtagctaaggctgttaaggaagttaagcaaggtaagattgactttaaggttgataagagcggtatcgttcatacttcaattggcaaggtttctttcactgcagatcagattcgtgataatgcgaaagaatttatcgctactatcattaaattgaaaccaagttcagctaagggtacttatattaagagtatttatctttcaagtactatgagtaagggtatcaagattgatcccaaaactgtagaagaaaactaacaataaggaggaatcatgagaaaggaagataaaggcgttattattggtcagttggctgaaaccgttaagcaatacggacatttctatttggttgacacaactgctatggatgcagctaagacaagtgaactgagaagaaaatgtttcaaagcaggtattaagctggttgttgtgaagaattctttgcttcacaaagctctgacgagcatggaaggtgttgatttctctccgttgttcgattctttaaaaggtacaacttcagtaatgtttagcgaagtagctaacgctcctgcaaagttgttgaaagaatacaaagaggaaattcctgcattgaaagcagcttatgctgaagaaggtttctatgtaggtgctaatcaactggatgctctttgcaacattaagagtaagaatgaagttattgctgatattattgcattgctgcaatcaccggcgaaaaatgttatttctgctcttcaatcaggtggtaacaccattcatggagttcttaagactctgggcgaacgtgccgaataatcaattttataatcaattagtaacaaacaattaaaatcatacaaaaatggcagatttgaaagcttttgcagaacaattagttaacttgacagtaaaagaagttaatgaacttgcaactatccttaaagaagaatacggtattgaacctgctgctgcagctgtagctgttgctgctggtcctgctgctggtgcagctgctgctgaagaaaaaacatcttttgatgtagttttgaagagcgctggtgctgcaaaattgcaggttgttaaagccgttaaagaagcatgtggtcttggcttgaaagaagctaaagacatggtagacggtgctcctagcacagtaaaagaaggcttggctaaagacgaagctgaatcactgaagaaaactttggaagaagctggagctgaagttgagcttaaataatattagcctgagtatcaggtaatacggttaggaatcctctggtagaggattcttaacctttttgtgtctatattattattaagttctacaaaatattaacaaatgtcttcaaatactgaaaatcaaagagttaattttgcttccatcaagaatccgatgaagtatccggatttcttggaagtgcaattgaagtcattccaagactttttacagttggataccccgcccgaaaagcgtaagaatgacgggctgtataaggtgttcgctgaaaacttccctattgctgacactcgtaataactttgtccttgaattcttggactattacattgatccgcctcactattcaatagacgagtgtttggagcgcgggctcacatacagcgtgcctttgaaagcaaaactgaagttgtattgtactgatcctgatcatgaagatttcgatacggttattcaggatgtttatctgggtcctattccgtatatgactccgaaaggaacttttgttattaatggtgctgagcgtgtagttgtttctcagttgcaccgttctccgggcgtgttctttggtcagagcgtacatgctaacggtactaaattgtactctgcccgtattattccattcaaaggttcatggatcgaattcgctacagatattaacaatgtaatgtatgcgtatatcgaccgtaaaaagaaattgcctgttactactctgttaagagctgtaggttttgaaaatgataaagatatcctcgaaatcttcaatttggctgaagacgttaaggttaataagactaacttgaagaaagtcgtaggaagaaaactcgctgctcgtgttttaaaaacatggacagaagatttcgtagatgaagacacaggtgaagttgtttctattgaacgtaatgaggttattatcgaccgtgaaactgtgattgaagaggatcatatcgatgaaattatagactcaggcgttcagaatatccttgttcacaaggaagaagcgaattcatccgactactctattatatttaatacccttcagaaagacccgagcaactctgaaaaagaggctgtactttacatttaccgtcagttgcgtaatgcagatccggctgatgatgccagtgctcgtgaggttatcaataacctgttcttctctgaaaaaagatatgaccttggcgaggtaggacgttacagaatcaacaaaaagttgggactgactacggacatggatgtgaaggtattgacaaaacaagatattattgaaatcattaagtatctgattgagctgattaactctaaagcggatgttgatgatattgaccacttgagtaaccgtcgtgtacgtactgtaggagaacagttgtccaatcaatttgcgattggtctggcacgtatgtctcgtaccatccgtgagcgtatgaatgtgcgtgacaatgaagtgtttactccgattgatttgattaatgcgaagactatttcttctgttatcaattcattctttggaacaaatgctttgtcgcagttcatggatcaaactaatccattggctgaaatcactcacaagcgtcgtttgtcagcgttaggacctggtggtctgtcacgtgaacgtgctggttttgaggttcgtgacgtacactatactcattatggtcgtttgtgtccgattgaaactcctgaaggtccgaatatcggtttgatttcttctttgtgtgtgtatgctaagattaatgaacttggctttatttcaactccttatcgtaaagtagctgatggtaaggtggatatatctgatgaaggtattgaatatctgacagccgaagaggaagaggataagataatcgctcagggtaatgctccattggatgatgaaggcaaatttgttcgtgagaaagtaaaagctcgtcgtgatgctgattatcctgttgttactcctgaccaggtagagttgatggatgtttctccacagcagattgcttctatcgctgcttctttgattccgttcttggaacatgacgatgctaaccgtgcattgatgggatcaaacatgatgcgccaggcagttcctttgttgcgtacagaggctcctattgtaggtacaggtattgaaaaacagttggttgaagactctcgtactcagattgcagcagagggtgatggtgttgtagaatatgtcgatgcaacaactattcgtatcttgtatgacagaaatgaagatgaagaatttgtaagctttgaacctgctttgaaggaatacagaattcctaaattccgtaagactaatcagagcatgaccattgacctccgtcctacttgtgataaaggacagcgtgtgaagaagggtgatatcctgactgaaggatattcaactcagggtggtgagcttgcattgggtaaaaacctgttggtggcttatatgccttggaaaggttataactacgaggatgctattgtattgaatgaacgcgttgtacgtgaggacttgctgacttctgtacacgttgatgaatatattttggaggtccgcgaaacgaaacgcggtatggaagaattaacttctgatattcctaacgtgagtgaagaagctactaaagatttggatgaaaacggtattgtacgtgtaggtgcacgtatcgaaccgggtgatatcctgattggtaagattactccgaaaggtgaatcagatccttctccggaagaaaaattgcttcgtgctattttcggtgataaggcaggtgatgtgaaggatgcttcattgaaagcttctccgtcattacgtggtgtcgttattgacaagaagttgttctcacgtgttatcaagagcagaagtgagaagaatgccgataaggctattctgcctaaactgaatgatgaattcgaagaaaaggcagcaaaactgaaagatatcttgattgagaaactattggttttgactaatggtaaggtttcccaaggagtgaaagattatttgggaacggaagttattgccaagggggcgaagttcaccaaacgcgatttggaatcattggattatactattatccagttgagcaagtggacagctgatgctcataagaatgacatgattcgtgacttggtgatgaattatttgaagaaatataaagaattggatgctgaattaaagcgtaagaagtttgctatcactatcggtgatgaacttcctgcgggcattattcagatggctaaggtttatattgccaagaagcgtaagattggtgtaggtgataagatggcgggacgtcacggtaacaagggtattgtttctcgtgtggttcgtcaggaagatatgccgttcttagcagatggtactccagtagatatcgtattgaatccgttgggtgtgccttctcgtatgaatattggtcagattttcgaagccgtattaggtcgtgccggaaaagagttgggtgtgaaatttgctactcctatttttgacggtgcttctatggatgatttaaatgaatggacagataaagctggattgcctcgttattgtaagacttatctttgtgatggtggtacaggcgaacgctttgaccaacctgcaacagtgggtgtaacttatatgttgaaactagggcacatggttgaagataagatgcatgcccgttctatcggtccgtactcccttattactcagcagccgcttggtggtaaggcacagttcggtggtcagcgtttcggagaaatggaagtttgggcgcttgaagcattcggcgcagcacatatcttacaggaaatcctgaccattaagtctgatgacgttgtaggacgctcaaaggcttacgaagctattgtgaaaggtgaacctatgccaactccgggtatccccgaatctctgaatgtattgttacacgaactgagaggtcttggcttgagtatcaaccttgaataataaaaaaatataactctttacattataaataaggaagtatggcttttagaaaagaaactaagataaagagtaatttctcgaaaatctcaattggcttggcttcacccgaagaaatccttgagaattcgagcggtgaggtgttgaagcctgaaacgatcaactaccgtacctacaaaccggaacgtgatggtttgttctgcgagcgtattttcggtccggtgaaagattacgaatgtcattgcggtaagtacaaacgtatccgttataaaggtattgtttgtgaccgatgtggcgttgaagtgactgaaaagaaggtccgtcgtgaacgtatgggacatattcagttagttgtgcctgtagcgcatatctggtattttcgttcattgccgaacaagatcggttatttgttggggctgcctacaaagaaactagacgctattgtatattatgaacgttatgtggttatccagccgggtgtgaaggctgaagatggcattaataaatatgatttgctttctgaagaagagtatttggatatcttggatacacttcctaaagaaaaccaatatttggaagatacagatccgaataagtttatagctaagatgggagcagaagccatttatgatctgctctcaactttggatttggatgctttatcttatgaattacgtcataaagcaagtaatgattcttcgcagcaacgtaagaacgaggctttgaagcgtctgcaggtagttgaatcgttccgtgcatctcgcggacgtaataaacctgaatggatgattgtacgtattgtgccggttattcctcctgaactgcgtccattggttccgttggatggtggccgtttcgctacctctgacttgaatgacttgtatcgtcgtgtgattatccgtaacaaccgtttgaagcgactgattgaaatcaaggctcccgaagtgattttgcgtaacgaaaaacgtatgttgcaggaggctgtcgattccttgttcgataactcacgtaaatcaagtgcagtgaagactgacgctaatcgtccattgaaatcactgtccgatagcttgaagggtaagcaaggacgtttccgtcagaacttgctgggtaagcgtgttgactactctgctcgttcggttatcgttgttggtcctgaattgaagatgggtgaatgtggtattcctaaactgatggctgcagagctttacaagccgtttatcatccgtaagttgattgaacgtggtattgtgaagactgtaaaatctgcaaagaagattgtagaccgcaaggagcctgtgatctgggatatcttggaacatgtcatgaaaggtcatcctgtattgctgaaccgtgcgccgactctgcaccgtttgggtattcaggctttccaaccgcatatgattgaaggtaaagctattcagttgcacccgttggcttgtacagcgttcaatgccgacttcgatggtgaccagatggcggttcacttgcctttgagtaatgatgcgattctggaagcacagatgttgatgcttcaagctcataacattctgaatcctgctaatggtgctcctattactgtgcctgcacaggatatggtacttggtttgtattatattaccaagctgagaaaaggggctaaaggtgaaggcttgactttctacggtccggaagaggctttgattgcttataatgaaggtaaagtggatattcatgctatcgtcaacgtagtggtgaaggacttggacaaagatggcaaaatcgtagatgtgatgatgaaagaaacctccgtagggcgtgtgattgtaaatgaaatcgttccagcggaagtggggtacttgaataccattatttccaaaaagtctttgcgagatatcattagtgatgttatcaaagctgtcggtgttgcacgtgcttgtgaattcttggatggtattaagaacttaggttactatatggcgttcaagggtggtctgtcattcaacttgggtgatattattatcccgaaagaaaaagaagaactggtaaaacgtggtaatgaggaagtggaacagattatgatgaactataatatgggtttcattactgacaatgaacgttataaccaggttatcgatacatggactcacgtgaacagtgacctgtctgatatactttacaagacgattaagaatgatgaccaaggcttcaattcagtatttatgatgcttgattccggggcccgtggttctaaagagcagattcgtcagttgtctggtatgcgtggtttgatggcaaaaccgcagaaagccggtgctgaaggcgcacagattattgaaaaccctattctttcaaactttaaagaaggtttgtctgtgttagagtattttatttctacccacggtgctcgtaaaggtttggcggatacagcgttgaagactgctgatgcgggatacttgacccgccgtctggtagacgtgtcgcatgatgtgattatcaatgaagaagactgtggaacacttcgtggtttggtttgtacggctttgaagaataacgatgaagttattgctactttgtacgaacgtattctaggacgtgtttctgtacatgatatcgtccatcctactactggtaaactgattgtagccggtggagaggagattacagaggatattgcgcaggaaatcgaggattctccgattgaaagcgttgaaatccgttcggtattaacttgtgaatctaagaaaggggtatgtgctaagtgttatggacgtaacttggcatccagtcgtatggttcagaaaggtgaagcagtcggcgtaatcgctgcccaatctattggtgagccgggtacacagttgacattgcgtacattccatgccggtggtatcgcaggtaatatggctgctaatgcaagcattgtggccaagaataatgcacgtttggaattcgaagaattgcgtacggtagatacggttgatgaaatgggtgaggctgtgaaagtggtagtcggtcgtttggctgaagtccgctttatcgatgtgaatacagggattatcctgtcaactcataatgtgccttatggttcaaaattatatgctgcggacggtgatattgttgagaagggaaaactgattgctaagtgggatccgttcaacgctgttattattacagaggctactggtaagattgaattcgagagtgtggttgaaaacgtaacttataaggtagagtctgatgaagctaccggtttgcgtgaaattatcattatcgagtctaaggataagacaaaagtaccttctgcccatattgtaaccgaggatggtaatttgatccgtacttataacttacccgtgggggggcatgttgtggttgaaaacggtcaggcagtgaaagctggtgacattattgtgaagattcctcgtgctgtaggcaaggctggtgatatcactggtggtcttcctcgtgttacagaactgtttgaggctcgtaacccatctaatcctgctgtcgtttctgaaatagacggtgaaattactatgggtaagattaagcgtggtaaccgtgaaattattgtcacatctaagacaggtgaagtgaaaaagtatttggtgaatctgtctaaacaaatattggttcaggagaatgactacgttcgtgccggaactccgttatctgacggtgcgattactcctgctgacattttggccattaaaggtcccacggctgtacaggaatatatcgtaaatgaagtgcaagacgtttaccgtttgcagggtgtgaagattaacgacaaacactttgagattattgttcgtcaaatgatgcgtaaggtagaaatcgatgagccgggcgatactcgcttcttggaacagcaggtagtggataagcaagagttcatggaagaaaacgatcgtatttggggcaagaaagtagttgttgactctggtgattctcagaatttacagccgggtcagattgttactgcccgtaagttgcgtgatgagaacagtatgttgaaacgtcgtgatttgaagcctgttgaggtacgtgatgctattcctgctacatctactcagattctgcaaggtattacccgtgccgctttgggaacttcaagtttcatgtctgctgcatcattccaggaaacaacgaaagttttgaatgaggctgccatcaatggtaaggttgatagattggagggtatgaaggagaatgtgatttgtggtcacttgattcctgccggtaccggtcagcgtgaattcgaaaagattattgttggttcgaaggaagaatatgatcgcattcttgctaatcgtaagaatgtactcgattatagtgaggtagagtaatttttaatacatacactgtaaaagaggctgatttctgtttaagaaatcagcctctttaggtttatagtaaatgctataggaaaattatatagaataatcagtatgttgtattattacaaataaatgtctatatttgtactccaaccaaagaatagaagttggggaccttgaaattcagaatatttttttaatgctaaagtataaaatcatggaaaacgaaaaaaataacaatcagttgcagatagagttgaaagaagaagtagctcaaggaacgtatgcaaatcttgccattattacccattccagttcggaatttattgttgattttgtgcgtgtaatgccgggattacctaaagctggagtgcagtcacgtattgtactgactcctgaacatgcaaaacgtttgatgtatgcattacaggagaatgttgcaaaatacgaacgtaattttggacctattcgaatgccggaagaaatgaatgggggaaataatggaccggatggaaaaacattcattcctcctataagcggatttaaaggggaagcataagggcttttgtagcaaaaataacatagtagtctgtttttcaaaaacttttttgagaaacagactatttttattagtagaaagtattgtttattaaaatgttattcgtaactttgcagcccaaaatgtatagttttggacttagtacagcaaattaataaacaatatataataattaaaaatcaaacaaaatgcctactattcaacaattagtaagaaaaggaagagaggttttggttgagaagagtaaatctccggcactggattcatgtcctcaaagacgtggcgtttgtgttcgtgtgtatactactactccgaaaaagccgaattcagcaatgcgtaaagttgctcgtgtgcgtctgactaactctaaggaagtaaactcttatattccgggagaaggtcataacttgcaggaacactcaatcgtgttggttcgtggtggtcgtgtgaaagaccttccgggtgtacgttatcacatcgttcgtggtactttggatacagcaggcgtagctggtcgtacacaaagacgttctaaatatggtgcgaagcgtcctaaagcaggacaagctgcagctcctgcaaaaggaaaaggaaagaagtaaattgtaactgaattcctgaaacaaagaatattaatttaagttttggtttgttggaataagctataaaggttgagtaaatgcttcagaggaagcgttgaagtaaacggaaaaagtgcagccccaaacaaaaacattattttgagaaaaaatgagaaaagcaaaaccaaaaaaacgtgtgatccttccggatccggtatttaatgatcagaaggtttctaaattcgtaaatcacttgatgtatgatggaaaaaagaatacatcttatgagatcttctatgcagcactggaaacagtgaaaacaaaacttcctaatgaagaaaaatcagctttggaaatctggaagaaagctttggataatgtaactccgcagattgaagtaaagtctcgtcgtgtaggtggcgctactttccaggttcctactgaaattcgtcctgatcgtaaagagtcaatctcaatgaaaaacttgattcttttcgctcgtaaacgcggtggtaaatcaatggcagataaactggcagctgagattattgacgctttcaacgaacagggtggtgcttataagcgtaaagaagatatgcaccgtatggctgaagctaaccgtgcattcgctcactttagattctaatcaagtaataattaataagtaaaggacgaagatggctaaacatgatttgcatttgacccgcaatatcggtatcatggctcacattgatgctggtaagacaacgacttcagaacgtattttgttctacactggcttgactcacaaaattggtgaggtgcatgatggtgcagcaacaatggactggatggagcaggagcaggaacgtggtattactattacatctgctgctactactactcgttggaaatatgcgggaaatacttataaaataaacttgattgacactccgggacacgttgactttactgctgaagtagaacgttctttacgtgtcttggatggagctgttgcagcttattgtgcggttggtggtgttgaacctcagtcagaaaccgtatggcgtcaggctgataaatacaatgtgcctcgtattggttacgttaataaaatggaccgttctggtgctgactttttcgaagttgttcgccagatgaaggatgtattaggcgcaaatgcttgccctgtggtaattcctattggtgctgaagagagcttcaaaggagttgttgatttgatcaaaatgaaagctattttgtggcacgatgaaacaatgggtgcagattatagcgtagaagaaattccggcgaacttggttgatgaagctaatgaatggagagagaaaatgctcgaaaaagtggctgaatttgacgatgctttaatggagaaattctttgatgatccttctacaatcactgaagaagaaatcttgcgtgctttgcgtgcaggtacattgaaaatggatatcgttccgatgttctgcggctcttcattcaagaataagggagttcagacattgcttgactatgtttgtgcgttcttgccttctccgttggatacacctgctattgtaggtactaatccgactacaggagcagaggaagaccgtaaacctagcgaggatgaaaaaacatcagctttggcatttaagattgcaactgacccctatgtcggacgtttgactttcttccgcgtttactctggtaaggtagaggctggttcatatatctataacactcgttcgggtaaaaaagaacgtgtatcacgtttgttccaaatgcactcaaacaaacagaatcctgtagaggtgattggagctggtgatattggtgccggtgttggtttcaaggatatccgtacaggtgatacgttgtgtgatgaagatgcaccgatcgtattggaatcaatggaattccctgatcctgtaattggtattgcagttgaacctaagactcagaaagatttggacaagttgtctaatggcttggctaaactggctgaagaagacccgacatttactgttaagactgatgagcagtccggtcagactattatttccggtatgggtgagcttcatttggatattattatcgaccgtctgaaacgtgagtttaaagtagaatgtaaccagggtaaacctcaggttaactataaggaagctatcactaagactgttgaattgcgtgaagtttataagaagcagtctggtggtcgtggtaagtttgccgatatcattgtggcaatcggtccggttgacgaagactttacacaaggtggtttgcagtttattgatgaagtgaagggcggtaatgttcctaaggaatttatcccatcagttcagaaaggtttccagaccgcaatgaagaatggtgtgttggcagggtatccgcttgattcactgaaagtagttttgaaggatggttcattccatccggttgactctgaccagttgtcattcgagatctgtgctatccaggcttacaaaaatgcatgtgctaaagcaggtcctgtattgactgaacctattatgaaactggaggttgtaactcctgaagaaaacatgggtgatgttattggtgacttgaataagcgtcgtggtcaagtagaaggtatggaatcaagccgttctggagctcgtattgtaaaagctaaagtacctttggcagaaatgtttggttacgtaacagctttgcgtactattacttcgggtcgtgctacatcgtctatgacttatgatcatcatgctcaagtttccagctctattgctaaggctgtacttgaagaagtgaaaggtcgcgtagacttagtataataaaaaaaagcaggggctacgggttagcgaatgactcttaatccggtcccactttatatttaatcattttttaatttaaaatttaatgagtcaaaaaattagaattaaactgaaatcttacgatcacaacttggtagacaagtctgctgaaaagatcgttagaacagtgaaggcaacaggtgctattgttagcggtcctattccattgcctacacacaagcgtatttttacggtaaaccgttcgactttcgttaacaagaagtcacgtgaacagtttgaattgtcttcttacaagagattaatcgacatctatagctcaacagctaagacagtagacgctctgatgaagttggaattaccgagtggagttgaagtagaaattaaagtttaatgcatttaaaaattaactgaaatgccaggattattaggaaagaaaatcggaatgacatccgttttcagtgctgatggtaaaaatgtaccatgcactgttatcgaagctggtccttgtgtagttactcagattaagagtgttgagaaagacggctatgcagctgttcaggtaggtttccaggacaaaaaggaaaagcatactaccaaacctttgatggggcactttaaaaaagctggtgtaactccgaagagacacttggccgagttcaaagattttgaaacagaattgaatttgggagacactattacagtggagttgttcaatgatgcggcttatgttgacgttgttggtacttctaaaggtaaaggcttccaaggtgtagttaaaagacatggatttggtggagtaggtcagactactcacggtcagcacaaccgcgctcgtaaaccgggttctatcggtgcatgttcttaccctgcaaaagtattcaaaggaatgcgtatgggtggccaaatgggtggtgaccgcgttactacacataacttacaggtattaaaagtgattccggaacacaatcttcttttgattaaaggttcggtaccgggttgcaaaggttcaatcgtaataattgagaaataatggaagttaacgtattaaatattaaaggtgaagacaccggaagaaaggttacgttaaacgaatctatcttcggaattgaacccaatgaccacgctatctatttggacgttaagcagtttatggctaaccaacgtcagggaactcataaatctaaagaaagaagcgaaatcagcggttctactcgtaaattaggtcgtcagaaaggtggtggcggtgctcgtcgtggtgatatcaactctccggtattggtgggtggtgctcgcgtgtttggtcctaaacctcgtgactattggtttaagttgaataaaaaagttaagacattggctcgcaagtcggcattgtcttataaagctcaagaaaacgcaatcattattgttgaagacttcacatttgaggctccaaagactaaggatttcgtttctatggtaaataatcttaaaattgctgacaaaaagttgcttcttgttttgccggaagctaataaaaatgtatatttgtcagctcgtaacatcgaacgtgctaatgtagcaattgcttctgcattaaatacttacaatgtattgaatgctgaaactcttgttgttacagaaaactcgctcaaggctatcgagaatatcttatcttaatttaaaaaggaggcttagataatgggaattattattaaaccgttggttactgagaaaatgactgcaattaccgagaagttaaatcgattcggctttattgtacgtcctgaagctaacaagttggaaattaagagtgagattgaagctttgtataatgttacagtagtagatgtaaatacgctaaaatactcgggaaagagtaaaagccgttacactaagtctggaatcatcaatggtcgtacgaatgcttataagaaagctatcgtaacattgaaagaaggcgatactattgatttttatagcaatatttaataaagatggcagtacgtaaatttaagcccacaacaccggggcaaagacataaaattattggtacttttgaagagattactgcatcggtaccagaaaagtctcttgtatttggaaagcgctcaacaggtggtcgcaacaacgttggtaaaatgacaatgcgctatatgggcggtggtcacaagagaaaatacagacttattgatttcaagagaaacaaagacggtgtacccgcagttgttaaaactatagaatacgatccgaatcgttcggctcgtattgctttgctgttttatgctgatggtgaaaagagatatattattgctcctaatggattgcaagttggtagcacattgatgtctggagcgaatgcagcgcctgagattggtaacgcacttccgcttgagaacatccccgttggtactgtaattcataatatagaattacgtccgggccaaggtgcagctttggtaagatcagctggtaattttgctcagttaacttcaagagaaggcaagtattgtgtgattaaattgccttcaggtgaggtaagacaaatacttagtgcttgtaaggctactattggtagcgttggtaactctgatcatggattggaatcttccggtaaggcaggtcgtactcgttggatggggcgtcgtcctcgcaaccgtggtgttgttatgaatcctgttgatcacccgatgggtggtggtgaaggacgcgcttcaggaggtcatccaagatcacgtacaggcttgtatgctaagggcttgaagacaagagctccgaagaaacagtcttctaagtatattattgagagaagaaagtaataactgattaattgagtaaattatgagtcgttcattaaaaaaaggtccatatattaacgttaaacttgaaaagaaagtgcttgctatgaatgaaagcggcaagaaggttgtcgttaagacttgggctagagcttcgatgatctcgcctgattttgtagggcacacagttgcagttcataacggaaataaatttattcctgtttacgttacagaaaacatggtaggacacaaattgggtgaatttgcaccgacacgtacattccgcggccatgcaggtaataagaaaaaataagcaggataatctgaagaaataataaagtaataaataatgggagcaagaaaaaaaatatcggctgaaaaaagaaaagaagcccttaagaccatgtattttgcaaagttgcaaaatgttcctacttctccgcgaaaaatgcgtctcgtggctgacatgatccgtggtatggaagtgaaccgtgcactgggtgtcttgaagttttcttctaaagaagcttctgcaagagtggaaaaactgttgcgctctgctattgctaactgggaacagaaaaacgaacgtaaggcagaaagtggcgaattgtttgtaacaaagatttatgttgatggtggtgcaacgctgaaaagaatgcgtccggctccgcagggaagaggttacagaattcgtaaacgttcaaatcacgtgactttgttcgttgattctaagagtactaatgataatcaaaattaagactagatgggacagaaagttaatccgataagcaaccgtttaggaattatcagaggatgggattctaattggtacggtggcaatgattatggtgatgctttgttggaagacagcaaaatccgtaaatatttgaatgccagacttgcaaaagccagcgtttcaagaattgttattgaacgtacactgaaattggtgacaattacggtttgtacagcacgtccgggtattatcattggtaaaggcggtcaggaagttgacaagctgaaagaagagttgaagaagatcacggacaaagatattcagatcaatatctttgaagtgaagagacctgagttggatgctgttattgtagctaataatatcgctcgtcaggtagaaggtaagattgcctatcgccgtgccatcaagatggctatcgctaacacaatgcgtatgggcgctgaaggtatcaaagtgttgatttcaggacgtttgaatggagcagaaatggcccgttctgaaatgtataaagaaggaagaactccgttgcatactttccgtgcagatattgactactgtcatgcagaagctttgactaaagttggtttgctgggtattaaagtatggatttgccgtggtgaagtgtatggtaagagagaattagcgcccaactttactcagactaaagagagtggtcgtggtggtaatggcaacaataacggtggtaagaacttcaaaagaaagaaaaacaatcgctaacggatttgaattttaggaattatgttacaaccgaaaaagacaaaattcagaagacagcagaagggcagtcagaaaggaaatgctcaaagaggaaaccaattggctttcggctcatttggtattaaatctttggagactaaatggattacaggtagacaaattgaagctgcacgtattgcggtaacaagatatatgcaacgtcaaggacagatttggatccgtattttcccggacaaacctattactcgcaagcctgctgatgtgcgtatgggtaaaggtaaaggtgctcctgaaggtttcgttgctccggttactccgggtcgtattatcatcgaggcagaaggtgttccttatgaagtagctaaagaagctttgcgtcttgcagcacagaagcttcctgttactactaagtttatagttagacgtgattacgatgctcaaaatcaaaatgcttaatttattatgaagattgcagaaattagagaaatagctaccaatgaattggcagaaagaattgaagctgaagtagccaattacaatcagatggttttaaatcattctatctctccgctggataatcctgcacagattaaaaagttacgcagaacgattgcgcgtatgaaggcagaattgcatcagagagaacttaacaaataataatggtcctcatggaagctagaaatttaagaaaagaaagaacaggtgttgtagtaagcaataagatggataagaccattactgttgctgctaagtttaaagaaaaacaccctatttatggtaagttcgtttctaaaacgaaaaaataccatgctcatgatgaaaagaatgaatgtaatgtaggtgatacagtacacatcatggaaactcgtcctttgagcaaaactaagagatggagattggttgaaataattgaaagagctaagtaattatgatacaagtagaatccagacttacagtgtgtgacaacagtggcgctaaagaagctctttgtatccgcgtattaggcggtacgaagagacgttacgcttctgtaggggatgtcattgtagtttctatcaagagtgtaatcccctctagtgatgttaaaaaaggtgcagtatcaaaggctttaattgtacgtactaagaaagaaatccgtcgtgctgatggttcttatattcgttttgatgataatgcttgcgtattgttgaataatgcaggtgaaattagaggaagtcgtatttttggccctgttgcaagagagttgcgtgctgcaaacatgaaagtggtatcacttgcacctgaagtactttaattttgtaaaagatttaagtaatgagtaaattacatataaaaaaaggcgatacagtttacgtaaactctggtgaagataaaggtaaaactggccgtgtgctgaaagttcttgttaaagaaggacgtgcacttgtagaaggtatcaatatggtatcgaaaagtaccaaacctaatgcaaagaaccctcagggtggtatcgtaaagcaggaagctgctatacatatctcaaacttgaatttggttgatcctaaaacaggcaagccaacacgtgtgggaagaagagaaagttctgatggtagaacatttgttcgttatgctaaaaaatcaggagaggagattaaataatgagtaatactgctagccttaagaaagaatatgcagagcgcattgcgcctgcattgaagaatcagttccaatattcttcaacaatgcagatccccgtacttaagaagattgttatcaatcaaggattgggtatggctgttgctgataagaagattattgaagttgctattaatgagttaacagcaattactggtcagaaagctgttgcaacagtttcacgtaaagatatcgctaactttaagttacgtaagaaaatgccgattggcgtaatggtgactttgcgtcgtgaaagaatgtatgagttccttgaaaaacttgttcgtgttgctttgccacgtattcgtgacttcaaaggtatcgaaagcaagttcgatggaagaggtaattatacattgggtattcaggaacaaatcattttccctgaaataaatatcgatagtattactaaaattctcggaatgaatattacctttgtaacttctgctccgacagatgaagaaggttatgctttgttgaaggaatttggtttaccgtttaaaaactcaaaaaaagattaatatattatggcaaaagaatcaatgaaggctcgtgaagtaaaaagagccaaacttgtagccaaatatgctgaaaaacgtgctgcgttgaaaaagattgtcaactcaggtgatcctgctgaagcttttgaagctgctcagaaattacaggctattcctaagaatgctaatcctattcgtttgcacaaccgttgtaaattgaccggtcgtcctaaaggctatattcgtcagttcggaatttcaagaattcagttccgcgaaatggcttctaatggtttgattccgggcgtaaagaaagcaagctggtaattctttttatttttaaatattgtcagggtagtcctgattaatttaatttattattatatgacagatccaatcgcagattatctcaccagattgagaaatgcaattagtgcaaagcacagagtagtagaagtgcctgcctcaaatttgaaaaaggaaatcactaagatccttttcgacaaaggctacattctgaactacaagtttgtagaagatggtcctcaaggaactatcaaagtggctttgaagtacgactcagtaaacaaagtaaatgctattaagaagcttattagagtttctactccgggtttacgtaagtatacgggttacaaagacatgccgagagttattaatggtttaggtattgctataatatctacttccaaaggtgtaatgactaacaaagaagctgctgaactgaaaatcggtggtgaagttctttgttacgtatattaataggaggataagcaatgtcaagaataggaaaattacccattagtattcccactggagtaacagttactctgaaggataatgtagttactgtaaaaggtcctaaaggcgaacttagccaatttgttgatccttctatcaatgttgcaattgaagatggacatgtgatgttgacagaaaacgaaaacgcgatgttggataacgtaaaacaaagacatgcttttcatggcttgtatcgttctttggttaacaacatggttattggtgtttctgaaggttataagaaagaactggaacttgtcggtgtaggttaccgtgcttcaaacaatggtaatattattgatttcgctttgggttatactcataatatctttatgcagttacctcctgaaatcaaggtagaaactaagtcagaaagaaataagaaccctcttattatattggaatcttgtgacaaacaactgctgggtcaggtttgttcaaaaatacgttctttccgtaagccggaaccttataaaggtaaaggtattaagtttgttggcgaagaaattcgtagaaagtctggtaagtcagccggtgccaaataatttacataaaattgtattatcatgacaacaaaattagaaagacgaatcaagatcaaatatagagtacgcaataagatttcaggtactactgaacgtccgcgtatgagtgtgtttagaagtaacaagcagatttacgttcaagttatcgatgacttgtctggtagaactttggctgcagcttcatctttgggaatggaagctatgcctaagaaagaacaggctgctaaagttggtgaactgattgccaagaaggctcaggaagctggtattacgactgtcgtattcgaccgtaatggttacttgtatcatgggagaataaaagaagtagctgacgctgctcgtaacggtggacttaaattttaatcaattatggcagttaataatagagttaagataactaacgatatagagttaaaagacagattggttgctatcaaccgtgttacaaaggtaacaaagggtggtagaacattcagcttctctgcaattgtcgttgttggaaacgaagacggtattattggttggggccttggtaaagcaggtgaagtaacagctgctattgctaaaggtgttgaagcagctaaaaagaacttgactcgtgttcctgtattgaaaggtacagttcctcatgaacagtcggctaaatttggtggtgctgaagtattcatcaagccggcttctaccggtactggtgtggtagcaggtggtgcgatgcgtgctgttttggaaagtgtgggtgttacagacgttttggctaagtcaaaaggttcttctaatccgcacaacttggtaaaagctactattttagctttgggcgagatgagagatgcccgtatggttgctcagaacagaggcgtaagtatggaaaaagtatttagaggataaggaggaattatgtcaactattaagattaaacaagtaaaaagtagaattggtgctcctgctgatcaaaagagagtactcgatgcgctgggacttcgcaagatgaatcgtgtggttgagcacgaagcaactccttctattctgggaatggttgaaaaggtaaaacacctggttgccatcgttaagtaattcattgttaataaaaaaactaattacgatatgaatttaagtaatttaaaacctgcagaaggatctacaaagactagaaaaagaattggccgtggcccgggatctggtttgggtggtacttctacaagaggtcataaaggtgctaaatcaagatcaggttattcaaagaagattggttttgaaggtggacagatgcctcttcaacgtcgtgttccgaagtttggttttaagaatattaaccgtgtagaatataaagctattaaccttgaaactattcagaaattggctgaagctaagaatctgactaaggtaggtatgaatgactttattgaagctggtttcatttcttctaatcaattggtaaaagtactaggtaacggtagtttgactactaagcttgatgtggaagctaatgctttttcaaagagtgcggtagctgcaatcgaagctgttggtggtaatgcagtaaaactctgattcaatgagaaaatctattgaaacattaaagaatatatggaaaattgaggatctgagacaaaggatcctcattactatattatttgttgcaatttacaggtttggttcttacgtggttctgccaggtattaaccctgctatgttaactcagttgcataaacaaacgagtgaaggtttgttagccttgttaaacatgttctctggaggagcgttttccaatgcatctatttttgcattgggaatcatgccatatatctcggcatcaattgtaattcagcttttggcgattgctgttccctactttcagaaaatccagcgtgaaggtgaaagtggtagaagaaaaatcaatcagtatactcgtatattgacaattgcaattttggttttccaagctccctcatacttgcttaaccttaagatgcaagccggaccatcacttaatgcttcattagattggacattctttataattacttctaccatcattttggcagctggaagtatgtttattctgtggcttggagaaagaataacagataaggggataggtaatggtatatcattcatcattttgattggtattattgcccgtctgccacaatctttattccaagagtttgtttctcgtctggcttctccgggtgcaggtggtatcatcatgtttttgttggaaatagtatttttgttgttcgttattgcagcagcaattttgctggttcaaggcgtccgcaaagttcccgtacagtatgcgaaacgtattgtaggaaacaaacaatatggtggtgcaagacaatatattcctttaaaggtgaatgctgcgaatgtaatgcctatcatctttgcccaggcaatcatgtttatccctattacattggtaggtttctcaaatgctgcaacagcaagtggtattgtacgtgcatttgtagatcatactagcttctggtataattttgtttttgcaatattgattattgtgtttacatacttctatactgcaataacaattaatcctaaccagatggcagaagatatgaagagaaataatggttttattccgggaataaaaccaggtaagaatacagctgagtatatagatgcgatcatgtctcgtattactctgccgggttctatattcttggctcttgtagccatcatgcctgcatttgccggtatttttggagtaaaagctgagttcgcccagttcttcggtggtacatccttattgattcttgtaggtgttgtattggatacactccaacaggtagaaagtcatttgctgatgcgccattacgacggattgttaaattccggaagaatcaaggggcgtgctggtaatgttgctgcatattaattagtctgagatgatatttcttaagacagatgatgagatagagctgcttcgtcagagtaacctacttgtaggtaggactctggctgaagttgctaaattgataaaacccggtgtgacaactaaggaacttgacaaggtggctgaagagtttattagagataatggagctgttcctacttttaaaggttttcccaatcagtatggtgatccgtttcccagtaccttgtgtacttcggtaaatgatcaggttgtacacggtattcccaatgatatccctttgaaagaaggtgatattgtttctgttgattgtggtacttatatgaatgggttttgtggggattcagcttataccttctgtgtaggagaagttgatcctgaggtcttgaaacttttgaagacaacaaaagaagctttatatttaggtatagagaatgccattcatggaaagcgtttgggtgatataggttttgctgtccagcaacattgcgaggctaattcctatggtgtggtaagagaattcgtaggtcatggtattggaaaagatatgcatgaagatccgcaggtacccaattatggaaaaagaggatacggcactcagttgaaaaagggtatgtgcattgccatcgaaccgatgataacattgggttcccgccagatagtaatggaaagagatggatggacagtgcgtacacgcgataggaaatgtgccgctcactttgagcatacagttgcaataggagttgggaaggcagatattttgtcctcatttgaatatgtcgaacaagtattaggagataaagcaatttaatatggcaaagcaatccgcaatagaacaagatggagttatagttgaagcattgtctaatgcaatgtttcgtgttgagctagaaaacgggcatgagattactgctcatatctctggcaagatgagaatgcattacattaaaatattacccggggataaggtcagagtagagatgtctccttatgacttatctaaaggaagaatcgtttttagatataaataaaaaagaaataagatatgaaagtaagagcatcattaaagaaacgtacgccggaatgcaaaatcgttagacgaaatggccgtttgtatgttattaacaagaaaaatcctaagtataaacaacgtcaaggataatttattatttttgcaaaaaaaataatttagtatatggctataagaatagttggtgtagatttgcctcagaataagagaggcgagattgcgttaacctatgtatatggtattggacgcagtagttcagcaaaaatcttggataaggctggtgttgacagagatgtgaaagtaaaagactggacagatgaccaggctgctaaaattcgtgaaatcattggtgctgaatacaaagtagaaggtgatcttcgttcagaagtgcaattaaacattaagcgattaatggatattggttgctatcgtggtgtacgtcaccgtattggtctgccggttcgtggccagagcactaagaacaacgctcgtacacgtaagggaagaaagaaaacagttgcaaataagaaaaaagctactaaataataattgttgatatggcaaaaaaaacagtcgcagctaagaagagaaatgtgaaggttgacgctaatggacagttgcatgttcattcttcattcaacaacatcattgtatctctggcaaatagtgaaggtcagattatctcatggtcttctgcaggtaagatgggatttagaggttctaagaagaacactccttatgcagcacagatggctgcacaagattgcgctaaggtagcgtttgatcttggcctgagaaaggtgaaagcttatgtaaagggtcctggaaacggacgtgagtctgctatcagaactgttcacggagctggtatcgaggttactgaaattattgatgtaactccgcttccgcacaacggttgtcgtcctccgaaaagaagaagagtttaatagataacctatttttatatgtaacttgattttgttaataatggattgcacttcctttctgtaatcgcggctgcaacaaattaagttcattagtaacaattaaattagaaaaagaaatggctagatatactggaccaaaatcaagaattgcccgtaaattcggtgaaggaatctttggagcagataaagttttatctaagaagaattatcctcccggacaacatggtaacaacagaagaagaaagacttctgagtatggtgtcatgttggcagaaaaacaaaaagctaaatatacttacggtgtattggaaaaacaattccgtaacctgtttgaaaaggctgcaagtgctaacggtattaccggtgaaatcttgttgcagagtttagaggctcgtcttgacaacgtggtgttccgtttgggtattgctccgactcgtgctgctgcccgtcagttagtaagtcacaagcacattacagtagatggaaaggtagttaatattccttcattctctgtaaaacccggtcagattgtgggtgtacgcgaaagatctaaatctttggaagtgattgctaattcacttgcaggattcaatcacagcaaatatccttggttggagtgggatgaaagttctaaggtaggtaagttgttacatatacctgaaagagcagacattcctgaaaacattaaagaacacttgatcgttgaattgtactctaaataataattaatttcatggcgatattagcatttcaaaaacctgataaagtattaatgttggaagcggactccagatttggaaaatttgagttccgtccactcgaacccggtttcggtattaccgtaggtaatgctttacgccgtattcttctttcttcattggaaggatttgcaatcaacacgattaagatcgaaggtgtagaacatgagttcgcatctgtacccggtgttaaagaagacgtgaccaacattatcttaaatctgaagcaagtcagatttaagcaagtagtagaagagttcgaaaatgaaaaggtaagcattaccgttgagaattctagtgaatttaaggcaggtgatataagtaagtatttgactggatttgaagtgttaaatcctgaattggttatttgccatttagattcaaaagcaacaatgcagatggacattaccattaataaaggtagagggtatgttccggccgacgaaaaccgcgaatattgtaccgatgttaatgtaattcctatcgattctatttacacaccgatacgtaatgtaaaatatcaggtggaaaacttccgtgttgaacagaagactgactacgaaaagctggtattggaaattactaccgatggttccattcacccgaaggaagctttgaaagaagccgctaaaatattgatttatcatttcatgttgttctctgatgaaaagattactcttgaaacatccgatgtggacggcaatgaagaatttgatgaagaagtattgcacatgcgccagctgcttaagactaagcttgttgatatggacctctcagttcgtgccttgaactgcttgaaagctgccgatgtggaaacattgggtgacttggtacagttcaacaagacagatctgttgaagttcagaaacttcggtaagaaatcgctcacggagcttgatgatttgctcgagggtctgaatctgtcgtttggaaccgatatctctaaatataaattagataaagaataaaaaatgagacataataagaaattcaatcatttaggtcgtactgcttctcatagaagtgctatgttatctaacatggcttgttctttgatcaagcacaaaagaatcactacgactgttgcaaaggctaaagctttgaagaaattcgttgagcctttaattacaaaatctaaagacgacacaactaattcacgtcgtgttgtatttagcaacttgcaagataagtttgctgtaacggagttgttcaaagaaatctctgtaaaagtagcagatcgtccgggtggttatactcgtatcatcaaaacaggtcatcgtttgggtgataatgctgaaatgtgctttatcgaattggtagattacgatgaaaacatggctaagactgcaactgctaagaaagcaactcgtactcgtcgttctaagaagagtgcagccgctacagaagctcctgcagcaccggcagctgaaactacagaggaagcccctaaagctgaataatctgtaatcatcatatatataaaagccatagctataaaagctgtggctttttttattttatgccctgaccggcagtaatgagaagggacattcattaaatattacaaaatcagccaactaattcatacacaaagtattgcgaattagttggcttttttgtatctttaggtattcc

SEQ ID NO: 3883 - DNA, 34966 bp, Unknown
  gut microbiota DNA sequence
caacatgtcctttcttaagaactattttaaaaatagtatcatttgactgatatacccatgtcccagtataagcatctagattttttgttggagcaatttccttttgggcaaaaataactgtgcttataaaaagcaaacacaaaataaattctattcttttcatgacttttctttttattggttacattccatatttatagatttcccattagaagctagttcctgagcattccaagtcggattactttcatcaatattcgaactaaacatcactgacagaccggagttattacgatctaagaatttaagcaatcccccgatgcattcatcaactcctcctctgactccgggagtatccacttcataattccatttatctagaagttcaccatttctaactttagtagcaaaagcattgaaatctaccggagaagttatcatgatactcagacatccaaacgttgaaacaattccataagtaaaattctctgatttcacatatccctgttggtatcgtatagctaaagcctttaaatctgcccatgaagtaatcatagagcctgtagggtgggaatggtaccattccatgatttcttttcctgctatttgatcatttgtgaatttggcacttcctgattcttgtacgttcgggaaaatagtttgcccgtctgaagtctgtataaaccttgctccacagtattgcctgcagaaaatgtttttctatatacatcttttatacgcgatttaaatgctgcgtcctgcgataatgttttagcacgtttacaaggagtaggaggtgtttcaggaggatttgaaggaggattatatccaccacctccgccatccatttcgtcatcatccaatgaaacgcaaacttcatgatactcaggatgtaaatacttgtcgcaaattacatcgatgccgggcagccccagttcatgatcccaaacgatatcattatgacaattccgcttttccatccagtctatttccgtattacatacggattgtcctcttcctctttgcaaactcatacggtatccttcctctgttcccgaagaaatggaggctgttattttccctgattcatatttccaaccatttaccaatccataattgaaattgtagaataaaacttttccatcaaaatcagcttcacgatgtaaataagaattgttttcaaaagaggtggtatgcatcaaataatcataagtacctatgaataccatgatgaagttgtaaatctcacctgtttctagattcttcaatattaccatgcgtgctacattatatattttatccaaatcatcttgtagttcatatttttcttttgtctcgttatccataaaaaatgtactaccgcttgtcattagagtcgtttcaactacctctaaatctccttttttactttctttagccttgttccaattaggctttgctggaattcgcccgtcagcacttaaggatctaactgtagtagctgagggattggtggcattataccattgttctgctttagcaatggtcaattctttattgctgtcaaaaataacttcatcagttacattggaggaccattcatcttgccaacatgaataaactatcatactgacaaaaactaaaatgccaacaatagaaatttttcttttaagtgtttttcgtttcatagtatctatttttgatttgtggttagtatgggttgagaatatttgcaataatatcaaaaaaagtaactttacaaaacccttaagtaaaaagatagttattagagagcctttatttaaaagccttcggcttcgaagctatctttttttcgaaagtatctgtaataagcgttagtgccccatctccggtaatattacaagctgttccgaaactgtcctgtaatgcaaaaatcgtaagtagtaatgccgttccggcttcattaaagtgaagaacagagatgattagccctaaagaggcaagtactgttccccccggtactcccggtgcaccgatggcgaataatcctaataacaggatgaataaagtaatttgtaatatactgggcatacttccataaagcatttgggatacagtgagtacaaatacggtttctgtcaggatagagccgcataggtgtatattggcgaataaaggtatcgtcacatcactgatttcttttcgaaggatagggcttttgcgggcacattccaacgccactcccagcgtagctgctgaagacattgtacctaatgctgtgaggtaagcaggaccatagtatttcaatacctgccaactattttttcttgagtaaacagctgcaatgaaataaagcaatgacagccagatgaaatgacaaacaataacaactatcaatacggagaggaataccggtaactgcttcgtaacagctccctgatagctaagaatgcagaagttagcggcaataaatacgggaagtacgggaagcagtactcttttcaccaattcaagtaccatcttttgaaaagtatccagtagttttgatatttcatccgatttaacccaagcagtagcaagtcctatcaaagctgccagtacaagggccgtcataacattcatgaccggtggaatatctatttttagtaaattttccggcaatgctttcagtgtattggcatcatcggctatatgcagaaaaggaatcacattgtaacctacggctgctccgaaaaaagaggctccgatagatgataggtaggctatgccgaaagcgaataaaagcatctttgatgcattgctgcgcaaatgggcaatagagggggctatgaatcccagaataataaggggaaccaggaaaaatataatctgtcccgtgatgtgctttatacagataacgacttccagcactgcgtcattaacaacaaagcctgccaacagtccgataattacggcaataagcagttgtacgatagtattacttagaaactttttcatatatttttttcagttaaacgatgaatatccggaaaaagtttgctgtataggtatgttatttcatagcttgaacaaagatagaaaaataaaatagaatgccgtatgaaaaatagaaaaagacgggaaacatcacgctccccgtcttacaaagtctttttgccttatgctaataccttaaattaagcgaaacatttagactctctcttataaataatcattattattggaatatgaattaaaagttgtttttacctgtatcccaccatagacgggtaccgccgttgtctgcaccaccaagagccgtacacagatttttatactgctcaggatcttttttggcatcatcttgtgagaaggggaggcggcgaatcatgatgtctgtatcaattgtaccattgctgttgttggtttgtactttgaataatttcggatatccggtacggcgctgttctgcccatgcttccatgccttctggccagcaagcaatccatttttgagtgataattttttcaagttgttcttcttgattaactgcatcgtcaaaattgggagtggtggttattaatgctttcatgtcttttccggggcctgctgcgtaattaatgtaatctgtcggtttacctttacttgtcagatataggcttgcatttccggctccccattggttgaatgaagtttggacaccggtttcataacattgctttgcgctttcgtttttcggattgatacctcgtaaagatgcttcggcacgtaagaaccaagtttctgctgctgtcagaagaacggcgggtgtggatgctgtgattgtttgggtgttgataaaggaatagctttggtaataattggggtcaccgtccttggcatatactccttgaggtactcctagatattcctctgtatgctctgccaatgtcgccggattataatatatactgatgcgtggatctttataaccgtttaggacagaagctattgttgctcccatataggtttctccccaaccggcaacacctgctaacgggttttgataccccttaccggagatttgtatgttttcatcagaagattctatgacaccataagagttttctaatgcttttcgggcttcactggtagcaagtgtcttatttacattagatacgcgcatagctagacgaagacgtaatgaattggcaaattttatccatctgctggctgtaggacaattgcacatattaatgcttttcacgccatcttctttgccgccttctttcaaataagtatccaatgcgtctacagctttatccagatcatcaaagaatgctttataagcttcttcctgggtatcaacagagtttgtttcgttttttccgaatttagaatagacaatagggccataagtatcagttatacggtgcatggcttctacttttaaaataagggttgcaccataaaaatgtttgtatttggcttcatcttgtgtaattaatgttgatttatgggctactggaaatatataattataagtataattccacgcactggctgtccatccggcctctaatgcatatactgtatttttatcgctgaatttggaggcaaaatcatgaaaatatcctgagaacatatcatgattcaagttttggaatgtctgccaaggccaagtggtgccttctccccagtcgtagttaaaataaatacctttttgaattgtctcaaagttagtagtgtatttttggaaatcatattcttttacagtatcatcaaaactaccgttgattttattgtcagattcgaatccgtctgtgcatgaggctaaactcagaaggcttcccacgcataaaattgaaatatattttgaacttttcataatgtctttgttttaaaattagaatgtaaatttaacgttgaaaccaatattacgtgtagtcggcatgccgaaaacatcaacgccctgcagagtattacctactgataaagttgcatccgggtcaaatggagcatctttgtacaaaaagaataagttacgtgcaaccaatgtgagatctaatcctttgatgaatttggttttggcaaggagggtttccgggaatgaatagcctagtgtcaattctcgtaagcgtacattcgttgcatcatacatatagtattctgagatgccgttacgtcctccgactgtaccatagaagttaggaacatctttgaattggatgccttcatattccacataaccgcgatcacgggattctccggattctttgctgactcccattgcgtcaagatgtgcttgtgtcaatgacatgacatctcctccgatacgtgcatcaatcaagaaatacaaagtaaatcctttgtaagtaaaggtattgctccatcctaataaagcatcaggattagcattgcctagtaaagtattgttacctgtaactttgattggatttcctgtctcgtttaatttaatcttaccattttcatctctttcgaatccgtttccataaatatctcccagttttccaccttcttttacccacatgtcataagccatggagaatccttcagaaccgtagcggaatgatttatagtccttgtgtaaggaaacaactttgtttctgttcatggacatgtttacagcggttttccaacggaaattttcattcatcaaaggagtaccctctagtgtcaattcgataccagtgttacgaattttacctgcattgatataacggaacgcataaagtgaaccagccggattggctactcttaacagttggttttttgtatctgtacgataccatgtaaagtcaattccgaaacgattattgaaaaacttccattctgtaccgaattcaatggaagtactgatttccggtttcaaatcaccacgttgttctatatcgtttgtttggatacttccaccacattgaatgatgtcagctaaattggtgatgccgatgggaaggtcattgccgacctgtgcaaatgaaccacggaattttgaaaaattgatccattccggtagtttgatgctgttgctcataatccaagtcaaacctactgacggatagaaaaatccatttttcatactttctgtgtttgccagggtggaagaccagtcattacgtgctgtaatatctaaataaatagcatctttccaacccacttgtgctgtaccaaataaagattgtatagtacgtttcgcatcaattgtttggttgatatatccctttgaagagaatataatattggaaacggtaaatacattaggacgatataaagatgctgttttggagtcgatcattaaagaattggctttactgacgttaatgctggttcctaatgcggcattgatggaaaaatcaccaaaggttttgttgaacatggccatgaaatcaccatatacttggaagttttgttcatccgaccatacatagcgtccgttaggtaaccctgtttcatcattttttccggcaatgtttgctgctgttgatgcatacatcttgttgtcaaacttatcacttacatagtctacattcccgcgtgcctggatacttaaccagtcagttgcttttatatttgcactgatagaagctaatgcacggtaacgtttactcttgttggtcacacgattttttatccagtacggattctgatcccattcgctgaatgagccgtcttcattttttgtataccaattctgtaagttcatattgcggtcagtatcgaaaacttcaaagttttcagcgtagggagccagatcggcaccacggggaaaagaatacaagccaaccagcggattcagataataaccacctccggcaggagtattacggatagtttgtgtcatcaaactggcatttccgtccaattttaaacgatcattaaagaaactggctgtttcacggaaagtaatattgtgcttttgaagcttatttgagtccacgatacctgtcccccgggtattggcataagaaaagtaagtttgcattttgtcattacctgtttggaaggttaaagagttgatggctgtaataccattgccaaaccaattacctacgttatcatagtctgtcagatttcctttgtcgccccaactgctggtaccatcggcagtttgtccataattgttttgaaattccggcaggctgacagcatggtctactgtcaggttagaggagaatgtaactcttgacataccggctttccctgattttgtagtaattaaaataacaccgttggcagcttgggagccatagagagcagcggcagacgcaccttttaatatactcatactttcaatatcatcagggttcaagttggaaacaccgtcaccagagtcatggttgaccccgtcattttcacctcccataacggtggctgttgattctgttgtgatattcagcataggaacgccatctatgacatataacggttggttgttaccactggcgaatgctgaacgtgcaccacggatagatacttttgccgaacctcccagaccggatgaactctttgttatttgcacaccggcagatttaccggctaatgaattgatcatattagcgtcctttactttattcagttcgtcaccattcagttgctgagtggaataagttaaagaggcttctttctttttaatacccatagcggttactacaacagtttccagtttcaatgcgtcatcttccattttaatggtaaaattagtctttccgtttactggaattatgacttttttataaccgatataagatataaccagttgtgcatcagccggaacttctaacgtaaagttaccgtcaatatcggtaattgtaccgttagtagtaccttgttgaataatgtttgcaccgataattgcttcaccttgcatatcagttatagcacctttaacagtgattgtattttgctgttttacttcctcacgggctatattgctttcttttgtcaaaacaatgtttttaccttccataacataagtgataccagttccggaaaaaacttcatctagaatttcggatacggctttattttttgcgttgatttttaccttgcggcttagatctacatttttcttactatagacaaacaggtaattagtttgtgattcgatggcagaaatcaattgggctaccttcatgatgttggtatccagactgactttggcgttctgagagtgtacatccatactgaatgcgctgaatgctgtggttaacagaagaattaaggtgatcttcatagttcgtaatatttgtttaaaagctaaactttttgggcataagtacccttccaaagaaatttttctcatatctttgtaatgtgttaagttaataaatttgattaaggtcaattgttagctgtcgaatcggggagtatgggggtactttccgattcttttttcaaaggtttttatgtaatcataacagttcattttttaaggttaaacttctattgtgattttattctatggttatcttgttatgttcgttatcaatattgtatttaaacggatggtctttttgtataacttttagtatatgctctatgccgtccaaatctttgaatttaccagtgcagcggtagttctctaagattttaggattcttcactgttatcttataattataatatagagcaatcttgtccagtaactctttaaacggaacatcatcgaaataataaatgccttgcatccatgccaaagcattgttactgctcatttcgcccgttttgtatttgccgttttccattgagaaatactttccttttgtcaggctggtaattggcttttcttcttttgcattgttggtaagcaagttgatggaaccttctatcagtctggctataaagctgtttgaacctttataggagcatacatcgaattttgttccggtgacttgcacctttatgttttctgtctgcacataaaaaggaatctccttattgtgtgccacctcgaaataggcttctccgtctaacgtgactttacggtcttttttaccgaagttttcatcataagttagtgtggtttgggaattcaaccatactatagaaccgtcaggaagatccatctgtgcacgttgacctgctggaatacggatggtttgtgacaattgttgtttaggtttatgcatatgtggcaaatccattacaaaaacaatagccagcatggcggcaatggcaatcagtgggtacaggtacagatgccctttcggtttccgttgtatgttcgaaccgtcagaaaaaagggtgacatcaaacagcattcgctcttttagaaagtgttccttgttttctacactgctttctacccattccacaatctggttttcctctttttcggtggtttctcctctgaaatatttatgtagcaattcggttttcattctttctgcattttgtatatagaacaggatagctggaaacaaccctagtggaaaaatgatttttttttcgattttctcaaaaaaagtgctttttatcctcttttttcatttcaagtaaaattattacccccctgacacactgctaataaaaaatattagtaactttgcaacacccaaaataagcgagattgtatttatacactataaacaaaaataagagattatgatgacaattgacaaattcaactttgccggtaaaaaggcaattgtccgtgtggacttcaatgtacctttggacgaaaatggtaaaattactgatgatactcgtatccgtggtgctcttcctacactgaaaaaagtgttggctgatggtggcagcttgattatcatgtcacacatgggtaaacccaaaggtaaggtaaatgctaaatattcattgagccagattgtcgatgctgtttctgaaaaattaggtgtacctgttcaatttgctcctgattgtgcgaaagccggtgatgctgcagctgctttgaaaccgggtgaagtcctgttgttggaaaatttgcgtttctatcctgaagaagaaggaaagcctgttggcattgacaaagaagatcctgcatacgaagatgccaagaaagcgatgaaggcttctcagaaagaatttgccaagactttggcttcttatgctgattgctatatcaatgatgcattcggtactgctcaccgtaaacatgcttctacagccgttatcgctgactatttcgatgcggacaacaagatgttgggttatttgatggaaaaagaagttcaagctgttgataatatcctgaaagatatcaagcgcccgttcactgctattatgggtggttccaaggtgtctactaagattggtatcattgaaaacctgatggataaagtggataacttgattctttgcggtggtatgacttatacttttgcaaaagctcaaggtggaaagattggtaattctatcgtagaagatgacaaattggatttggctcttgatatcattgctaaggctaaagctaaaggtgtgaatttggtattgggctctgattgtgtggctgctgatgcattctctaacgatgctcatactcaggttgttcctgcaaataatattcctgacggatgggaaggtttggatgcaggtcctgaaactcagaaagcatttgctgctgctattgaagatgccaagactattctgtggaacggtcctgccggtgtttttgaattcgataactttactgccggttcacgtgctatcgctgaagctatcgcaaaagcaactaagaacggtgcattctcattgatcggtggtggtgactctgtagcttgtatcaacaagttcggcatggctgaccaggtttcttatatctctaccggtggcggtgctttgttggaagcaattgaaggaaaaattcttccgggtgttgcagctatcaaaggtgaataattaattttctgctatatataaaaaaggcagccttttcgaaagctgccttttttatattctttattttgtacttttcagaacatgaacaaaactgttgctaccagtctgttgtttgaaacagaatgagtatcaataatttttccgttagaacttttcatggaaccataccatgcggaagtaagattgtattcaactcccaatttccagtgaggcacattataggttagttctgcgctggtgcttaccaattggtctacattggttcctgtaccatacattttacttatttcgtcactcgttcctaaatttttcatataacctaaaaaaacagccggtttccatttcttaccgtatgcaatgtttagccatgaactagaattccggttgggggaatactcttgttctcccgtacgggcatcagtggattttacaccgtatccgcccagcatggatacttgtgtaagattggaacccaaaatactttttgctgccacataccataggggagaagtatatttcatgtgaacttcgtaagacagggcagtgacacgttcatccactttgtaaacttcatcttctactaccgattgagtacgaggttttaatgaaatcatttcaatgcctgctcccactagccagttgcttcttttgtaatctgcaccaatatagatttcgggtatacaactttcttttatgtatttctggcttttcccatcaggaccttgagacaggtattgggattgccaaatagccgcgcctgtcagttgtatatcaccagctttgtagcggaatcgtatttgtggggcacggctgaacggttggaaaggagctcccatattcagattcagaatttgtggagcaacgtcaccatataacggatgccaggtttgtcccaacagtaaagacggttttccccaatcaaggtttaaataggcatggcgcagacgtacagtggagaaggttgttcctgatccgcggaagtccatttctacttttgcggaggtttttgctcttcccaacctgggaccttgcacatctattcccaaacgggtatataaagtataaaagcttccattagctgtcgcattcaggtctttacctgttgcatcgtacactttatctttaggatacatatagaaaagcccgtcaacagtttcttcattggcacgactattataatagaagtcggtgcggatttgtccgtagaacttgtaattgaaatctttgtcttgagcaaaactttttgccgatagcagtaaaaatgtgaataaaaataaatattttctcatattttaaagggttattataaacagtcggcaaaattacataatttatttgaaaatcgcacgtgtgtcttggtaaaagaattatgcgcctctacatataaagtctgcaccgatacaaattatttttgttgcctcattcaaggcaacatttgaatcttgtcgtattcttcatcagttacgggttctaaccattcattggatgtgttttctccggaaagttcgaatgcaaggtgggcgaaccagctgttggcggctgcaccgtgccaatgttttacgttggcagggatatggatcactgtgccgggaagaatctcaacggctgctttaccttcctcttgataccagccacgaccggctatgccgataagcatttgtccgccaccttgagttgcatggtggatgtgccagttgttacggcagcgtggttcaaaggtgacattggaaatgtttacctgttcacgagagataggggcgaggtaactgttaccagtgaaatattgtgcataagcggtgtttggttctccgataggaaaaatcatttcgcgttggaacgttgttttttcatctttatctttacaagagatttcttcattccatacttctttggcaagacggaatgccgcccatgctttcggccatcctgcatagaagccgatttgagtgatgatctctgcaatttccgtacgcgtaataccgttgtttttggctgattggagatggaatgtaagcgaactgtccgttattccttgactgatgagtgaggtgattgtgactaaactgcggtcacgaagaccgagttgctcggtgcggctccacacttctccaaaaagaatgtcgtcattaagttccgcgaatttaggagcgaatgttcctaattggtcgcgtcctgctgtctgtttgatctttttttgtgccatactggttgttgttaaaatactgaatattaaaagtaaaatgactttgttcatagcgttcatattttaagtttttcaatataaattctatgtacaaaagtatggagttgaaaaaaataagattgtacccggattacagatttttataccatttttcctgtttggtttgttgtgctttttaaaatgaaattccattgtcatccggctaagttttcaattaggaaatagaaaacaaggttttgagccggattacaatggaattcaattcttcttatataaataggtaattaatagatttctatttcatccaaagctattgtgctgggtacctcgcttttatcatgtgggctatagcaatcaataccattgcgtattttacctccgcttgtaaattctatttttaccttcaccgcttcttgtgccggaaattctatttcttcatcaaaacctctgaacgtattttctttgatatcgtaagtgaattctttttcggctactttctcgaatttgttgtctaaagaggaaacatagactacagctttgctcaccggcaatattccacctgctgcattatacaatgtaccgaatctgattttacggatagtggctttctcaaagtctactataaaagtaactttgtcattattgtctgggctgatacctacccacggggtggaggaggcattatttccacgttttccattggtcagtcctaaagtcacagtgtctgcgcccaatatatcattttctcctaaaatatcacctttcatacctttgggttcgggcatgatttcatatttttttccactgattaaattcttgtaaagctgtttatgagtaaccttaccgatttgtttgccgttaacgaaagcagcggctttcaagtcgtatgtgccgtccaatgggaatggatgattgtataagttggcatgtatggatggttgctcaccatgagtcgtataatagatttgtgctcccggatagaatgtttccagctctacattcagtacaccttcttgggtggcacgggtgttgatatttacatcaaagaagttgaggcaaggttttacgcccattgcttccagacgttggaagtcttcaaccatgcggttgcagaatgaagtaaaattctttttcttcatcggagtccagccggtttcggatatagcgatcaggcgtgggaagatttgataatcacggttgtcctcagttggcatatattctgcccagcaattggcctgtacaccaatgatgtgctgttttaccaaactgtctgcatcagccggtacaggattatagctgtatgtctttttcagtgtgttgtatccaccgatagtaacaggggctatttccggttcttcctggtaatggtcaaggtaagtgtaaggattaggagtcataatagcatcatgtccggctttggctgcggtcattccgccttccacaccacgccatgacatcactgtggcgttgggggcaagccctccttccagtatttcatcccaaccgatgatattacgtcctttgctgttcaggtatttttccacacggcttacgatataactttgtaatttctcttctttcgtatgctttcttccgtctacgggattgggagtgatgtcattttccaatcccagttcacgtatcagtttttgacaatgttcacattgttcccaagctgttttaggacattcatcaccacctatatgtatataagagcttgggaataattccaccacttcgtccatgactccttccataaactggaagaaggtgtcggtagggcagaatacttggtcaaacacaccccataatttgcaaacttcgtaggtgctgtccggagtgcaggacaattcagggtaggaagcgatagcggccaaggcatgtccaggtaactctatctccggaatgacagtgatatatttgctttgagcgtatgcaacgacttcttttatttcgtcttgtgtgtaaaaacctccgtggggctttccgtcatatttgaatgggtaatgggtatagaaataatccaccatggtttctgaacgttgagagccgatctcagtcagtttggggtattttttgatttcaattctccagccttggtcgtctgtaaggtgccagtggaaggtgttcattttatgtgcagccaatacatctatgaattttttgatataatctatagatgcgaaatggcggcatacatccagcatggctccgcgatagcggaatgtcggggcgtcttctatttcaacgcaaggtacactccattcggcattacgtgctctttctttgcaatagacatccaccggcaacagttgatacagggtctgtaatccatagtaaaagccgttaggcgccgatgcggtaatttttatcagttgaggggtgaccgataacttgtaggcttctttttccatccccggaatgctgtcaaaaacaatggagggtacattttcatgtaactcgtcagtcggtttcagcttgagaccggctatatccaggagagtggttgacaggccggaagcaatgtgtttcacttcttgtgaggcgttaacgacgataggaacatcactgttcaggtaaaaacgtccctgctgctcgctcatggtaacaggcaatggaactacattgtactcattgattacttctttcatttggcatccacacattaataacccaacgaaaaatactggcagactctttttcttcataataaatctgtgttaagtttttaaataaagggggtatagaaattctttttggacaaaaatagcaataaaaacggaataaacatgtttttcagagagattaatatgtttacaatataaaaatatttttcacagatttgtttctttattgctaatagaatgctatctttgtccgagttaaccaatttattaatctaacacgcatgacagcaaatacccccaaacggttgcttgctcttgacatcttgagaggcatcactattgcaggcatgattcttgtaaataaccccggttcatgggggtatgtgtatactccgttggagcatgccgcctttaacgggttaacccctaccgatctcgtttttcctttttttatgttcattatgggaatatccacttatatttctttgcggaaatataattttacttattctcatgctacattacggaagattgtgaaacgtacagtcgttattttttgtatcggtctgtttttgaatcttctggccaaatcggtttttacacatcatctgaattttgaagagttgcgttatttaggagtcatgcaacggcttgctataggatacggtgtgactagtctggttgctataacggtgaagcataaatattttcccgctatcattttggtaactttggccgtctattttcttttattggctatgggagacggctttaacttgtcggccactaatatagtggcccgttttgatgtatgggcattgggtacatcccacatgtaccatgatggtggaatggcgtttgatccggaaggactattgagtacgcttcctgcggtgtgccatgtaatggtagggttttattgtggaaagttattgttttctgctaaagataatgacgagaagatacaacgattgtttttggtgggtactattctcacatttgctggctttttgttaagttacggctgccctatcaataagaaagtgtggtcgcctacttttgtcattacaatctgcggattggcatccagctttttggctctgcttatctggatcattgatataaaaggctatcaaggttggtgtgtttttttccggtcgttcggagtgaaccctttgtttatctatgtgtttgcggaaataatggggattctattgggcgctacgggggcaagtgtctttatttatgaaaaggtactggttccggtgttgggaaattatcccggttcattagcctatgctttgttgtatgtattattttgttggagtattgttcatattttatacaagaaaggtatttatgtcaagatctaaaaacggaaacagaaaattagttaaatgaaagagacgaagaatgtttttatgtcagaactgacggaggtgtttagcaaacgtcagcaacagtttgttcagtttgcttactcgtatgtcaggaacagggaagaggctgaggatattgtaatgggggcttttactaatgtatgggagcaccggaatgagttacaggaggataccaatatttctgcgttgctgttgactgccataaaaaatcgttcattgaatcatttgcaacacttggaggtacgtatgcgtgccgagcagcatataggagatatgcggcagaaagaactggctttgcgtatctcgactttggaggcttgtgatcccgataaattgttttgtgatgagattcaagctttggtgcaggaagccattagtgaattgcctcctacaagtagggaggtgtttattttgagccggatgaaaaatttaccgaacaaggaaattgctttgcggctggatatttctgtaaagactgtagaatttcatatcacccggtcgctgaaacagttgcgggtgcagctgaaggattatcagtttctttggagttttttataaaacaagaccatgcctcagttatttggacatggtcttgttcttatttcatatacaggaatcagaaactataatctgcacttaaaccgaacactttgttggtacggctatatacatttgttccgggtagtccggttccgttatagttggttgatttttttgtataatcctcataattagtccacatataaccaacatttaaattgaggtgtttgttcatctttattttggctccgactcccaaagagtaagaatcacaagaaaaactggtatctgattgatagttatctgatagtccgtagtcagtgatttgtccaccacagctgagggttagttgcttggttacatcaaattcaatacctgccaagtattcattggttcctttagtcagatatttttgtttgccgtttgccatacctgcatttttgtcatcataaaaatgatattctacagaagcgcgaagtaccggaaggaattcgtaggcggctgcgatagagagcatggctgggatgtcattgggggtgtttacaccgtgtttgtaaggagctatcattgcttcaccttcaggagtccggggatattctatattctttgtattgttttcgatattcaagttggtcttgaattcatatttggcaccaatgttcagtttacccagtttagcatttacaccgataacaggagtaagtccccagccggtttggtcacagtctagagcaagaggcaacaggtttgtgtctgttccttttacaatagcgttcagaaagcctttgtagccaccggtaaagtagttcattctacctccaccgaatacggaaagccattcggtagctttataggataatcccagctgcaaagaataaatatattgtttaccgtccatggcacttgtaatatcatacatatcaggagttataatcgtaggtttttctgcttttaaaccttcttgaaaaatacctgccatagctgaggcgtcgaacataggcagtccgtcatcaaaagacgcctttccacctccggcagtgatggcgaagaatcctgaaattgtccactcaccttttttatatgcggcgaagaggctggggataaccggtgcggcggctgttccttcgtaatatttttcaaaaggcttgtctgcaacagtaggacctgtggcgttaacgccattgtatgtcataaaactggcatcaatatttctagtctgataagcgctctgaatgctcaatcctacatggaatccgtctttgggcaagaaagccaggccggcaggattagataaagcaccgtctatttctgttgtagcaccacgggatagcatacggagaaaagctgcatgttgatttgtattggttaaaatacctcctgcgaaagttgaatttgaaacgattagtgtcgctgcactaattaataatagtttcttcatttattacttgattttttgtttgtgggcgcaaaggtaggataaaataacacacgggcaaaccttttgtgcaattatttgtgtcgtctattgaaaaaatcaactgtttcaacagaaactatttgcctggatgctgaatatcctttttttatttgtgtgattgattggtaggaattggggaatgagggagcgtgctgatgcttttgtgatatatttgttccggcacgcctgtccgctaagtaaattcctggtctgtttacggtttcttcactccattcagaacaccggattgaaaagaatgtagtatctttgcaactcttttactcaatgcaaaaaaaatatatgtataccaacaaagaaatatggaacgtaagttatccgatttttctcggattattggcgcaaaacattatcaatgtgacagatactgctttcctgggcagggtaggagaagtcgagttgggagcttccgccatgggtggattgttttatatctgtgtcttcactattgctttcggttttagtgtcggttcacaaatcttgattgctcgtcgtaatggagaaggacgttacaaagatgtgggtcccgtaatgatacagggagggacattcttgctgggattggcggtgctcatgtttgggctgacacatcttttggccccatccattgtccgcttgctcatttcatctgattccatttttgatgctaccatggaatttctcaactggcgtatttggggctttttcttcgcctttgtcaacgtgatgttccgtgcgctgtatattggtattacacgtactaaggtgctgacaatgaatgcagtggtcatggcattggtgaatgtgctgttggactatattttgattttcggtaagtttggaatgccggagatggggattaaaggagcagctgtcgcttcggtgatggctgaagccgcttcattggcttttttcttgatttatacctacgcaaaggtggattttaagaaattcggcttgaatcactggcagaagattgacttttctttattgggaaaaattctgagtatttcgtgttttaccatgatacaatattttttggccatggctacttggtttgtctttttcatcgcgatagaacggttgggtcaacgcgagctggcgattgccaatatcgtgcgtagtatctatattgtgatgctcattccggttcaggcattgtctactactaccaattcattggtcagcaatctgattggtgcgggggggataacccatgtcatgcgtttgatttggcgtatagcccggatgtcgtttctcattatggtggtctgtgtggcggtggtggtgctttttcctcatgccatgctttcggtttacaccaacgaaccggcgttgctggtagagtctgtgccttcgttgtatgtcattgccggagcgatgattattgcatcagtggcgaatatttatttcaatgccatttcgggaactggaaatacgcaggctgctctgatacttgaaatggggactttggtattctacgccctttacattctatggataggcatggtggtgaaagcaccggtttctgtttgtttttctatagaggtggtgtactatagtttgttactgcttagcagcattatttatttgaaaaaagcaaaatggcagaataaaaagatataaggttcataagttttttgtatttttgcaccctgttgttattctgaaggttagtaaagaaggacaggcaatcataatttgtaatttataattaaagatatatgttcgataatttaagtgagagactggaacggtcttttaagattctgaaaggtgaggggaaaatcaccgagattaatgtagcggaaacattgaaggatgtgcgtaaagctttgttggatgctgacgtgaactataaggtcgccaaaggctttactgatactgtgaaagaaaaagctttggggcagaatgtgcttacggctgtgaagcccagccagttgatggtaaagattgtacatgatgaactgactgcattgatgggcggtgagactgccgaattggtgttggaaggtcgtccggcggttatcctgatgtcaggtctgcaaggttccggtaagactactttctccggtaaactggcccgtatgctgaaaaccaagaagaaccgtaagccgctgttggtggcttgtgacgtttatcgtcccgctgctatcgaacagttaagagtattgggagaacaaatcgaggttcctgtatatagtgaattggacagcaagaatccggtgcagattgcattgaacgctattcatgaagcaaaagcgaaaggttatgatttggttattgtcgatacagccggtcgtctggctatcgacgaacagatgatgaatgagattgaggcgattaagaaagcggtcaatccggatgaaacattgttcgttgtcgattcaatgaccggtcaggatgcggtgaatacagcccgtgaatttaatgaacgtctggactttaacggtgttgtgctgaccaagttggatggtgatacccgtggcggtgccgctctttctattcgtaccgttgtgaataagcctatcaagtttgtgggtaccggcgaaaagttggatgctatcgaccagttccatcctgcacgtatggcagaccgtattctcggtatgggtgatatcgtgtctttggtagaacgtgcgcaggagcaatatgacgaggaagaggcaaagcgccttcagaaaaagattgccaaaaaccagttcgacttcaatgactttttgagccagattcatcagataaagaagatgggtaacctgaaagagttggcttccatgattccgggtgtgggtaaagcgattaaagacattgatatcgatgataatgcattcaagagcattgaggcgattatttattccatgactccgcaggaacgtacaaatcccgaaatcctgaacggaacacgtcgtacgcgtatagccaaaggcagtggaaccagcattcaggaggtaaaccgtctgctgaagcagtttgaccagacccgcaagatgatgaagatggtgaccggcagcaagatgggtaagatgatgccgaaacttaaaaagtaaggtttaaataaacaggtagggagaaagtgcggaactttctcctttttttattatgcaacgtggctgatttatgctacatttgttgctcaatggattatttataaataaatagtatgcaactaattgatggaaaagctatttcggaactggtgaagcaggagattgctgcggaagttgccggaatcgtggctaaaggtggcaagcgtccccatttagctgcaatcctcgttggacacgacgggggaagtgagacatacgtggcggctaaagtaaaggcctgtgaagtatgtggtttcaaatccagtctgatccgttatgaagcagatgtgacggaagaagaattactggcaaaggtcagagaactgaatgaggatgctgacgtggatggttttatcgtacaacttcccttaccgaagcatatttccgagcagaaagtgattgaaaccattgactatcgtaaagatgtggatggtttccatcctatcaatgtaggacgtatgtccattggccttccttgctatgtatccgctacgcctaatggtattctggaattgctgaaacgttaccatattgaaacacagggaaagaagtgtgtagtattgggccgtagcaatattgtgggtaagcctatggcgagcctgatgatgcagaaagcttatccgggtgatgccactgtaactgtttgtcacagccgcagcaaggatttggtaaaagaatgtcaggaagctgacattatcattgctgcactgggtcagccgaattttgtgaaggctgagatggtgaaagaaggtgcggtggttattgacgtgggtactactcgtgtgccggatgccacaaagaaatccggattcaaactgaccggagatgtgaaatttgatgaagtggctcccaaatgttcttatatcactcccgttccgggtggtgtgggacctatgactattgtatctttaatgaagaatacgttgctggctggaaaaaaggccatttacaaataagtgccatgcgctttgcgaagcttgatggataaaaaaagaatgtgtcaaaagtttggtaatgcttacaggataagctgacctgcttttgacacacttgttttcatgaacaaaagttatgcctgtttttcggacttacctgtaaaatcataaggaaggattttcgctcttaaaagattattttgttcttcggaatgactatattttcgggagtgtccttgatgtataggtctttctcgctgggaagttcggggcatttatgccctcatgccctcactgtattgtgaagctgaattttgcataaaatgtttgaatacagttatatatatactttttataggatattccgttttgatgtaaagtaggctatttttaggctttctttcttgtaagaagtgcgcatggaggatttgtacctttatggaatatggcggattccggctgtggtaaaaaagatcaggtcatttttaaaaaagatgacgagctttttttaaaaggccgccgtcttttttaaaaacgtcttggtcttttttttaaatgtccttgtcttttggactggcggttggcatgcttgctgacgtggtttctgttggggtcattgtcatcaataaggcatgtgtgtgatatataaagatttgttgcaaatgcttgtagaccctctttctaattttttatttgtattattcgcttgaaaaaaacgatggtactgctgtttcagaacgggtgcaggatagtgaagcctgttggcacagttcgaggttgctcctacggaattcaagcgtatgaaaactgtaaattagtgtagaactttgttctttacgaattttttcctatcttgtaccctttaatattagaatagatgaaacagatctttattctttttttgctatggtttggtttgtcgctatcggcgcaagatcagatctctttgttgtttgtcggtgatttgatgcaacatcaggctcaaattgatgcagccaggcaaggagacgggtataattataatgattgcttccgtcatgtgaagaaagaaataagtgaggcggatatggctatagggaacttagaggtgacattgggaggaaagccttatagagggtatccggcgttcagtgctccggacgaatatcttcatgctataaaggaagccggatttgatgtattgctgaccgctaacaatcattgtctggataaggggaagttggggttggaacgtactattctgatgctggattctttgaaaataaatcatgctggaacctataggaacccggaagaacgtcataagaactacccgttattgattgagaagaatggttttagaattgtattgttgaactatacttatggaacgaatggcttgaagactgatgctccgaatgtggtgaattatattaatcgggaacaaataaaaaaagatattcttgatgcacgcagaaaacttcctgatgttattatagcctgtatgcattggggagtggaatattgttcgttccctgaacgatcggagtgtgaattggctaactggttgattgaacaaggagttgatcatgtaataggttcgcatccgcatgtactccagcctatggaaattgtaaaagacccccggactcctgcccggcatgtcattgtttattcattaggtaattttatctcaaatatgtcgaaagaaaaaacggatggaggagctatggtaagattgaagttgcaacggatttttcgaataacccgtttagcggattgtgaatatgcattggtttggacttcaagacctgttttaagtaaaaaaaagaactttgaattatatcctgttacttttattaataaatccattaataatgaggaacttaatgtgatgaaacgtttcttgaaaggaactgaaaatttattaggaaaatcgaatggaggcataaaagagtatttttttgaataatttttcctcaaaaagtttgcagatataaaaaaaagcagtacctttgcatcgctttcgaaaggaaagcctaacatggtgactatagttcagtcggttagagcgtcagattgtggttctgaatgtcgtgggttcgaatcccactagtcaccccttcacctatgaaaggttctgtaaatctaatgatttatagaacctttttcagtttttatgtctattagtgtattatcatgatgataaatttgaaagatgatagcgaaaaggataagtatatcttggagttgttccagacatctcctaaggaggcttttcgtttattatttgatgcttatcacatgaaattatgtatatatgcggtgcagctgaccgattcttttgagatggctgaagatattgtgcaggatttctttatctatttttgggagaagaaatattatttgaaaataaatcagaatcttcgttattatctttatttgtctgtgcggaatgcggccatcaatgctttgcagaaaaacaacatgttgtctatggaagaactctcaggcattgatatgggtattcctgaagagtctatagatgaagaggagcaagaggaacgaaataagttattattggaaaaactacaaaaactacctcatcaggaattacaagtggtgagagctgtcattatggaaaataagaaatataaagaagctgctgaggaacttcatatttctgtgaataccctaaaaactcatctgacaagagcattgaaacaattaagaaaagaatacaatctgcactcactgttttactaaaattaaatttttcttctttttctgtcacccatttattaatttggactctcttttattaaaagaaagtaatcaatgaacaaagagaatccaaaaaagaacaaaaagtcttttgaatattatatagcgcagcgaaaagaagaatttcgttgtcaatatgatcatgaacgttcatgggaaaacctgcaatataagcttcaaaaaagaaagaatcaccgtctcagtttatattgtgttgcagcttcggcagcttttctttttcttattttaggagtcagtcacatattctctcttcacaataacacacaaaacaaggaggccgtagtggctgctgtggtttcatttccggaaacaggcagccgcaaggctatccttactttagagaatggagaaaaagtggatctgtctgttaaaaagggtacgatttctaatgcaaattctacagtaatcaataataatgctaatcaattattgacttatagaaaagtggaagaggtttcttcaactcctcagattaatacattggctattccaagaggaggggaatatcagttgattttatcggatggaacaaggatatggatgaatgctgaaagtcttttgcgttatccaacttctttcattggagaaaaaagagaagtttttctagaaggggaagctttttttgaagtggcgaaagatgctaagcacccctttatagttcatacaaacagacattcggtggaggtacttggtacaagttttaatatatctgcttatcctgattataaggtatatacgactcttgcagaagggcgtatcaaagtaagtacagctaaagtttcggttgtgttaaatcctgaccaacaagcggttattgaaccggataatgatgatatagtgacacgtgatgtgcctgcttatctatttacttcctgggcgaaaggaaattatgagtttcgtaatacgtctttgtctgaaattgttgcccaactgtcacggtggtataatgtagatatctattttaaaaatgaatctttgaaagataaaagatttgcaggtatcattttcagggatgaagagttgaattttgctattgaagtgattgagagagtgtctaatgtacattttactcgcgaaggagaaacgatttacattgaagataaacatgaatgagaaagcaaaatgataggagagaattgacttttttaaataataaatcaacaaacaattatgagtacaaaacttttgagcgaaactatctgtcgcaaaggcctcatggtgaaatgctttgttgcattgatagtgttttgttgttcggtgggcgaagcgtttgcccaaacggatactaaggtgactatcaatgtaaacaatgttttaatcagaacagccttggatcaactgcaaaaggaagcaaagatccattttgtttacgatgaagaaaatattgattcagaaaaacgggtaagtttatcttataccgaaactcctttgaatgcggttttgaacgatttttgtaaacagacttcattacgatatgaagtaaaaagaaatttgattcttattttaccttcaaaggctgagaaaacaaccggaaaacatgaacccttttatatgacaggtgtggttatggatgaaaccggagaaagtattattggagctaccattatgattggaggtacaagtcagggtactgtaaccgatatagacggtcggtatagtttgcgggttactcctggtgatttagtgtcatttacttttgttggaatggcagataaagtagtcaaggtacaagctggtaagaaagtggtgaatgtgaaaatggaaactaatgccactgcactggcggatgttgtagtaactggctatcagactttgtccaaagaacgagcaacaggatcttattctgtgatttcagagaaaagtacgaagggtaaactggaaacggatgtgttgtcacgtattgaaggattggtagcaggtataaataaaacttcaagcaacagtaatgatgttgttattcgtggtattactacttatatgggaaatacaaagccattgtatgtggttgatggtatgccttatgaaggtgatttagcatcaataaatcctacagatgtacaaaatataacagtattgaaggatgctgctgcaagttctatttatggtgcccgtgcggctaatggtgtaattgttattacaactaaacgtggacaggaaggtaaaactaaagtaagttataatggtagtattaagttgtctccaaaaccggattttgattatttgaatttgatgagtagttccgagctggtagatatgcagattgaggggtttgattattatcatacggcttatgagaatttgaataagcgtcaagctgtaaatccggtagttagcttattgtatcagcatgaacgaggtcaactgacagatggtcaattggcagatgctctgttaccttatcgtacaaatgataatcgtaaacaaatagaagatgaatttgcgcgtgtaggtattgttcatcagcataatttagctatttctggtggatctaataaaaatcgatacatggctactgttaattatatgggtgattatggtaatcaaaagtatcaaagtaaagatcgtattggatttagcctaaaagatgatgtggatttttttgattggttatcggctgattttggagttacaggaagcttttatcgttcaaagggtgataatggagcaggtagttatagcagcttgatgagtagttatcctagttattatatgttaagggatttactgggaaatccactagattttcaacgtactaaatcagattatgaattgcaacgtttgcaaagtataggtttgatggatgaaacatatagtccgataaagaatcgtgcagaagaaagctatcataataattccaattattatcgtttgcatgcaggattgaaatttaaaattctagaaggtcttaatattgatttaaaatatcagacagaagggacttatgataaaaatcgtactttatatagtaatatgtcatatacagtgcgtaatatgataaatgatgcagctcaatatgatgcggcaacaggaagccttacactgaatgttcctaaaggtggtcaattggatgaaagccgttatgaatcttattcatatacaatgcgtgctcaagtgaactttaatcgtatatttggaaaacatgctatatctgcgttgggcggtgctgaacgtcggttggtgcgtcgtactggtgcgcagaattattatatgggatatgatgataatagcttgggagtaaaacctataaatccgttggttatgtctcctattaatggtactgaatctttgtcggggtcgtttaattgggtctatggtgaatataatgcattgacccatacagaagaccgatatgtttctttttatgctaatggttcatatacattcgatgaacgttattcattaactggaagtattcgtattgaccaatctaatctgttcggtactgatcctaaatatcagtatcgtccgttgtggtccgttggtggtagttggcagatagctaatgagccttttatggaagattgtatgtggttgaatcgtttgaatttgcgtatgacttatggtgtgggtggtaatgttcctaaggatgcaggaccgtatatgactgtggttgatagcggatataatgaatgggttggagattttggttcgtatatacagaatccacccaactctcaacttcgttgggagaaaacggcttctaccaatgtcgggattgatttttctgcattcaattctcgtttaagcggtagtattgattattattataagaaaactacggatttattaggaaatcgtaatgcggatccgactttgggttgggcaagtctattgcaaaattatggctcgatgtttaatagaggtgtagaattgtcattacagagtgtaaatattcaaaataagaattttacttggggaacaaatttaatgtttagttataataaaaatgaattgacaaatttagaaggtacaaaagaaacggttttttattatagtgcatataatgtagcagctgttggttatcctattaatagtgtctttagttatcgttatgcaggacttaatccgacaaatgggaatgtgttggtgtataataaagaaggagaaaaggtttcaaaagtaagttctattgatgatatggtatattctggaactcgtactccaaagtatacggcatcattgaaaaatttcttctcttatcgtgattttgatttttcatttatgtttgtatattatggtggtcatgtgttacgtgatgttgtagctggatatatgggtggtgcaccgagtgcgaatcttactcgtaaggctttaaaccattggaggaaaccgggggatgaaaatattccaggagtagctccgtctttcaataggaatatttattatacagatgctcagacatggtattcggcagacattcatgtaaaaaaggcagattatattaaattgagagatatctcattgagttacaatttgccaaagaattggttgaggaaatattttatagaatcggccgcagtgacttgtcaaattagtaatgtgtggtggtgggctgctaacggagatattgatccggaagcgtatactacatcgggatatggatggggagcattgactcttccgaatcctactacttatacaattggtttgtctcttaatttttaaacgattgaatagataaatatgaaattatataaatttttactttgtgcatgtttggcgttacctgtaatgtcatgtgatgattatttggatatacaacctaaagggattgtaattccggaaaagagtgaagactatgaacgtttattgaattatgctcaattgctaaaggcttctgaatcatatcctaactttatgacagatgatgttttcatgccttatgaagatgatatgactggaggatttttttctctggagttgccgaaccagcatttatatgcgtttaatagtgaaatctttggagaaggagagagtgacggtctttgggaatactcttataatcgtatttattattataacgtagttattgatgatataatgggggctactcaagatactgaagaacataaaaagcaattgagggctgaagcattggttgggcgtgcttttgagtatttgactttggttaatgcttatgctaaccattacgacccgtcgactgctgctacagatcctggcgttccattgatgttggataaaaatatcaataaaacaaatttgcagcgcgctacagtgcaggaagtatatgatcaaattaaggcggatctggatgaggctgctcctaatttaccggaaaaaccggtgttgaatgcctatcgtgcatctaagccggtggggtatgggatgttggcacgtatgtatctttatatgggagattacaaaaaagctttggagaatgcggtgatctcattacagaataattcaactttgatgagtcttttcccgtataaagtagtggatcgtgataaatatattggtaggattgatgttccggatggagatgagaacccggaaaatatttatattcgtttggccccctggacttttggatttagtgctactgcatatgcttctgaagaattggcctctttgtatgatcaggaaaaggatcagcgttatctgttgtattttacgaaatatttaggtgggatagatttggattatcctctttgggcaccttatatttatgccaacatggctatgtctaccccggaaatgtatctgatagcagcagagtgtgaagctcgtataggtagtaaagacaaagctatggaatatattaacaccttgcgtgatagtcgtattattgataatgtacctttggttgcaagtgataacaaggatgcattggtaaaagtcttggaggaaagaagacgggaaatgcctatgcttggctgtacccgcttgattgacttgaaacgtttgaatcgtgaacctgaattcgcaaagactattgtgcatgaggtgaatggtgtagagtacagattggagcccaatagtcctaaatatattttgcctattccaccctctgtacttcgttttaatcctgatatgattcctaacataagataaaagatattttaatgaaaaaactaacgattatgatggcaacagcagcattatgctgttgcctgggttcctgtaacagtggaactaagcaagaattggcgaatacggttcatttgaaaggccagttgcttgatatgggtagccagaatgtgcgtatgagatttgacggagcagcatctatgctaggtgacagccgggatattttgttgaaaacggatgctgccggttattttgatactacttttgtacttaaagagccgacatattatactatcagccgcaacacattgtatcttactccaggagatgacatgactatcaaagtaactcagacaaatacagaagcggaattctcgggaattggagccgaagccaataattacatgaagttccgtctttttccgaaaggtggttcttatctggaagccggtggtaacttgcgtggagattttgtatccactaaagcgttggttgacagcttggccgctatacgtatgcatacattggatacgttaagtaatgtgtctgatgcatttaaaaagctggaaacagcacggatcaaagcggatattattaatagttatatctgttatgcaagttattcaaggatgtttgccggagtgaagacggaagaagagatgcgggctaaatggaatgaatttaatgtttcattaactcaggatgtaactccgctatataaggagattatgaatgaagatatgctgaatgtagctgtggtgcgcgatgttttgtcttatcaggaagattctacattagcttctctttggtttaaggatatttccattcctgcgcgtactacggaattatatgcttgtgctaaaatagtcgataatctgagaaatgaagcttcagaacagactgtgaacgaggcgaaggcatttttgcagacagtgaagaatgctgattttgcaacagaaattgaaggaaagattgttcaagcttccaagttgcttcccggacaacctgccattgattttgagatgttggatgtggagggtaatgtgaagcatcttgcagattttaagggtaaggtgatttatattgatttatgggcgacctggtgtgggccttgcattcaggaatctccggcatttgaggctttaggtaagaaatatgcgggtaaggatatcgtttttcttccggtttctacagatactacaacgaaaccttggttaaggtatttggatggacataagaaagaattgactcaatatcattccaatgatgttgctttaaaagaaagttgggctatcatgtatattcctcgttttattttgatagacaaggatttcaatattgtgaatgcatacgctccacgtccgtcaagtgaagagattggtactttgattgattctgttcttaataaatagtaaatttatgatttataaaaaatatctattattaggcgtttctttatgtatgttaaatgcttgcaatgagtctaagtctgtgtctttagagggtagtcttgatggaatccaggctgattctatctatttatatcaagtagacaatgagcattatggtagtgtgaaactgattaaatctattgctgttaccgatggtaggtttgcttatcccactgattctatacaagcgggtctttattgtttctctttgcagaatatggagcgtggagagtatttacagcaatacgctaatttgtttttggaacccaaatccatgcagcttaccttgggtaaggataagtatgatcaactgagtttacatgctacagggtctgcattgcaggagcaatacgaagccttgcaagaagcgaaatatgtagcaggtaatcgtatggttctcgattctttggatcatatgttctatgaagctcgtgaaaaaggggatcgtgaggaaatggagcgtatccgggaggtttccagtccttattatgagagtgcctcggaacagactcgtaaactgataaatggggaaattgctaaaaataaaggctcatacttcggtttgtatctttattatacttatcgcttccaaaatcatacttttaatacagttgaggagattgatgaggtacgtaacttcataggcagttttgatgaggcgtccaggcaaagtggtatatatgtaaaaatgcaagaaggtttggataaatttgctaggtgtgctaccggtagcgttgctcctgctataacaggaattgatttgaaagggaattctgtcagtttgaacgatttcaagggtaaatatgttctagtcgatttctggtttgccggttgtagttggtgtcgtaaggaaactccttatctgttgaagacgtacaatgctttcaaagataaaggatttactatttatggtgtgtctacagaccgtcgtgaggaagattggaaaaaggctattgaagaagacaagagctattggaatcaggttctgttgcagaaagacgacgtgaaggatgtgttggaatcatactgtattgtcggtttcccacatataattttagtagatccggaaggtaaaattgtagcgaaggagttgcgtggagatgatctttataataccgtcgaaaagtttgtaaacggagcaaaataaagaaatgtgttttttaactcataaagcagtaggctgggaatgtccggtctactgttttttcttttatggaatatgttttttttgaaggaatgatatggttttattatagatagtgatgttctgtattgtatttattttttaaataaatctaatgtgtgacctgtatttctttaatgttttccttttgaagaacatattgtctgtcggataagttaaaagtttacctttgcaatataatcagaggatgagatattgatctataataaatattataaataaaacgcataggtattgtaagcgtacaatactttttggtggtctcgttggatgcttgtgttcagatttaaggcgaggtcaccttattctcgtagagaatttagattttaatttgaatgatacttgctcgcgatgagtaggtatcatttgttttttagggggggtattatggaaatggaaaataggtaggtcttt

SEQ ID NO: 3884 - DNA, 15811 bp, Unknown
  gut microbiota DNA sequence
taaaatcaaagcttttcgaagccagttaagaagggtggctgatctgaaattcttcatgttcagactggctaggctatacgcttaaaagaaagcttaccaaccaggaaaatccgctgacccgaaaatccgctgaccctaactcacttggttaaaccaaaggtaaaccgccccattcggagaataaaaaaaaggagctacattttaccgtaactccttgactctcatccgtcggggtagcgggattcgaacccacgaccccctgctcccaaagcaggtgcgctaaccggactgcgctacaccccgaatctttttttattttttcaatcgctttatctctcaaaagcgatgcaaaggtacggcttttttttatatatgcaaatatttaaagcgatttttttctactttttttcgcattattacttatcaaattataaatcaaaacattaatcttaaaacttttttttatccgcagcaaagaaatttcagtgtaaaacaactcccctttccgatttcactactcgccgagatacttccaccatgtaaattcataatttgtttgcataaactgagtcctataccactacctgttggcttcgttgtaaaaaaaggaacaaagattttatccaatacttctggaagaatgccactaccattatcacagacagaaaggaaaaatagatgtttttctaaatcacaatgtgtgctaatgataacttcgggatagatttgctctacacaagcctcacctgcattctttagtaaattgattaatacttgttctatctgtgaacgatccagcatcagtgtcgtttctgggttttctactttatatatatattgtatgtttttattaggaaacagttttttcatatcactcagtaaatcacctatatttactggagccagtatcggaacagacagacgagaaagtttacgatagttttccacaaaattcagcaaccctttacttcttctatgaatagtctgcatcccttgcaacatgatattgtaatctctctcattcataccattttgtacagcacgctcacttaatgtttcacttaatgaaataatgggcgcaatggagttcattatttcatgagtgagtacacgaatcagcttctgccatgcttccatctcattttcctccaatacagcatggatattctttaaattaaccaaccggagttccgtaccatgttgagcggaatattcggataccgtaacagccaattcttgtataatatctcctttatgtattcgtactgttttaatttctccaggctgtaatgacaggataatagtaggaaaatcagaatttaacagagccaattccctgacagaatgaatacgataaccgcacaaatcctgcatggctgcccggttcatccaatgtatattgcactgactatctactaccagcaaactgctgtcaacagtattcaataatgtttcataatattgatatcgctcttcattctcggacaaccgagtacggaattcagcaacaacattatttatttcttgtgccaatcgttgttctgtacgagttttgtgctgggtagaaaaactcaaagagaaatctgcataacgaataccttctatcattcgcgatatcatacgggtcgttttatactgccactgacagatataaatgataatacctgccataatcatcagcgaaaaaaacaagcaaaaatagagcgaatgttgataaaagagatatgcagctatagctactacccccattaataacatacaagctatcatccgtaaagtttgtaaacgactcataaccctaatttttcaagtttccgataaagagcgtaacgggtaatccccaaatattccgctgcacgactcaagttcccttcgctgcgtttcatagcacgttctatggcattgcgttctaattgttccaagttcagtatctcatccgtattcaccctcttctcgggttgtggctgcaacatgaaatttgcaggctttaacaatggcgagtccgaaagaataattgcccgttctatggcatgctgcaattcgcggacattacccggccaatggtaacgcatgagtttctgcttggcttcgcggctcagtccgtttatctctttcttatatttatgagtatacctttgtaagaaataatcagccagtaagagaacatcctctcccctttcccgcaatggaggaatagtaatctcaatcgtattgatacgatacaacaggtcttgacggaaattaccctcctccaccaattctcggatatttacatttgttgcgcttatcaaccgaacatcaataggaattatatccgttgctcccaaacgtgaaatctgccgtttttctatggctgttagtaatttggcctgcataggtaatgacaaattccctatttcatccaaaaaaagcgttcctcctgatgccacctccatacgtcccgcctttgctttgcgggcatctgtaaaagcccctttttcatagccgaacaattcactttcgaataatgattcaggtatgctccccaagtcaatcgttataaaaggacattcacgacgaggagaaaaataacgtagagaacgggccaccaaatctttaccggttccattttcacccaatatcaaaatattagcatcagtatccgataatttccgaatagtatcaaaaacctctcgcataggcgctgagtgacctatcatttgaggcatctcttcatcctgcgcgctcaatgctacaacttgttctttcagttgcctgacctctttacgagaatcacgaagtttgatagccgatgaaagcgtagcaagtagtttttctttttcccaaggtttgggaataaagtcaatagctccagccttaatggcccgtactgctttatctgtatccgcataagcagtcataaacaaaacaatagcctgcggatctaactttagtatctgctctagacaatcgaatccttcctgcccgctgatagcatcccgacgaaaattcatatcaagcagaataacatcaggttgaaaagtagtcatgaaatgctcaatacgagtcggttgagtagtaacttttattttttccacgtagggatccaataaaaggtttagtgcaaaaagcacgtcctcattatcatctataatcaatatttttccttttgcattcattattttatcctcaatatatcttgttatacgaataaaagattttctatccgcttttttgcaaagatattgttttttttaatgtgttgtctgtgcggatacgcacaaaaatagtgcgtatccgcacagagacatcattatcttttatcccacaaaaatctggtaaacaaagagataagataatggcacgctatttgattagtctacaatactaatatattaagttatgaaaaaaaaatcagtaatagctatcaatttatgccttatagcaagcatagtaactctattcggcaataagatctatatgctttatataggtgactgccatcaattgtgggaagaagcacaaactcactatgttaatcgacaatatgaaaaagcacgcgagttattagaaaagatagctcacattgatacggcccatcatgcccaatatctgacaggcgatatgtatttaaaaggcttaggaggtgaaattgattatgataaggctttgaaactttttcatcaatcggcagcgggcggaaacacgtatgctgaaaacaatataggttttatgtacacatatggtttgggagtcactaaggattacagccaagctttcaaatggttgaacagagctgccactcaaggaaatccagaagctcaaattggcatgggaagcctttataaaaacggttggggagtacgtaaggattgttacattgctatgacttggtacctacgttctgtagctcatggtaatacggacgccatgaacaatatcggttatttatataaaaacggacttggggttcccaaagactttgaagaagcttatttttggtttaaaaaagcagcagataagaataatccgatagctcaatataatataggaaatatgtattgttatggcgaaggaatggaaaaagactttgctaaaggagctgagtggctgaccaaagctgctttacaggggaatgctcctgcacaatacaacctgggccgcatgtatcagtggggtaaaggtgtaaaaaaagacttacaacaagcccggttctggttccaaaaagctatagacaacggtcatgaaaaagcaaaggaagcattaaccaaaataaaaagcgacttatccaaagaagacaccgaagacccactcctgttcacctaactataagccaaaagtactaataggtataaagacataaaaaaaaacgaacatgaaactatattgtattatagcactttctcttctgcttcgcccggaaacagccacagcacaacaagaagaatcaataacattgagtttgcaacaagctattgaaatagcacaagaaaactcaccggaagcacaagctgcccgtcatacctatcgggcagcttattggaactaccgttttttccgggcgaattatcttccctccgtcacattaacttcatctcctaccctaaatcgggagataaacaagattacccaaccggatggaacaaatcaatttatccagcaagaccagttaagcacagatctcagccttaaaataaatcaaaatatatggtttaccggtggcagcttgtttgtaaaaagtaccacccaacgcattgatgaatttgaagataatcatacagcgtataacacccaacccatagtaataggttacgagcagcaactttttggatataattctttaaaatgggatcaccgtatcgaaccccttcgctaccgggaagcccgtaaagcatatgcagaagcattggaacttgtagcctcagaaaccagcactcttttcttcaacctggcaactgcacaaactaatcttgacatagccgcctacaactatgcttctgccgatactttatacaggtatgctgagggaagatataatataggaactataactgaaaacgaaatgctacagctggaaataaacaaactgacagaagaaaccaatatgatgaatgcccgcatcgaagtagaggaccaaatgcaaacactccgttccttccttggcattaatcgggaaataaatttacgagtcattccggaagacagcattcctcaactcgaaatccctttacaaaaagcattacaactggcattcaaaaacagtcccgatcctgacacttataaacgcaaacaattagaaagccgcagcgcattagcttctgcaaaagccaatgcaggtttgaaagccgacctgtatgtacaattcgggctttctcaaaccggaaataaatttgcagattcttaccgaaaccccatgaaccaacaatatgccagtattggtatttctttacctatcctggattggggtcgtggaaaaggacgcgttcgtgtagctcgttccaatgtagacttagtagatacacaggctgaacagggaatgaaagattttgaattgaatgtatgtaaaatggtccgtcaattcaatcttcaagcataccgtgtagcagtagccgccaagacggacaagacggccgaccggcgccacgatgtagcacgccggctttatatcttaggaaaatcgacaattctagacctcaatgccgccattacagaaaaagataccgcacggagaaattatataacagctttgaaaacttattggagtctgtattatggtattagaagtatgacgggatatgatttcctcagaaaagcagagatttcatgtactatacctaaaccttaactacacggcagatataaatgatctttgtattatcgccatactaaaaaaagaaataaaaaaaattatatcaaaaaacataaactaatggatataaaaattgaaaagaaaccgtggtacatccgctatcgctactatatgatagctgcactggccttcattatcttccttatctatgtgataagcctttcattaggtcctcgcaagctgcgtatcgaaacagacaacattcagatagccgaagtaaaagatgacaaatttatggagtatgtagatgtggaaggactggtgcaacccattcttaccatcaaagtaaacactcgtgaagccggcagtgtagaccgcattgttggagaagaagggaatatgatgaaacaaggtgacaccttgttgatattgactaatccggatctgattcgttccattgaagaccaacgtgacgaatgggaaaaacaacgaatcacctataaagagaaagagatagaaatggaacaaaagagtctgacactgaagcaacagacattacaggcacaatatgagatggaacgactgcgcaagagcttcggactggacaaagaggaattcaaaatgggaattaagagcaaggctgagcttcaagtatctgaagatgaatataagtataaactgaaaaatacggcattacaaatggaaagcctgaaacatgattcatccgtaacccttatccgcaaagaattattgaaaaatgatctggaacgtgaaagcaaaaaactgaaacgtgcggaagaacgattggaggatttgataataaaagctccgattggcggccaactaagttttgtgaaagtaactcccggccaacaggttgcttcgggagaaagtatagctgaaataaaagtgctggatcaatataaaattcatacttctttaagtgaatattacattgaccgcatcacaacaggtcttccggctaccgtaaactatcaagggaaacgctaccccctgagaattactaaagtagttcctgaggtaaaagaccgtatgtttgatgtagatttggtatttaccggagaaatgcccgagaatgtccgtgtaggaaagagcttccgggtacaaatagaattgggccaacccgaacaagctatagttatcccacgtggaaatttctaccagtctactggaggacaatggatttacaaaataaacccatcaaaaacaaaagctgtaaaagttccattgaatataggacgccaaaacccgcttcaatatgaaatcactgaaggtttacagcctggagaatttgtaattatcacaggatatgatacctttggtgacgcagaagaattgatattaaaataaaacatgcaacatgaaaactttgaaatatgcctggcgcttcttaatgcgttctaaatcgtatactatcattaatttgctaggactggctttcagtctggcatgcagcatcatcttgatgcgatatatccatagggaactgacggtggatgcacatagcgtagatccggaacatatcatcattcctatacgggatatagaaggaaatcttcatccgggaagtttgcaacaaggctggtctgaaactgattctgtttatattcctgaccatcaaatagtggaacaatgccgcctgatgttacagcagcgagacaatgtggtatatgaaaacagtaactatgcaatgaatatagcagcagttgactccactttttttcatttcttccactacccggttgcagccggtgaggcccatttagatgcccctggtgacgccatcatcacccagcgctatgcccgtaatatatttggtaaagaaaatccgataggaaaagtattggaatattatggtaaaaacatcaccatcaagggagtgattggagaattgggatgcaaatcattacttcggttcgatctactggtatcatacagattggtggaacactggcaacgtatggatatatcactgatgcgcatactccccggtgtagatctggataagataaacaaagcaagcaatgtgtacagaaaggacaaaaggggaaacagaatacgctgggaatttattacttggaaaaatttatactggagaaattccattggtcacgatgacgattacgattccatcatgcaattcggtaaccgtacacacctgtatattctttcaggagtaaccatattgctattattggtaggtatattgaatttcatcaatatttatatggtatttatgatgaaacgttctaaagaatatggagtaaagaaagtattcggcttgcagcgtctgcctttgtttttacaaatatggatagaaaatctgttattagcctttgccgcattgctaaccgcctggctgttgatagaagcaacccaagtaccagtcagccggttgatgaatgaacaaattagctattcggcattcgactggcaattgtctttgggattcatcatattattacctttggtcacttctatttatccatacatcagatataattatctccctcctattgtgtctatccgttcaataacatcaaaccgtcatgctatcactgtacgtatgacattccttttttttcaatacattataaccatattactccttatcctgtccttttactttggcaagcaactgcatttcctgctgaatacctctcccggatatcggacagaaagaattctcagagctgagttgttacacgaaaacaaaaattatctgcgctctgatacagaagaaaagcgcaatgagcgctttgcccgccaagaccgtatcaagcaactattaaacgagtgtcctcacattgaaatgtggatgaattcccattattctatattaaggggaggctctatctgcatgttgttaaatgaccaggatacccgtcaacccatgctcaccctatttccttctccacaattcttccaactatatgatttaaaagtactggaaggagaaatcccccaaaaatttgaaggttggagtgactataaaatggtactgaacaaagcagcaatgaaagctatgggctatactcggctagaagatgcttttgtacgcagcgaatccccgctttggattagtgtcagcgaaaaaggagaaatggaagaaggtggaaccaaacttatgcctgtagtggctgtaatagacgattattacccaagccatctcactgaaggaataaaaccgatggcatttgtcgtagggcccagcagcggcaacagcgattttttgattgccgtcagccccgataaagaaaaagaagtcatagaatatctgaagaaaacagagaaagaaatatataataccgaagacttcacctatacttggttgacagatgaagtccacaaactttatgctcaggaccgtcaaacagcaaacatttactttgtctttgccttgatagcaatcatcatctcctgtttgggattatttggattatccttatttgatatccgacaacgttatcgtgaaattgccatccgcaaagtaaatggcgcagggatgaaagacctttacctgctattgttccgcaaatatatcaaagtaataggttgtgcatttgtattagctattccacttgcctattacctcatatatatgtatacacgggattttgtactaaaaatacctgtagatataggaatttatttagcagttctagctatcatttcctttatttcatcaagcacattaatttggcaaatacacaaagctgctcaaattgatcccgcaaaaattataagatcagaataaacacacattaaatatgaaaacactgaaatatgcttggcgctttttaatgcgttctaaatcgtatactatcattaatttactgggactggcattcagtctggcatgcagtatcatcttgatgcgatatatccatagggaactgacagtggacacacattgcatcgacagggagcatgtgtatgctatctgtaccaatacagaaggtaaccggggactgagtggactgaaacaatataactatgataccatttctatcgacaatcgtttcgtagaagctatgaccacctatattccattggaaaaggactatgtcatttccggtaccaaccgtattccggcacgtagcctcgttaccgacagtgtatttttccagttatttcattatcctatagtgcaaggaaagctatctctcacaacacctcagtcggcattattaacagaaaaatacgcctgtaagattttcggtaatgaaaatccgataggtaaagtactacgttatagcaatggcaaagatattaccgtagaaggcattgtaggagaacctgagtgtaaaactacaattaactttgatatcatcctctcttctaaattatcccaacattgggaaaggatgaatacagagctctatcgtttcctacccggtacagatataaatgccataaataagacaggtagcgtcccacggtatataaatgaccctaaatatgatactcgcacacatacattttctttaatttctgtgaaggatatttactgggacggttctttaacagaccgtgaacctgctatgtttctttcgggaaaccattcccacttaattattttgtcgggcgtatgcctgttattgctcctcaccggcatcttgaattttattaatctttacctggtagcattattacgccgcggaaaagaatatggattgaagaaagtatttggtgtatgcggcaaaacattgtttgccaatatatggattgaaaatacattactagttctgagcgccttattagtatcctggcttattattgaaataatgtctgcccctactgaatatttgttcgacattcacttttcttatacggctttcgacggatggctttcggcaagtattttattattgttaccagtaataacttctatttatccatacattaaatacaattacacctcccccattctttccattcgctctatcggtgtccaaagtcattccaaacattttcgtatgttctttctaggggcacagtatattataacttttttgttagtggtattatcactttattttaatcgacaacttggaatgttgttaaataccgaacccggctttcgtactaaaaacataatgaatgtaaatttagtatatgaatcgaaagattttagcagttatacttatgaaagtatgcaacaacgtcgccaacgtgtcatgcaattggataatgaacttaatgcatgtccttttattgaattgtacgaacctagcaatgaaaatatccttactcctacctttggtacaaactatctgaacaataaaggagaaaaggtgtttctgaatattcattacgccactcctgcatttttcaaattatatgatataaaagtaattgaaggtgagatacccgatataaataaagaaaaccggcgcactgtttttgttgtaaacaaagccgcactgaaagcattaggctatacttcaatcaatggcgctggagtgattgaagaaaatcaaaaaagggctaatgctaacgcttctcttcaacctatcgttgcagtagtagaggattattttgaaggacatttgacatctggaatcaagcctactatctatcctgtcggagcacggttcagtggtgatctttatcagatagcttatacacccggcaaaaagaaagaagtgattgatttcttacgtaatttggaatataaagtctatggaagtgaagactttgaatatactttcctggaagatgatatcaaagcgatgtatacacaagaccgccaaacagccactatttattctatttttgcaggtatggctattattatttccagtcttggcctgttagggatttctctttttgacattcgccaacgatatcgggaaatagcgattcgtaaagtgaacggtgcaagtgccaaagacctttaccgactgttattccgcaaatatataaccgttttaattatagcatttgtcatagctattcctttggcttattatctgataaatacctatactcaagattttgcagtaagggcacctgtcagtatagacatttttatcatatcattgctgttggtaataatcatatcactgggcaccttagcataccaaatacaaaaggcggcatatattaatccgacacaaatcatgaaaacagaataattttataaaacaacggaaatatgttaaggcattatataaaaatggcaatgcgccacttattaaaaaataagatacaaaatctgatatctatcgtagggctatccgtcgggatattatgttttagtatctgtctttattgtagccggttcatcagcgaagtagattcttgcttttccaataaagaactcatagcagacataaatttatgtacaacacggggagatttgtattctggtattccggcaacaacgattgaagaattgcgcaaacttagattcgatgaggttcaagattttacctttaccgtttatccccgagagcggagttacaacgtagagataaaagaagggaaagaattgccatacgatcatttgatgacaatggaagtagactctctttttaggaaagtattcactccccgaatactacagggatcatgggaagtagcctccaacacccccaatgccatcatactgacccgctcttcagcaaaaaggattttcggtgaatcagaaaatcccataggcaaacgtatgatattgacacaacgtctttttacagcaccagataccactcctcgtactggaggcatagtctataccattcaagccgtgatagaagatattcccctgaataccagcctgagttttcttgagaaactggatatgctgactttgaatgacagtgaaggaacattgcaattcaacggtcgtaataatatgactggaggttttggttttgccctgctacgtccgggtaaaacagctcgaaaattagaagcccgttttcgctccataaatatgaagcaccacatatatgacgaagaaacagctataaccgcctcgccctttggaaagaaattttgggataagtccattgctccttattttgcaggaataaccatgatagtaggcctgttgattttactgaccggacttcttaatttcttccattttcttatgggaacttttttgaatcgtaaccgtgaatacgggatacgcaaagttatgggcagtggaaaccagcaacttttttaccaactctttgtccagtctgtcatcattgcattcatcgctttcttgtttacgttctgcttgattgaaataatcagtccctatttgaatttcaatttatttaattacgttcttatcattgaaaagaacctcttgtttatacagaccgcagagtatatggtattcatcttatttttatgtatgatattatgctttataactgtattgcgcatacattacacacccatccagacagagattcatggcagtgagataaaacgtcataaacatggaatgcggaatattctgttaggtatccaattttttatatgctgggtttttgtcgcatttaccgtagctctttatatgcaagcggagaaaacggaatctaccctattcaacacattgactgaaaaagaaaaagccaatatactaagtttctccatagattatatgtttatgaagaatgaagagaaactggctttaatagaacgtatatccaaattttccggtgtacaagacaaattattggcagacatcagttatctgaaaggtatatcaggtactgggatgcaaatggaaaaaggtaacccggaaagcagttttgaagtaaatgtcatgaatgtttccactaacttcttccaattcatgaacatacctttactatcgggacacacattaaaagccaaagaggatttggtagtagacaaaacatgggcggaacgccagaaaaaagatctgttaggaactattttatacaattactcggaaagctataccatttgcggtgtatgtgacgattttatcgccgatgtatataatcaaagtcctggatttgtattcttacccagcgacttcaattattatgtaggtcattgctatctgaaatgcgagccgggggaaacggctgatataaaaaaaatgatagaaaagacattgaaagaaacactcccggaaagtattcatcctcatgtcactacattgcaggaagatatatatgaagcacaagcaatagaaaataaattgaaagggattattctattcttttctatcgtcagcctgctcattactttgttgggagtttattcgaccatcacattggatacggaacgcagacaaaaggaagtagctatccggaaggtaaatggagcaggattgaaacagattattttattgtttgcccgcctttatataaaactgctgactgtttccgcaattattgcatttccattaatttatatagtcatacaaatgtggaaaaaagcatatattgtattctttaatgacggtatcatatattgggcaggaattttcatcggaataacatttattacggccctcacggtattattccgtattctgagaatagcacaaattaatccggcagaagtaatcaagaacgaataataagaaatagattcaactatgataaaacattgtctgaaaatagcaatcaggaacttagtaaagtacaaagttcaatcggcaatcagtattctaggactggcagtaggatttgtctgtttttcattatccctttactggatacattatgaaatgacatacgaccatttccgccaggatgccgaccgtatctatatggtacgtactaatgacgaatatacggaagggaaaatttcaacacgagttccctattctttagccgcttatttgacccagcactttccaaaaatagcagttgccgccccctttcatctcatttctgaacgaatcagcgtgaatgacaaatatcaagatgccgttttttcatcagcagacagtgcatggatgaatctgatggatatccggattattaagggaaaccgtaactttatgctccccaaagataatgccgaaatagcaatcactgaagaagctgcaaaaaaatggttcagaacggaagacccgataggaaaagaggtgaaaatgctcagacataccaaaaaaatttgtgccattgtccgggctgaaaacagacatactaatttcccttttgactttataggcaacccagaattgggaaaaacctggtggtatatcacttggaacatactgattaaggtaaaaccggatacagacattgaagaattagaatcaaaaatcaatgccaacctgcctgccgaactgaaacaagtaacatcgaccagaaaaaccggtattgaacggattatacttactccgctttccaaactacattatgcaaaagatttccgaaataataaagaagctggaataacttttcagtatatcatctatttttcaatagccggtatattaatcataacgtgtgcgttaatcaattatctcaccttatttattaaccgcatgagagtccgtcaacgggaaatggcactgcgaatgatacacggtgccaacatccgttcgcttgtctctctcttaactgtggaatttttgcttctgttggcgtgtgcagttactaccggatttctgctgatagaaatatgcttttcatctttcatagaacttacaggaattgatgcagcaaaatcctctttatacggagaaacctttcttttcatcggtttgatctccctaattatattgactgccattatcggacttttatatatactatatcatcgttccctacacctctctttgcattacaataccggaaggaggaccggtacacagttacgtagaggaagtatagttcttcaattgttagtctgtttgtcttttataggatgtaccgtgttgataaaccaacaattggattacctgcgtcaccgcgatttaggattggaaattaagaatcggggcagcttttctgttatgggagacatggattatactcctttaataaaaaaaataaaagaacttcccat

SEQ ID NO: 3885 - DNA, 2659 bp, Unknown
  gut microbiota DNA sequence
aatctttccatatacatcaagaaagtaatatatcactccaccttctcaaacggaaaagcctgaagataactgatagccaccgtcatattaccaaaagcaaacaccagctttgtattccgatgcagacgcatgatgcacccctccttcccttgaaagacaccacccgtaatacgtatcttctgctttttctgaatatactcctcaagaggcttatccatcaattcaatgttataaggcatggattcatacagataaataaattcttccatctgtctatggggaataacagccacgctataggaattgcggtcttttgcaagatactgccgggggaacagatgggcaaggatgagattcaattcatccaacggggcacatacaaacagataaccatcacccgtgatatccttttcatccgtcaaagcgttcaacttctgtacagagcctgtcgcgaacgcctcctttacagcaaaggcggactcccgacgggccgcatattcttccttgctataaggacaccgttcaaaacgtcttttatggtcagcagaggtatatgaaaacactttgaagcagaaatatctttcttccttcatgccagaccgggtattaatcatcacagctctcctgccggtaaagatttcgatatagcgtttcagctctctgttgcgcaggaacatataataccacttgtggtcaggatattctttttcttcccccgtctgtgacgtggttatcagatctgacccctggtctgggcaggaagcgattgaactgcatggcagtaacctaggcgctttacccgttatgttttgattctgcggaaaggagtattcagtacccaaatccacatcattacagatttgcatcaaaacataaattatttatcatttgtacttctaaaatgaaagcttgttgaagcttcatttttggggttctcttagtaagagatccccttctctatttaatttattgataatgtgaaacatacatatcgtaattcataaccttttacgaacaattctcatacatttcttgttaaaagcattttaaaacaacaaaagatttccatttcttgggaattatagctatttttgcagccaaatggggatctcttactaagagaaccccattttttataaaacgaatcatgctatcaaacagctgattttcagatctatcacacttgttcatgataaaaaataaattatcccaaattagatatcacacgaagtcacacagtatttcctaatggcacgatcctttagatcagcattctgcatatttctatatctccccatacaaaagtcattcaatattttgtatctatcaccaacaaggcatattttgattactttaccgaatattgaatattctcccagctcttatgttaggattctagaaatatttctccgaaaatgatctgattttatccaagccaatagaacattcaggctgtcatcctacagcctgaatgaatacttcccctacaacccccttaaaataatctgattggctctgtctatctgtgaagtggagatggatgccagataaatatgagtggtcttttcattatcgtgccccaacccttcgcggatgatgtctgtagacaccttcctgtcctgcgctatgctggcccagctatggcgcgccacatagaaagtcaacggcgcctttaattccagccgcaagcctattttattcaaaccccgtcctatttgcttggccctcagtttatattgcttgcggtcatttatgtcacaataccgcaaaataggcagcaggtactcggaagtgtcatccttgtatttatccacaatctcctgcatcaactcctcccacagaatagtcagccgttgcccggtctttttccggctgtatgtcagaattccattctggaggttgctcttcttcaagtgtgccatatcaataaacgacatgccccgggtatagaaactgaaaaggaaaatatcccttgccagctccaactggggttcgaatgacaaatcaagctccttgatcattttgatgattttaaagggaacagcccgttttacggtcttgtctatgccggtatagacatgtttgaaaggtttcttgtcggtggtatagccttgctctacagccagattatacacactccgccagattctcatataataggaagtactgttctttaccaagcccttctctttcagataggcttcatacatctccatcagctccgaatcaaaggcttcaaaactcagatcttcattctttctgaattggataaagctgttcattgtcgaggtatagccttctgccgtccgtccccttttctgccgctccagtttattgatacatcgttgcatgaagttgaacacactctctacagaagggattttccggaaagaagccacgatatcatcaatggtgtattccacaccggtccgctccagatcattgataataccttgtaaccgcgtcatctcccaattcgtctggtcacgtatcagcagaagacgcgctttacattcagactgtgttgaaataagcagacttccggtggagtcgtcccactcggaaggcatgatccggtaagaagtcttgatgagccgtgtcagtctgtaatgaataatttgataacttaacgtgagttcgaaataaaatcaaaaaatag

SEQ ID NO: 3886 - DNA, 64600 bp, Unknown
  gut microbiota DNA sequence
taaatttacccctcagctttttacattgacccttaaacggggatcagtttgaaaacttgggggaatcttttcttttttgtagagaacacggttgaacttttaaaaaagaattatatttgtactattcattactgaaactatggcgaagaataatttactaagtgagcaacttgcttatattggtgttagttgtacccctacgcatctgcatttgtgtagttataatgctgaaagtatttgtatgaaggatgggaaagatatagatagtttaatcccttatttgaataagaatgctataaactggatacaaattcatggctttcagaatacggaggtcatacagcatgtctgtcagaattttaatgtcgactttttgacgatacaagatattttgaactccgaccatcagaccaagatagaacagcatgatacatataatgtagtgattttgaagttacttttttctaatgatgatggctatgtaccacaacaaatagccattgtgcaaggtggaaattatctgttgacttttatggaaaaggaaacagactttctgaatgatataaatacggcattggaaaagaatgtgttgaaaatacgtagccggcagtctgatttcctgctcagtgttattctaaacagtgtgatggccagctttatatccatcatttcggaattggaagacggattagaggatttagaagagcaattgctttcgccggaacaggctgatatgctcggtattgaaaatatacagcaataccgtcgtaattttcgtgtaataaagaaatgtattttaccattaaaggaggaaatcagcaagttgttgcatccgatcgataatgatttgttgcacaaagcaagccgtcctttctttaatgatgtcaatgatcatttgcagtttgtattgcaaactttagatggttgccgtgacatgatttcagctttggtagatatttacctttccaataatgaccgacggatgaacagcatcatgaaacagctgactgttgtttctactatatttattccgttgacttttctggcaggaatctggggaatgaatttccaatggatgcctgaactgggatggcggtatggctatgtatttgcatggacattgatgttgatactagtagcagttatctacttctattttaagcgtaaaaaatggtattgatgagagaggatggatgggatttacttaaatgtgaatcccatattcatgttttacttcattcattacaaaggtgctttccagtgaacccaaactgtcaatcgtgcccaagacattgaggataaattcctgataatacttcatattaggggagtgtattttaagcaaatagtcataactgcctgatatgttatagcactctgttacttcagggatatcctgaattatccgtgtaaattccgcagcaatgtcccggttcagtcttcttagcttgacactgcaaaataccacgaagccttggtttagtttctcagcgtccaatacagcgatatatttttttatatatcctccattttccaatcgtttgaggcgttcgaacaccggagtggaggaaaggcttacccgtgcagccagttctttggtggtcagtcgggcattttcttgcaaggtacgtagtatctgcaaatctactttgtcaagtttctctaaagtactcatagaataatattctttcaagaggttgatattattttcatatctgttaatacaaatatattgcatttattttagattccggagaatttttcgggaaatgtagtacagggttatattctttttttgccggagaatgcaagaaaagggcagaatgattttatctctcaaaaatactttttatctttgcagttgctatgacaaagtatatatatcttttttatatcttgttaggtgtatgcctgttggcgggctttggttccgcatttgatagcggacaggagcacgatgtggttcgtacagttggtttggaaaacagtgcggtggcgttgtgtaacatatctgaaagtaataatgggcaggaaaaaaaagagataaataatgaaagctaccatttttataaagtcggtatcggcggtacagctacctctttttcttttcgcaccttgtgctcttctaaaattctgcgaactcattcctctgcttccgtcatagccaagttggccagattcttgaaagtacttcttcctgaagaaaagcaaatttctttttcacctattctttattttactcaatattcctgtgaatactatatttatcagttgaggcgtattcttatttagtttattttttcttttcggcaaggtctgttttttatatcttatatttttttgtttttatattttcataatgggaactagggtggatgcttgttccttttatgaacggtgttatatgttaataactaatatataatggaatttttattggactttatacttcacattgaccaatatatgatagatattgttcaagaatatcatacttgggcttatgtcatactgtttataatcattttttgcgaaacgggattggttgtcactccattcctccccggagattctttgctttttgtcgcgggagctatttcggctttgcccgatatgcctttggaagttaatattctcgctttggttttatttctttcagctgtgttgggcgattcctgtaattatatgataggacacttttttggaaataaacttttcaataatcccgattcccgtatatttaagcaaagtcatttggaaaaaacacatgaattttataaaaaatacggaggaaagaccatcattctcgcccgttttgtacctatagtccgtacatttgctccttttgtagcaggtatgggcaaaatgcattattattatatggtgtataatctgatagggggagctttgtgggttggtattttctgttatgccggttattttttcggtgatcttccatttgtacagaaaaatctgaaattgctgattgtggctattattgtcgtttctatattgcctgccgttatagaagtaggcaggaataagtggaaaactcgccattactaaaatcaaacatatcaaaaacaatttattcaaattacatttatgaaaaattctttttttagtcgatttacacctcaagaacctaagtttttccctatgttgaaacgtttgtctgaaatcctgacctcatcatcggatttattggtagaaagcatgcagcatgataagccggaagagagagaggactattacaaacgcatcaaagatatggaacgtgaaggtgacaagcagactcatttaatttttgacgaattgggaaaaactttcataaccccttttgatcgtgaggatattcacgatttggcatcaactatggatgatgtaatagatgggattaacagttgcgccaaacgtatcacgatctataatccccatcccattgctaatagtggaaaagagttaagtttgttgatacagcaagcggctgtttatataagtaaggcaatggacgaattggaaattttccgtaaaaagcctactgaattaagagcatgttgtacaaaattgcatgacatagagaatcaggcggatgatgtatatgaactctttgttaagaaactatttgaggaagaaaaggattgcatagaactgattaagatcaaggagataatgcatgaattggagaaaacgaccgatgcggcagaacgggtaggaaaaatcttgagaaacctgattgtgaaatacgcataaaagcagaaggtacaatatggaattattagtgattattattacgttggctttgatttttgactatattaacggatttcatgatgcagccaattcaatagccaccattgtgtcaaccaaggttcttactccgttccaagcggtgatatgggcggcattttttaattttgttgcattctttattgctaaatgtataatcggagggttcggaatagccaatactgtatccaagacagtagtggaacagtatatttccttgccgattattctttcgggggttattgcagctattgtctggaatctgtttacatggtggaaggggattccttcttcttcttcgcatacgctgatcggaggttttgccggtgctgctattatggctcatggttttgatgccattcagctcaatattattttgaagattgctgtttttatctttttggcaccatttatagggatggttgttgcttttggattcacgttgcttgtccttcacatttgtcgtcgtgcacatccgaatacggctgagatgtggtttaagaaattgcagcttgtttcttcggctttgttcagtatagggcatggactgaatgattcccagaaggtaatgggtattattgctgctgccctgatcgctgctcattcggaagggttaggaatgggaataaatagtatcaatgatttgccggattgggtggcattttcttgttttactgccatttctttaggaacaatgtcaggcggatggaagattgtgaaaaccatgggaactaagattaccaaagtaactcctttggagggagttgttgcggaaactgctggcgcatttacattgtatctgacagaatatttgaaaatacctgtaagtacaacccacaccattacaggagctattatcggagtgggtgctactaagcgtctttcagccgtccgatggggaataacaagaagtctgatgacggcttgggtgttgactattcctgtcagtggaatattggccgctgttatttacggagtagttactcttttttaggatgaccggattgtaggctgttctagaaaataaagatctgtcgtgaccgaggtgactgggaagttacctcggttttgtatacatacccatttgtaggtaaaaagtggatgaaactaataataaatataaaatgttattgtgagtttgttatttgtttctatttttgtagtggtcttactgaacacaaaaatgagagaaaacgcaaaaggcaggatttttatagcatggctgttgttaatgacgcttatgccatttttcatggtgaagacttttcaccaccatgaagaagatgccgtttgccattctgatagtgggaattctcatgattcctctcatcagtgtcccgtgtgcaatttcacactttcaccttttacacaagttgaaacattacaacttcatattgttcttccggtttttgattatcagccggaaataacagtggataaggtttgtcaggttaaatcttatccttattatctgcgtgcacctcccgtttgctgattcacatagtatcttttatttattcacaacatcaaatgattgtaatttatgcgtatcagatatgtttcgggtacgctgggaatgttttttaccttgttttcaaatgcacaggtagtttctgatacgattaaaagtgtggatttatccgaagtggtggtgactggatcttaccgacatgctcaggagaaaaagactaccctgacactcgagttgtttcagaaagattatttgaaccggcattttaccggtaatttggtacagactttgaaaaatattcccggtgtacactcgatggatattggtgcgggattctccaaacctatgattcgtggtttgggattcaaccgtattgccgtatccgaaaatggaataaaacaagaggggcaacaatggggggccgaccatggactggaaattgatgcttttaatgtagacgaggtacggattctgaaaggtccgtcttcactgctctacggcagtgatgcgatgggaggtgtcatcgaaatccttcctttgcttccacaaaaagagaaccgattttttggtgaggctgccttattgggaaaatcagtgaacggcactgtgggcggttcactgatgctaggtattgagaagaatgcatggctggtcagagtacgtttttcagaacagcactatggagattatcatgtaccggtcgataccattgtatatcttacccagttggtgcctgtttacggtcgtaagctgaaaaacaccgctgggttcgagcgcaatgtttctgtcatgggagattatagaaagaagttttatcagatgaatattgctgtgagcaatgtttatcagaagatgggcttctttcccggtgctcatggcattcctgatatttcccgtttggaggatgatgagaacagccgtaatattgaattgccttatagcaaagtgaaccatcttaaagtaaccacgcatcaacagtatctttggaatgggatacaactttcaggtgatttcggctatcagttcaatcatcgggaggaatggagtgctttccatacccattatgacactcaggtgatgcctgcaaaggatccggatagggaactggtgttcaaactgcatacattcagctcctctttgaagctgcggttgtccagttcttcttcctgggagcatatggcagggtggaatatgcagatacagaaaaatgcgattggcggatattcttttctgctaccggaatacaagcgttttactaccggagctttttggctgacgactttccgattggataatcagttgtctgtaactggtgggatacgttatgatcggggaaggattgatataacggcattcgaagatccttatttggtggagtatctgcacagacagggatatgaagaagaggtaatacaggcatatcgttggcgaagttatccggtggacagggcttatggtaattattcctgttcggcgggagtagtgtggacacccgctgccggtcatcttctgaagatgaatgtgggacgtagcttccgtttgccgggagtcaatgaattagcatccaacggagtgcatcacggaactttccgtcatgaaaaaggggatgccactctttcttcggaacaaggatggcagattgatgcttcctataccttggcttataaaaaaatggaactggttgtttcatcttttgccagttggtttgataattatatttatttgcgccctatgggagaatggtctgtattgccccatgctggacagatttatcaatatagtggcgcacgtgctttgttcatgggtgttgagataaatttcaatatggattttctacgccattttaattatcgtttagtcggtgagtatgtctatacttataatcgtgacgaacatacggctttaagtttttcacctcctgtatccatgcgtaatattctgacatggaataaaaaggattttcagttgtatgctgaacttcaaagtatagcttcgcagaaccgtatagcgaggaatgaagaccgcacacccggagcttgtttgattcatctgggtgggagtattcatatacctatggccaaggcggatattgaaatatctttgggcattcgtaatttgtcggatgtgaaatattacaatcatttgagtttttataggaaagtggaaatccctgaaccgggaagaagctttcagatttcgattaaagtaccatttaaacaattattaaaatgaaaacaaaattttattttcttgtaatcagccttttggctatatgctctgtttgtctgcctgcgtgtgataatgatgaaaaaggggatgtaacaaagcccgtgatcgatttgatagaacccgaagagggagcggtgttgaaaattggtaatgggaaaggggtacattttgaaatgaatctgtcagatgatgtgatgttgagatcgtataaaatcaatattcataataattttgaccaccacggacatgattcccgggcagccggagagaaaaacacagcttttacttttgacaaggtatatgatgtttccggtttgaagaatacaaaagtacatcatcatgatattgttattccggccgatgctgctcccggagattatcatctgatggtatggtgtaccgatgcggcgggcaatcagacagaagtggctcgtaatattgtcttgagtgcggacggaggtactgaaacggaacatgatcatgagtgattttttgtattaatcgtattgtgtgtattaattgtctggtgacggtcgatgtgaatcggccgtcactttattttgttagatgtcgccaaagaataattttcttccaggaggtaataatccgtttgtaaatagaatatttgttctataaatagtgataattgtagctctattttctttatttttagtatatcttgtttgatataactgcctttaatacctttgcaacaggtaaaaacagaaatatataactctaaaaagataaagattatggctacaaaaaaattacatttcgaaacattacaacttcacgtaggacaggaacagccagacccggctacggatgctcgtgcagttcctatttatcagactacatcttatgtatttcataactcggcacatgcagccgcacgttttggtttacaagatccgggtaatatttatgggcgtctgactaattccactcaaggtgtttttgaacaacgtgtggctgcattggaagggggagtggcaggacttgcggtagcttccggggctgctgccattacttatgcgtttcagaacattactcgtgcaggtgatcatgttgtagctgcaaagactatttacggaggtacttataacctgctggcgcatacgttgccgacttatggtgtgactgctacatttgtggaccctggtgatctttctaattttgagaaagctattcaggagaatacaaaggcggtgtttatcgagactttggggaatcctaattcgaatattatagatatagaggctgtggcggaaatagcacatcgccatcacatacctttgattattgataacacttttggtactccttatctgattcgtcccatcgagcacggagcagatattgtggtacattccgctacaaaatttattggtggccatggaacttcactgggtggcgtgattgttgattcaggtaaatttgactgggtggcatcaggtaaattccctcaactgacagaaccggatccttgctatcatggggtgcgttttgtagaggcggcaggtccggctgcttatgctgtccgtattcgtgctattttattgcgtgataccggtgcaactatcagtccgtttaatgcttttattctgttgcagggattggagacactttcattgcgtgtggaacgtcatgtagagaatgcgttgaaagtggtggagcatttgaaaaatcatccgaagatcaagaaagtaaatcacccttccttgccggaacatcctgaccatgctctgtatcagcgttatttccccaatggagctagttctattttcactatcgaagtgaaaggtggtcaggaagaagcacatcgtttcatcgatagtttggaaatcttttctttattggccaatgtcgccgatgtgaagtcattggttatccatcctgccagtaccactcactcccagttgaatgcggaagaattggcggaacagggtatttatccggggacagtgcgtttatcaataggtacggaacatatagatgatttgctggccgatttggatcaggcattagctggaatttaataagatatactatatatagaataaggaatattactacaatataaaatcaatatatggataagaagtgtatgccggaggtttgtgtaaagatacattatacaggcttctggcattactttatttttactgataaaaaaggatagatcattaatccaaataggattcttttttgttattaaaaaaagcatctttgcggaagtgggatttcaaaggcttaatttaaagagtttatggataccgtttctttaacttaaatacaatggttatgaatctagtccttgctattattccggtattgttattgattatcctgatggcgttttttaaaatgtccggtgacaaaagtagtgtgatttcccttgtcgttactatgctgattgcttttttcggctttcattttccggtaaacgatttgctgtcttcttttctgtatggtgcattgaaagctgtttctcctattctgattattattttgatggcgatattcagctataatgttttattgaagactgaaaaaatggagattatcaagcaacagttttcttctatttctaccgataaaagtattcaggtattgctgttgacatggggatttggcggcttgcttgaagctatggcaggatttggtacggcagtggctatacctgcggcgattcttgtcagtctcggattcaaaccggtcttttcggcaacagtcagtttgattgccaatagtgtggctactgcttttggggctattggtacaccggtcctggtattggcgaaagaaacgaatctggatgtgctggtgctaagcgccaatgtcgtgttgcagctttcggtactgatgtttctcattcctttcgtattgctgttcctgaccgatccgaagttaagatccttacctaaaaatatcttcctgtctttgttggtcggtggtgtgtcgttaggcagccagtatgttgccgctcgttatatgggggcggaatctccggctattattggaagtattttatccatcattgttattgtggtctatggcaaactgactgcttctaaagaggaaaaagcaaggaaaagcacattgaaagggctagaggtactgaacgcgtggagtatctatcttcttatcttgttcttgattgttctgactagtccgttgtttcccggtttacgtacaacacttgaaaataattgggtgacccgtatcagtcttccgattaatgattcaactatgaattatacggtttcttggctgacccatgcgggagttttactttttgtaggcacgtttgtcggcgggctgatacagggagccaagatatgggagctgtttgctgtactctggaatacggtaaagcagttaaagaaaacttttatcacggtaatttgtctggtgagtttgtccactatcatggatacggcaggtatgatttcagttatagccactgctttggcagttgctacaggaagtctttatccgttgtttgcccctgttataggttgcctgggtacctttattacgggcagtgacacttcttcaaatattttgttcggcaaattacaggctaatgtggccgggcatattcaagtaagtcccgactggttgtcggcagccaatacggtgggggcgacaggtggaaaaataatttctccgcaaagtatcgctattgccacttctgccggaaaccaacagggaaaagaaggagaaatcctaaaatccgccattccatatgcattggcgtatgtgttgataaccggagtgattgtttatattttcagctgataatcgtttgtaaattcaagagggcgttttaatattgcctgtttgttatggattgaaataccctgtaaacgaggatcaactgttgaaaaatcgtaaaaaaagagatggataggagatttattgccaaaaaagaatttaatttgaaccgttttataatttataaaaaaaagaacatgaacgaattaattgctaaaatcaaagaattgaacgaagcttttatgtctgatgcagcattgcagattgaaaaaggtaacaaagctgcaggaacacgcgcacgtaaagcatcattggaattggaaaaactgatgaaagaatttagaaaagcatctttggaagcttctaaataatccttcattcgtcttttaaagatttttataagccatccttcggggtggctttcttattttctaccaggttttgcttttatttcgggggataattgatatttttgtatttttattggtgggtggttaacctaaaggagaagggatgtttatgaagaatatgtgtctattgcctgtatgggcggttttattgattatagcagggactttcttttcttgtgaaaagaagaaggatatggctatataccgtcaggcggattctttgaacttgctttcttatcgtatgcgctataaaaatttggacacagcgtgtaaagcggcgcatgacgcctacaaactggcggatggattcccctccctgcgtgccggggcattgaataatcagggtttctgcgcctttatccacatggactttgaaaaagccgaagatctttttcttcgcgtatatgaggaatcaaacaatgaattggaatgtttgatagcagatatcggtatgatgaaaatttgtcagcgtaccgccatgaacaaggagttctatgattatcgtaacagtgcgttacggcgtatgaagcgtatcagtgatgaccgttctgctataaccgatcccggagagctggagcgacttaattatgcccgttccgagttttccattgcttctgccatctattactattatttgcagcaggaacagcagtctttggaggcgattaatgaaataaaagtagacgaggcgctggaaagtgatactgcccaattgctctattattattatatgaaagggtctggcggtatgtatgaagcggatacaccgcaggatgtggtattgggtgagtttaactatctgatagaatgtctgggtatcagcagggaatacgggtatgtctatttcgaggcgaatgcatctcaggcaatggcagaattgctgaaagagaggaaaaatttcgatttgataatggaaaggcgtcccaatgtgatgcgtgccatcaataacgaggacttgtcgtgggaggaattgaccatgcgttttgcctggcaggctttggatttgttcaaaaaatatggagatttgtatcagatttcgggtacataccgcactttggcgtcgtgcagcaacgagcaaggcaggtatgaagacgcgctgcattacttgtcggaagcactggggtacgtcaatcggcatcacgagaaatattaccattgtacggataccatggacaggctacgtccgtatgttcccatggctaccacttccattgaactggaatggattaatgacgatggtataaaaagtgttcccgaatggattgcccgtttccgtgaacaattgagtgtaacatatgcagcgttaggaatgaaaccccagtcggattataatcgtaatatttatctggatattttggactacacccgccaggacaaagaattggagagccgttataatgcgttggaaaaggaatcggaggccttgaacggacttctggtggtagtggtgattggtatcgttgtccttatcattctattttggatattgaataaaagatggcgtgtgcggaatgctctttatattgataagttgaaacgtactttggaaatatgccgtaagataacggcttccgtacccattgatgcgggggagatagaggatgtgacaaaagcggtagttgcctcggtgaaagaggatatcctttcgttggtgggagcgacggacttccgtattgtggctgaaaatggagaggggaatgaggtgccggggcaagggatttgtacaagttttatcttgaatattccgggcagggaacaacctttgggcgaggtgcacctgtattcggagcacaaaatgaagaaagatgataaagcactgatgagggtcattacaccttacatttcgtggacactggagaatggactggcttttatttcgttgggcgatgaacggaaacggctggaaaaggagcaatatgtccatgaacagcatttggcggagaataaacggcagaatctggtgaagaaagcctgtctgtttattgtcacaggcattatgccttatatagaccgaatcatgaatgaagtgcataaactaaccgcacacaactacattcagaacgaagaaataaaagaaagcaaataccgttatatcgacgaactgattacccgtatcaatgagtataatgatattctggccttatggattaagatgcggcaggggacactgagtttgaatatagagaattttgagttgaattccctttttgatgtactggtaaaagggcgtaagactttcgagatgaaacaacagactctgaccatagagccgactgccgccattgtgaaagcggataaggctctgacgcttttcatgataaatacattgacggaaaacgcccgtaaatatacgcagccgggaggaaatgtttctgtttatgcgcaggaaacggaatcttacgtggagatttcggtgaaagatgacggtccaggactttcacaggaagatgtggagagtattctgagtgagaaagtttatgattcgggtaaaatcggattgcagaccagcgaaaatgtcagcgaattgcagaagaataaaggtcacggtttcggtttgatgaattgcaaaggcattattgataaatataagaagaccaatgagatattccgggtctgtctgttccggatagaaagtgaattggggaaaggcagccgtttctatttccgtttgcccaaaggagtgcgcaaaacgttgatgttggtgttggtcgcttttcttcctgtcctggcaggatgtaatgaggggagggagaaagatgggaaagcggaacagctcactgtcaatgattccattcagcgatatgataaattattggctgttgcgaatgaatatgcatacgatgtttacaattgtaacattgatggattatatcaacaggcattgtgttatgcggacagtgctctatattgtttgaataagcattatattatgtattcgggcagcaaagggcctttgttggaattggaaggagagggggtagcagcggatttagattggttcaaccggcattttgataccgattactatgccttgctggatgttcgcaacgaggcagcagtcgcctttttggctttaggtaatctggaggcttatcgttataacaataatgcttatacggcgctgtacaaacagatcagtgaggacacctcattggagcaatattgccgccagatgcagctttctgccaataataagacggtggctatcattctttgtgtggttattttgttggtattgctggtgggatattatattctgtatttccgccaccgtttgatttatcgttataacttggaacaggtgttggaaatcaacaagcaggtgttttcggcttctttgcttgacggaagagccgaccgggatattgctgcaagtctggtcaatgatatgtttgagacggtgaatgagttgctgcccgttgatgtgttgggcgtagcggtttatagtgaagacaaccacagcttgaattatgctttttcaccggtggaggatgagaatgaagaaatgcgtgagatgatggctcgtagttttgacgcgaagacaccttattggcgtgagaaagatagggtaaaatgtttgcccttgtgggtggaagcaggtaacgagaatcgttgcacgggtgtgctggcattgaaaatcgctttgcctgtggagcgtgaggacgaccgcttgatgctggagcttgtggccggatatgtagccatcattgtatataatgcagtggtactgatggcgcagaaatatcgggatatagaaagtgcgcaggatgatgcgcgccgagccatacgggaggaaaaccagttgcatgtgcaaaatctggtattggacaattgcttgtcaaccattaagcatgagacaatttattatcctaaccggataaaacagattatcgacaggttgaacacccgtcaggctggagaaaacgaagctgtgcaagtagaaacgattggtgagttgatcagttattataaggatatatttactttgctgagttcatgcgccgcacgtcagttggaagaaattactttccgcagaggtgttgtgaaagccggcgaactggccgattatgcggtacggtatataaaacgtgctggaaaacgtatgccgcatcgggtagaactgaggacggaggtggaacatgtttccgtactgggagatgtcattcagctgaagtttatgttggagaatttaatagatgaagcgctatcatacgaggtggatggtgttttggaattgtgtatttataaggataaggattttgtgcggtttgatttccgcgatacgcgtcgcgaaaagtcgcaggaggagttgaacttgttgttctacccgcatctgtctcgtatgaagcaggggcaggaaggagttctgaccggtacggaataccttatttgtaagcaggtgattcgtgaccatgatgaatttgccggaagacgcggttgccgtatcaatgcgcagcctgccgctgaaggagggttcaccgtatggttcaccctgcctgcccgttgaatgtagaatgtaaaaaaacaatgcatattatggagaataatagatttaaagtcatcattgtagaggatgtcaaactggaattaaaaggaacggaagagatattcagacacgaaattccgaatgcggaagtcatcggaacggctatgactgagaatgagttttgggaattgctgaaagtgcagttgcccgatatggttttattggacttgggcttggggggatcgactaccatcggtgtggaaatctgttcttctttacggaagaactatccggatatgaaggtgctgatttttactggtgaggtattgaacgaaaagttatgggtggatgcgctgaatgcgggtgcggatggtataatcctgaagacgggagagttgctgactgctacagatgtacaggcggtgatggatggcaagaaactggttttcaattatcccattctggagaaaatagtggtacgtttcaagcagtcggtggctcaggagcagcgcaggcaggaagctgtcattaattatgatattgatgaatatgatgagcgtttgcttcgccatctggccttggggtataccaaagaaatgattactaatctgaaagggatgcctttcggggtcaaatccatagagaagcgtcagaatgaattgataaaccgtttgttcacattggatgaaagaagtggtgtcaatgcctgtcgattggtgacccgtgctttcgagttgcggattcttgacattgataatttggaaccggatgaagagtaaatattattttcctcataccgctactgtgttttttctgctgacggtagctgtagccttgttctcatggataggaagtatttatgggctggggaaggtgcaaagcctgctcagtcccgaaggaatccggtgggaattgaggcatgctatggggaattttgtccagacaccggcattgggcatagtaatgatgctttttttagggttcggcattacggttcattccggggtatggggtacgttggggaggatagtgaaaagaggaaagcccatttcccgtaaggaaaaacgtgcgttgatattggcaggttgtatactgcttgtttatatcataatgattatttgcaccacttttgctccatggactatgttgcgtagcgtgacgggatctctcacgaactctccgtttcaaaaagggatttattatctcatttcgtttggtgtgggattgtcgggtatggctttcggttatgcatcgggacgttttcgggatgataaggatataataaaaggtatgtcctgtctcttttctcgttttgccgattactttgtggcgcttttttttatagttcagttcttttcttcattgatgtatacgaatttggtggaatgggttggaatagattcatatatagtgtcttacgctttccatatttgttgctatttaccttttgcttggatgctgaatagaaaaaaaatagattgttaatgcaaaaaagttgcggattcttttggtaatttcaataaaaaccgtacctttgcactcgcaattaaggatggttccgtagctcagctggatagagcaacgcccttctaaggcgtgggtcttgcgttcgaatcgcaacggaatcacataaaaaaagctgtatcttctgagggtacagctttttttatggaaatatttaaaaaggatttatctataagcggggctatggaaaagatcttgtccatatctataaacctttcccgttggatagttaagggttttcttcctgtttgttctatctccgcaagcctttggagttaactccatagccttgggagataactccaaagcttatggagttaactccaaaggctatggagatagaatacatccgtataaaaaggtttaacctggaaagagaaaaggcttatgcaacaggaacagatgcaatacattgttgtttaattccgctggcgggctattactttttctcagtttctccgccctttgggcttcatggcagcggaaagattgaaccggttaaaaagtcatgttaaccctttttgtacgcgtaacttccatgtatgcaggcgaggggatggataaccatcattttactgaggtgcatgatatttatgtaaaggatttgaaatgcaaaaaggtgaatgtagctgcattggtgcttcaaggcacagaggagaagcctatttataacgtgacttttgataacgtggatgtggataaagcagggataggtcttggtttctcgaatacgaagacaattggggtttctaattgtaattgggaggttatgttggggtgccgtctacagccagtgcgaaagatggtatattcgataaatagatttgtttgacttcttggtttacttcgccgattccttgaaagagtcttgttacgctggaatgacagagtaaaaggaaagcaggaaaccgtttccggacaggctgggggaggatttttcatccctcagctaaacaaatgtttttatagatggttctataagtaaaaagacgataattatgagtacaaacgaatttgcccgaattttattgacttggattaagagttttctatcatggataggcatcccgcgcgataggttgaatgaactggatgagattattttcttgatcctgattgtggttattgcttttgctgtaggagctgtttttcattatttatctgtgcgtttcacacggaaggtgttgaaatataaaaatatcagttttttaagttcgttgatagaatacaatgccttgcggaaaatgtctgcggtcattccgccgcttattatatccgctttgttgccgtttgcgttcgactatcgttctacttggtttactgtcagtgaaaaaatcacttggatttatttctttatcgctttgttgttttcggtcaatgccgtgttaaactcggtaggtaatgtgctgatgaacaaggagcagttacagaatcgtccgatgaaaggtttcatacagatctttcaagtgattttttcgtgtgttgccatcattgtcatcatttccatattgattaataagtcgcctctcaacctgattaccggactgggtgcttttgctgccgtactgatgttgattttcaaagataccatccttggctttgtggcgggggtactgctttccgagaatgatatggtgcatatcggcgattggattgagatgccgcagaataatgtgaatggggtggtgatggatatcactctgaacattgtgaaggttcagaatttcgataatacgattgtcactatacctccttattcattagtctccggttcatttatcaattggcgtggaatgactgaatcgggcgggcggcgtattatgcgcgagtatgcattgaaactggattacatacaaccctgtactcctgaatttttggagaaaatgaagaagtttgatgctgatttggccgactttatcacagaaaagcagaaacaggcggctgaaggaaaagtagcgaatactgacaatccggccggattggtaaatggaaccatcgatacgaatgtagggctgcttcgtgcttatatgactctctatctgaagcgccatccttttatcagtaaggacctgttgctgatggtgcgcacattggctcctacggagaatggcctgcccgtacaaatttattgtttctcgtccaataagaactggcctagttatgaatctatccaagcggaaatcatggaacattttgtttctgttcttcccgagtttggattgtatccgttccagaatcctactgccagagattatgtaatcagtggtttgatagagtctggcaaggacctttctactgtagacggaattccttggcattcggtcttgccaaaggaagaaaaggtatagttagggatttaaacatttattaatgacttgcggttgaacaattcttgttgccgccgtgttatataaatgtgtttttcatagtattagattaaaggttgaagattgcaatcggcttgagagaagtagttgcatctgaagtagaagcgtctactataaaaaatatagaaaggttgttccttacgggacagcctttttgttttgttaaaagaaaccattcactttaacttgaaatgttaaaggagttgttgcttttattaaacaatactataatttcttcttaacgcttctttaaatttgcagatagcaggaaagtgtgtatatttgcatgtgtgtttttcatagtattagatttaaggttaacaaaaggttggagcaaggcgttgctcctttttttatggagtaacgtgaggagtacatctgctgtccggttccgatatccgatacagaaccacagagaagaatccgtgcaatgtattcctctccgtgactgtgtaacttaattctgcatttttaatgcaagaggcaggctgaattaaataatctcgatgccttgcttccggcataactccaatcccacatcctttaacttgaatttctgtatctttccgctgcccgtcatggggaactcatcaacaaagaagatatatttaggaattttgtaacgggctatcttgccgtcgcaaaagtcacgtatatcgaattcgttcatttccaccccttcgtgcaagataatgaatgcgcctaccgcttctccgtatttcttggaggggataccggctacctgtacatcttttattccttccatctgatacaggaactcttctatttcccgtggatagatattctctccgccacggataatcatgtcttttatccgtcctgtgatacgataattaccttcttcgtctttcactcccagatctcctgagtggagaaagccgttccggtctatcacttcggcggttgcttcggggtttttgtaataccccttcatggtgttataccctttgttgcacatctcgccttgtacgcctatgggacattcctcgccagtttccggatcgatcacttttacttccgtaaactcgaaatcacggcccaccgtgttgcagcgtacatcaaacgaatcgtcgatgcgggaggctgtcatgccgggagaagcttctgtaagcccgtatacactggtgaccttcataaacattttctcttccacacgtttcatcagttccaccggacagagtgagcctgccataatgccggtgcgcagactggacatatcgaacatatcaaacatgggatggttcagctcggcaatgaacatggtaggaaccccgtacaaggccgtgcagcgttccttgtggacggaggcaagtaccagcagcgggtcaaaacgttccaccatcacctgcgtgcatccgtgtgtaaggcagttcatggtggctaataccactccgaagcaatggaacaggggtacacagacacatagtttgtcatcggaagtgaatttcatgtgctcacccgtcaggaaaccgttgttgctgatgttgtaatgggtgagcatgactcctttggggaaaccggttgtgcccgaagtgtactgcatgttcaccgtgtcgtggcagttcaccttcgcttttgcttccagcagctcgtcatcgtctatgttgcatcccagaagcagaatttcggcggtgttgtacataccccggtatttttcggggccgatgtaaatcacgttcttcatgcaggggaaacgtttgctcttcagatatccgcgctggctggtctttagttcgggcagcatggcgtagaccatatttacatagtcgtcattgccacggtctccgtttacgatacacagcgtgtgcatgtccgagttctggcagaggtattccagttctgcctgtttgtagttggtatttactgttacggccacggcgccgattttggcgcaagcgtacagaaaggtcagccagtcgggcacattacccgcccagattcctacatgggttccccgtttcacgccgatggcgagcagtcctttggccatgtggtctacacgctcgttaaattgtttccaggtgaagcgcagattgcggtcggaatatacgatatattctttatcgggagtggtgagggcccaatgttcaagccagtcacccaaggttctcgtgcttaattccatcataaatcaaataggagtatagataacagccaatattttggcggcttgtccttgatatccgtgtacgtggtgcggaacgatagaatcataataaatactgtctccggctttaatcagatggcattttttaccgtggcatacttcgacggcgccttccatgacatagataaactcttcaccttcatgcgaggagagtgagaagtggctttcctccgtcggttccacgtctacgatgaatggttccatatgcctgtccgcttttgattttgacagtgagtggtagcgcatatgtgtacgcaggtccattgcattgttcgagaaactgatagtatcctcactctcttgtttccggcagattactgctccttgttcttcctggtcgtccagaaaagtgcccagacgtacccctaacgcgcgggctatcttgatgaggggagccaatgaaggaagatctacattattctctattcgttctatttgttcttcggcaaggccagagcgtacggccagttcggccacactgatttcttttgtttcacgtagtgattttattttttcaccaacaatctttgtgctgtccatggtttgtttttaataagtttgcaaagtataaagtgcaaatatataataaaaaagaattgggcactctgtttttgttctgaatatgtaaaaaaggcaggttagcgacgaattgccggtcatttgtcattaaccgtcggtaagtttcgaatatttgtgttttttgttctatctttgttctcgaaacttaattaaagactaaaacttatgttctcagggattgtagaagaatatgcggaggtggtgcgtattgtaaaggagcaggaaaatctgcacctcaccttgaaatgttcgtttgtggacgaactgaaaatagaccagagtatctctcataacggtgtgtgcctgactgtagtcagtttacaggatggaacgtacacggttaccgccatgaaagaaacgatagagcgttccaacatcggcttgctgaaagtgggagataaagtgaatgtggaacgcagcatgatgatgaacgggcggctggacggtcatattgtgcaaggacatgtggatcagactgccgaatgtatggatataaaggatgctgaagggagctggtattttactttcagatatgcgtttgacaaggaaatggcaaagcgcggctacatcacggtggacaaaggctcggttacggtgaatggtgtgagtctgaccgtttgtaaccctacggaggatacttttcaggttgccatcattccttatacttacgaacataccaatttccatacttttaaagtgggaagcattgtgaatatagagtttgatatcatcggcaaatatttaagccgcatgatgcagttctcctgattcttttaccgcaggttgcacagatgattgttgaagatgaaagaaacttctttgtggaaatccggaattatccgcatcggcttttgagcaaaaaagaatctgtgcaatctgtggtaaaatcgaatatcagaattataaatctttcagcaatatcttgctggtgcttttataatattcttcacgggcatttgccagcgcctcccaagaactgctgtatcgctttttgtctattttgaaggcttccgttccggctatgtccagtctgttcagcagcatagccacgttcatccggttgatatctactgacggcaaatagcctatgctttcatcgtcaccgtccatagcagtttcataaatcatgtgcatgtcctgtagttcatacaggattttcttggtgagccttatcgggattttatgttcgtcgctgagtgtctcggcggtataaggagcctcttccgtctcaaagcgcttgcatatcagagacatgatgaggatacacagaaagtcgtgataacggcggctgatatttgccgtttctttgctgaaactgtagttgcgaagattctgtgccacatagcaaagttctgcgccatacaggcagattccccatgaaatctgcgcccataacaagaacataggaatggcggcgaagctaccatagattgcattgtaccttgatacccatatctgactgccgatatacaagtattgaaaagcctgaaaggctgtgcctgcgatgatacccggaatgatggcatacttcagtttcactttagtattgggcataaagacgaacagtcccgtaaacatggcccaagtcaggatgaaagggatcaggcgtaccagaaatttcatcaggggtgccagtaatacgaagtcctccatgtttttcaccatggtggacataaagatggtaagaccgctggaaagtacgataagtaggggcagtaagagcaggatggagaaataatccgtcattttgcgatacagtgtacggggcttcttcacttgccatatataattgaaggtacgttctatgttataggtcaggctcagaatggtccagaacaacatcaccagacccactccgataaaaattccgcttttggcgtgcaccagataggagtcaatcaggccaagaatggtttcggcagccgcactctgtccttcaagaccgctacggaactgggtttccagcaggttggagaagccgaaaccgcgtgcgatggcgaataaaatggccagaatgggaatgatagaaagcagggtgctgtatgtcagtgcggatgctttattcaaaatacgtccctgagtgaattcacgaacagaaagagtagcgatttttattgcattatagagtattcctcgggatttgctaacctcgtcttctgtcacccgccatatatcatctttgagaaacgattgcagacctttcagtttttccttgttcatggtactcataagctcttcattaggatatatgaaaaaaaagcagccggcctgtaagccgggttctgttcctcgccttgcggcgaagtgcctgccatttatctacgcctgttgtcaccaacaggctctagcggtctaccctccgacgtggggcgagcaaccctcataatgtcggtttacatgaccttacaactcctaagacgtacagcccgtcatgtcaccatgcggctggtgggctcttaccccaccttctcacccttaccccgtttcccgtaggaattgtggcggttgttttcttctacgttactccacctttgcagatagctttctgttaggaagtaggatgctctgcgttgcccggactttcctctttcgccttacggcgtcagcggcagaccggccggctgcttttaagtctacaaagatagtgattttaggttaaacgtaggataataaagcggaaaaaagtaagaaaataaatggaaaaacgaagaaagagcggaacagcccattactttttcttggtatatataataatgagaagagaatcggtgatgatcggttcggcactcctgcttatcgtatagaaacaacggtaaaaacagaaatataaaagtaaatgaacagtgccggaaagagaagtgggtgcagttttcgctttccctctccggacacggattttagcggtagaattccagttcgtttctcaatgaacgcacttcctgttgcagaagttctatacgttccagcatgtggtgaatggcgtcgattcctgcaatattgatggacaagtcataatataaatgcgtgtaacgctccagttccgctagttgggatgtggggaggtagcgttcctcgtcaatcacccggacttcgatcagtccgtcttcttccagttccataatgaacgacgggtccacatggcaacggtcgcaaaaatcgttgataataattaaatcggtctgcataatccttctctttttttaattgctactatcttttaattggcggaacagctctttctgatgttcggtcaggttgctaggaatggtgacattataagttactatcagatcgccaaatttgccttcttccttgtaaacaggaaagcctttgcctttcaaacggactttggttccgttctgggtttcaggttttactttcagttttaccttgccgttcagtgtgtccacggtttcttcaccacccagtacggcggtgtagaggctaagcggagcatggatatataaatcatttcccaaacgtttgaatacaggatcgtctggaatgacaaaggtgatgtacagatcgcctgcaggaccaccgtttacccccggtgcaccatgaccacgcaatttgatagtctgtccgttggctatacctgccggaacagtgatacgtatgttctttccgtttacattaagcacttgtttgtgtgtttcggcggcttcacgcaatgaaagttgtaattcagcattatagtcctgtccacggaatccggcgcttcgtccgccgtttgcaccgccacgatgcccgaacagttcttcaaagaaatcagagaaaccacctgcgctgccaccgaaatgtgcaccggtgaattcttctcctccattgccggaataccagtaactgccgttaccgtccgtaccgaatccgcttccggctccgccaaaccctccgaatccaccagcacctccatattgttgcttttgtttttcaaattcgtcggcatgtttccagtgttccccgtattcgtcgtatttcttacgtttttccgggtcactcagtacttcgttggcttcatttatctcctgaaacttatctttggctccaggatcattcggattcaagtcaggatggtatttgcgggccagcttacggaaagccttcttgatatcatcttgggtggcgcttttgtccactcccaatactttgtaatagtctatgtaagccatattatatatttgttaaatttcatctgctttaagagaaacaaaatacatgccaattggttgtgttctgtttttattttattatctttgcagcgaatttttagaaattattctaaaggaaatgaggggattggcaatcatattcaggttttttatgctattagtcctgctgcttcctgtggttgctctgtgtcctgtgaaggcggaaacgacctcggaagggcctatccttattgtcacttcttataatcccgaaacgcgtagtatttctgacaacctgtctgcttttatggatgaatacagacagcgtggcggcaagtatactccgatcatagagagtatgaactgcaagaatttgtccgaggcctatctgtggaaatcgcgtatggcctccatccttggtaagtataaggggaaaaaccgtccgtcactggttatattgttggggcaggaggcatggtcggcttatatctcacaagacacagagatagctaaaaagactccgtctatctgtggcatggtcagtgtcaacggactggtattgcccgatgatagtatcgacacgcgggtatgggaacctgaaagtaagaatatttatacggatttcagtgattataatattgttgccggttatgtatatgaatatgatgtcgataaaaacataaagctgatgcgtcgtttttatcctgatatgcgccgtgtggcatttatatcggataatacctatggcgggttgtctatgcaagccttggttaaaaaggagatgaagaagtaccccgatttagaaacaatttggctggacggccgtacagaaacctttatggaagtgagtgaaaggatgcgcaggttgcctcaaaatacgtgtgtgttattgggaacatggcgtgtagactgtacggagagttatgttattggtaatacgacttatatgctgcgcgatgcgaatcccaccctgcctgtgtttactattgcatctgtggggctgggacattgggcattgggaggatatactcccgagtaccatgcggtaggaaagaatataggcgcggttacttatgattttttggataaaggggatagagaaggggtggacttgttgactattcccggaaactatacttttgatataaagcgtttgcatgaattcaaattggattcattgaatcttcctcagggagcggtgttggtgaacaagactccttcgttttatgagcagtataaatattgggtcataggggttgtttcggcgttcatgttcctgatagcctgtttcttgatagccatatattatattatccgtatcaaccacttgaaacataatctggaagtatccggcgaggaactgctggtagccaaggagaaagcggaggaatccaacaggttgaagacggcttttctggccaatatgagtcacgaaatacgcactcccttgaatgccattgtgggattttccagcgtgttggtcagtgatgattcctctcctgccgagaaagagcagtattgtgatatcattcagaagaattccgatttgttgttgcacctcataaatgatattctggacatctcgcgcatggaatccggaaggataaaattcgtatgggaagaatgtgatgtggtagagttgtgtcagacggctttgtctacagtggagtatggacgcaagaccagtgctttgtttctgtttgaaactcctgtgccttcgctggttgtcaagacggatgcccagcgtctgaagcaggtgttgattaatttgctgtccaatgccgcaaaatttactccgtccggttctatcaaactgacggttgccatagacaaacagcatcagcagttggaattgtcagtgtcggataccggttgcggtattccgcccgataagagtgaaaaggtatttgaacgtttcgagaaattgaatgaatattcccaaggtacggggctgggattggccattagcaggctgataatcgagaatctgggaggtaagatatgggtggacaaggattataccgaaggcgcccggtttgtattcacgcatcctttgactaaaaaagaataaagaatagagaaatgaaatatagaatatgtatcagtgccctgctgttgtgggcaggtatgcagttgtctgcatccaataatcaggaagaagtggttatcaagattatagaaaccagtgatgtgcacgggaatttctttccgtataactttatcgaacggaaagaatggagtggaagtcttgcccgtgttcattcctttgtgaaagaacagcgtgagaaatatggggataattgcctgttgatggataatggggatatcctgcaaggtcagcctacagcttactattataattttatggataccgtgtctactcatgttgcggcggatatgatgaattatatgggatatgtggtaggtaatatgggtaaccatgatgtagagacggggcatgcggtgtacgaccgttggataagacagtgcgattttccggtactgggggctaatataatagacaatgccactggaaaaccttatctgaaaccctacgaggtgttggagcgcgacggagtgaggatagcggttctgggtatgattactccggccattccttcatggttgccggagaaattatggagtggtctgcattttgaggaaatggagccctgcgcacgcaaatgggtgaagattataaaggaaaaagagaatcctgatgtcattgtgggattgtttcatgccggaaagtcgggcaacgtgttgggacaggtggtggaagatgcctctatggatgtagccaaacgggttccgggctttgatgtggtgctgatggggcacgaccatactagggaatgtgtaaaggtgcagaatgtggcaggagacagtgtgctggtcattgacccggcaaacaatgccaatgtagtttcggatgtgaccctgaccgtaacaaagaaagacgggaaagtagtggagaagtcggtggaaggtagattggcggatatgaacaagtatcctgtcagccgggagtttatggataagtttgcccctcaatacaaggctgtaaatgactttgtatcccgtaaaatcggtacaatttcacgtaccatcacagcgaaggatgcttatttcggttcttctcctttcatagacctgattcatcagttgcaattggaaatttcgggtgctgaagtgtctttctgtgctccgttgtccttccgggcagagattaaagaaggagacatctatgtgagtgatatgttcaatttgtacaagtacgagaacatgctgtatgtgatggaactttcgggcaaggaaattaaagattttctggaaatggcatacgccatctggactaatcagatgaagagttccgaggaccacctgatgcttttcaaggagccggtagagaaggggaagcgtgctaatttcaagaatttcagctttaactttgactctgccgcaggcattaattatacggtggacgtgaccaagccggcaggagagaaaatcacgattcagagcatgtcggacgggactcctttcagtatggataaggtttataaagtggctttgaattcttaccgtgggaacggtggcggagatttactgactcttggagctggaatttccaaggaagatttggcaaaacgtattatttttgcaaccgataaggatttgcgttattatctgatgcaatatattgagcaggaaaaagtgctgcatcctcatgctatgcaccagtggaagtttattccggaggaatggactgtgcctgccgcgaaaaaagactatcaattgttgtttggcgaggaaaagaaataaatagttgagcaagagaaggtacatagtagccccgttattactgctggcgctgtttttaacgtatcaggtaagcatcactttgtttacccacgttcatattgtgaacggggtgatgattgtgcactctcatccttcgtccgaaaaacaccatacgcataccacaggacaggtaatcttaattgctcatctgagcactatccagactctggagcccggggggcagacagagatgactgtattccgtcctgtgttgtatgttttggaatacaagacaaatactttccgcgcgaaagcgctttgtgcgcaatgtatccatttgcgcgctcctcctttttattgctgaaacataaggtatatctgttgacgggatacattcggataatccgttcaacagatgcggatgtgcttttgccgtagagctgcacacattctttaattgaataaaccgaaacattttagtaatagaaaaaatagatgaaacaatatattctgttactcgtgctcatggtgatgggtgcgggtatccatgcgtatgcagaagatgtaaatcctgtgaaggaaggaaatgtgatttcaggtcatgtagtggaaaaaggcacggagaacagccttccgtatgctaccatattgattgtggaaaccgggcaaggtacggtgagtaacgaggacggggagttccgtttcaagaaggttccggcaggaaagtacacattgagagttcagctactgggctatgagacacaggaaaagaaagtgaccgtcagtaacgacttcacggtagatgttcattttttgatgagtgacgaaagtattatgacggacgaggtagtcgtatcggccaatcgcaatgaaacaagtcgcaaggtggctccggtggtagttaatgtgatgaatgccaagctgttcgaatcggtgaattctaccgatttggctaaatccttgaattaccagtcggggttgcgtgtggagaacaactgccagaactgcggcttccctcaagtgcgtatcaatgggctggaaggaccttattctcagattcttatcaatagccgtccggtagtcagtgctctgtccggtgtgtatggcttggagcagattccggtgaatatgatagagcgtgtagaggttgtccgcggaggagggtcggccttgtttggtgctaatgcagtgggcggaaccatcaatatcatcacgaaagatcccatcaacaattcatttcaggtttcttcaacaatgtccaatatgaacggcaaggtgtgggaacagtatatgggagccaacgcctctttggtgtcaaaagataatacgtatggcatcgctttgtatcagtcttatcggaaccgtaatccgtatgatgcggacggggacggtttctcggagttgggaaagctgaatatgaatacattcgggctgcgcacctattaccgtcctacgcagttcagccgtatcagtctggaatatcataccacgaatgagttccgccgcggagggaataaatttgatttgcagccgcacgaaacggatatcaccgaacagaccaagcacgtcatcaatagtggcggattgagttatgatctgttttggaaagaatacaagcataaactttctttctattcttccatccagcataccgaccgtaacagttattatggtgcgcaacaggatgcgaatgcatacggaaagacgaaagatctgacttgggtggcaggcggcatgtatgtgggtaattttgagaaagttttattctctcctgctacttttaccgccgggctggagtatcagaacaactccctgcacgatgttatgaccggttatcaccgtgatatgaaacaggatgtgcgcattgccagcgcttttgtgcagaacgaatggaaaatgaatcagtttgtattcctggtagggttccgtctggatgaccataacctgattgacaatcccatcttcagcccccgtctgaacctgctctataagcccagtgacaaactacaggcacgtattacctggtctaccggtttccgtgcgccgcaggcatacgatgaggatttgcacgttacggcagtaggaggtgagggcgtgcttatcaagttggcggaagggctgaagcctgagcattcgaacagtatcagcggttccattgattggacggcgaatattggtcatttccagaccaatttgttattggaagggttctataccggattggatgacgtgtttgtactggaggatatgggccatgaccaaaacggtaacaaggtgaaggagcgtcgtaacggtaacggggcacgtgtgtatggcgtgaatctggacggaaagattgcacatggacgtgatgcggctttacaggtgggcttcacggtgcagcgcagcgaatatgctgagctggaggcatggagtgagaatcctgaggtagcgccggtgaagcggatgccccgtactcctgactattacggttatttcacattgacatctgctccgttcaagaatttcgactgctccttgtccggtgtgtacacaggccggatgcatgtgccgcatttcgcaccgacagaattgcccgaggaatatataggacaatatatcgctaaagatgaaatggtgcatactcctgatttctttgatttgaatgtgaaactgaattatacgtttgtattgaatgaccatatcaagttgcaattgaacggtggagtgcagaatatctttaatgctttccaaaaggatttggacaaaggtggttatcgtgactcgggttatttctatgggcctacacagcctagaacgtattttgtggggatcaagattacgaattgaataatctgctgattggtcaatgtgctaatatgtcaatgggttacgctttgttccacatggcacattagcacattgtcacattgacaaattagcagattgatttattaccggctactgacaagtgactatacttttctgtaatccggaatcccggatcgggataattatataaggggaagcggtgttctgtttctccttccatatatttccacagactagcatattcttctttcttctcgcccatttcctgcaattgcaacatatactgccagatagacttgttttccttgatgtatattttttccatctgatgaataatcggactatgctggcgggttgggtcatggtcaaattccagtatccgttttccctcttttgtcataccgatagttacgaaagtcatgctcttgcctatacccggcaggttcagtacgctgcggtctgttgctacgaaaggaatctgatggaaggtgcagaaacgttgtacggctgccgcacggtctttactgtttctcaacaggttcaaaaactccttttcttgctctgcggaaagttttccccataccttttcctcttctttctcctgcaaggagcggctgttaggtgcaaatacggcataattctcctcaaatccttttaccgagaaggtgtaatagcatagtacacccagcccattcaatactttgcgcagcttggcggtgtgtccgcgacgggaagccgccacattatatactaactggttggtgatagtccacccggctgccagtatcttgcggatagcttcacgcgcttcgggtgttacttccagcggagtctggaaatgcgtttgaatcagaaattggctgactcctacggcagatgccttttctttgaactcgcgtaagatatccaatagctcgtcattgattcgcatgggcagatataccgggagccggctgcccaagcgtactcgttgcagttccgcatatttctctccttcggcgcgttgcaggtttgcgttccgtttgcggacagccattttgtagacggattccagtatattgcgcaaggtcttgttctggctcatcaatgcatcgcctcccgtaatcaggatatccctgagctgagtgtcgttctcgaaatattccatcagttttttcaacctcttgtcccagctctctttcggcttcaattcctcgaagttgaagttcagacgttcactttgaaagtcgtacatgcgctggcaggatgcacataggccgccgcaggcacgtcccatcgagtcggggataagaatggccacatcgggataacggcggtgaatgttgtgtccgtccggcagcagccatccggcagcgttgggctttccgtcctctactgcatcttctttttcccatgcgtggatgttaccgtaagtttctaccaattgggaagagtacaagatatagctgcgtatggcttcgtcatcatatccttttccggtaggattcaataatgacaaataataaggggtgatgaagacaggcattcctttcttgcgtgctttgtgataaagctgcaaggtttcttcggacaaggagttgcctagcatccggttcagttcggtagggctttttacggccattgccagatgaaaacgggcttcgttccaccattggcagaccagccggcgtttatcctcttccgtgcttccttcaggaaaaaggtagcggctggagggtgcgtgtctgttttctattttctggataagaagggagatgatacgttctttgttttgtcggcggatagcccggacatcctcattcagtccgctgggccagcgtttcatccactgttgcacttgtttttcatcaggtagctccttttcttcgtgataaagccggtcgaactggtgatacaggtcaatccataaatcaacggaaatctcttcattgatgatacgattcgttaaaaacttccaaagcagtgagatggtttctattttaatctcctgttctgtagaggcttcgtaaatggtttttccatcgttatctatcagtcttttaatttgccttgcggcagcaggattgtaaataggaccggataatagataatcgttcagcttgtttttgaaagctgtttcatcctggctttctgaagctaatgaagtgagttgggttaatcgggtttcgaatagtgttttaatgccatgggtggataacatcttattcttttgtttcataagcaaacggttgttaagaaagtgaatactataaataacatatttctcgtagaaaagttatcaaactgttaacttcatgctgctaagatagtaaaaaagcttcttttatgcaaattcattaacaaaaagacgctttttataaatagcattattttatagagtacatttgctttgtgctttcgtctttttttaaagcccggagcttttatcgggaaacgaagaaattcgtagttttgtagagctttgcttgtttgcaggtcaatcaagctgaagagaaacctcattttaataaatggaaaaacaacatagaagtaaataaatggaactgaaacaactttttacctttgcagcagcctgttcgctggcactttcggtatcggcgcaagatagagtacactatacaggcacggagctgtctaaccctacctgtcatgacgggcaattgtcacccgtggtaggggtacacaatattcaggtgatgcgtgccaaccgggaacatcctgcacccgataacggcaatggatggacatacaatcatcagtccatgttggcttattggaacggacaattctatatgcattatctttccgatccttcggacgagcatgttcctccttcacaaactttcctgatgacctcgaaagacggttatcactggacaaacccggtgacccttttccctatctaccgggttcccgatggctataccaagcccggacgcacagacaaggcgaaagatctggatgccatcatgcatcagcgtgtaggcttttatgtgtcaaagagcggccgactgatagccatgggaaactatggcgtggcgctggacaagaaagacgatccgaatgacgggaacggaataggccgtgtagttcgcgaaattaaaaaggacggttccttcggtcccatttatttcatttattataaccatgcgttcaatgaaaagaatacctcttatccttattttaaacggagtaaagacaaggagtttgtaaaagcctgtcaggagattctggataatccccgctaccgtatgcagtgggtggaggaagccgaccgcaatgacccgttgattcctttacacaaggaatacaaagcgtattgtgactataccttgcccgacggccgtttggtaagcctgtggaaacatgccctgacttccatcagcgaggatggcgggaacacatgggcgcaaccggtggaacgtgcgaaaggttttgtaaacagtaatgcgaagatttgggggcaacgcttgagtgacggtacatacgccacggtgtataatccttccgagtttcgctggccgctggctatctcgctcagtaaggacgggctggaatatacgaccttgaatctggtgcacggcgagattacaccgatgcgttacggaggtaattataaatcattcggtcctcagtatgtacggggtattcaggaaggtaacgggactcctcccgatggtgatttatgggtgacttacagtatgaataaagaggatatgtgggtgtctcatattcctgtgcctgtccgcgcacacgccagcgagcatgctgacgacgattttgccggctacaaagatttgagcgaactgaccgactggaatttgtattccttgcagtgggctcccgtatcactgaatggaaaatggctggtgctgcaagacaaggacttattcgattatgcccgtgtggagcgtaagatacctgctacaaaagaactgaaagtatctttcgaactgatggcggaacagaacgataaaggacttttgcagatagaatttctggatgaaaacggcattgcctgttcccgtctggaactgactcccgatggacttttccgtgccaaaggaggtgcgcggtttggtaatttgttgaagtatgaaccgggcaagacgtataaggtagaagtggagctttctgttgccaaccgcatggtaattgtctatgtggatggaaagaaagtggggcaacgtatgttctttgctcccgttccggccatcgagagagtgatgttccgcaccggagcgcaacggacttatcctacggtggatactccggcggactggtatggcattctgccgaatgcaggtgagcaagaacctttgtgcacctatcgtatagcccatttcaagacggcttctgctgataaggatgccggtgcagccttcttgaaatataaggatttcaagccctatgtggattatttcaacagcatggaggatgagaatatagcccaggctattcccaatgcccgtgcatctcaatggatggaagaaaacattcctcttttcgagtgctctcaaaagaactttgaggaaatgtattattatcgttggtggacgctgcgcaagcatatcaaggaaactccggtgggctatggcatgaccgaatttctggtaaaccgttcgtatgccgataaatacaatctgatagcttgtgccatcggtcatcatatttatgagagccgctggttgcgtaatccggaatacttgaatcagattatccatacttggtatcggggtaacgaaggaggcccgatggctaaaatgaccaagttcagctcgtggaatgcggatgcggtactgggacgttacatggtcgatggaaacaaggagttcttgttggatatggtaaaggatttggaagcggaatatgcccgttgggaaaagacaaaccgcctgcctaatggactttactggcagggagatgtgcaggatggtatggaagaatccatcagcggaggccgtcgtaagcaatatgcccgtcctactatcaacagttatatgtatggcaacgccaaagcactctctcttatcggcatcatgacaggagatgagggcatggccatgaaatatggattgaaagccgattccattaaaacattggtacaggataagttgtggaacacagaccaccatttctttgaaacgatgcgtggagatgcgttcgccgaggtacgcgaggctatcggctatatcccttggtatttcaatttgccggatgcttcttccaaatacactgtggcatggaaggaagtgatggacgagaaaggtttttccgcaccttacggacttaccactgccgagcgccgtcatcctgagttccgcacgcatggcgtaggtaagtgtgaatgggatggggctatctggccgtttgcatctgcacagactttgaccgcaatggccaatttcatgaataattatcctcagactgtattgacagacagcgtgtatttccatcacatggaacgctatgtggagtcgcagcatcatcgtggccgcccctacataggcgagtatctggatgaggtgaccggttattggttgaaaggagatcaggaacgcagccgttattacaatcattctacttttaatgatttgatgattaccggtttgataggacttcgtccgcgcatggataacacagtggaggtgaatccgttgattcccgaaggaaaatgggattatttctgtttggataatgtgttgtaccatggccgtaacctcactattttgtgggataaggacggcagccgttaccagcgtggaaaaggtctgcatatctatgtggatggaaaggaagtgggacactccgatacattgacccgtgtcctttgtgagaatgtgctataattttgaataaaggggatgtcttaagataataaacagactgttgaaagaaaaatgaattacagaaaaatcttaatagccgctttgttagttatgtctttcaccgtgcaggcgaaggacataactgttacccgtctgacgtgtgagatgcgcgaaggaagagtgaccacctctgatgcccctcgtttgggatggcagatgagttcgccggaaaatggcacgcggcagactgcttatgagatagagattcgggatgtatgggcaggaaaagtagtctggaacagcggtaaagtaaaatccgctcaaagccagttggtttcctgtgcggatgcggtcttggagaaggacaggcattatacttggcgtgtccgtgtctgggatgaggctgatacgccttcggcatggagtgccccctctgatttcagtatcctgacttccgaagcggctttcgccggcagtgaatggattggggctattacccgtaaggatgcccgcatccccgaaggtcggaaatatcatggcagtgaactgaaaaagcctgaggcaaaggccgcttgggctgctgtggatactttggcaaagaaaagtatttatctgcgccgtgagttccatgtggcaaagaaagtgaaagacgccacggcgtatgtatgtggcttgggcttttatgaattttcgctgaatggagaaaaagtgggagacagcgaatttgcccctctttggagcgactatgacaaaagtgtctattataatacttatgatgtcacctcgcaagtgaagaaaggcggtaacgccatcggagtcctgctgggaaatggattttacaatgtgcaaggcggccgctatcgtaaactgcaaatcagtttcggcgctcccacgcttcgttttcggatggtggtgaattatgaagacggaaccagtgaaacgattgtttccggaaaggactggaagtacgatttcagtcccgtactgttcaattgcatctatggcggagaagattatgacgcccgccgtgagcagaaaggctggaacatgttcggttttaaagagcaggattggcatcctgtcgtgattcaggaagcccccaaaggggtgcttcgtccgcagatagcgcaaccggtaaagatcatggagcgttatgatatccggaaagtgaccaagctcaccgctgaacagataacagccgcctgcaagtcaaccaaacggacggtggacccgtctgcctttgtgctggatatgggacagaacctggccgggttccccgaaattaccgtccgtggaaagaaagggcagaaaataaccttgcttgtatccgaatccctgacggacgagggagcttgcaatcagcgtcagaccggcagacaacattattatgaatatactttgaaaggggagggagtggaaacttggcatcctcgtttctcctactatggcttccggtatattcaggtggaaggtgctgtgctgaaagggcagaagaatcccttccgtcttccggtgatccagaagatacagtcgtgctttgtttataactcggctcctaaaatatccaccttcgaatgctccaaccgcatcttcaatgatgcccaccggctgatagagaaagcggtgcgaagcaacatgcagtctgtgtttacggattgtccgcaccgggagaaactgggctggctggaacaggatcatttatgcggtcccggtttgctgtacaattatgatttgacgggctttgttcctcagactcttcagaacatagccgatgcacagcatgccaacggcgcggttcctaccactgctccggaatatgtggtgttcgagggccccggtatggatgcttttgccgaatctcccgaatggggatgtacctttgtggtattacctttcatgtattatgagacgtatggggatgattcattgattagaaaatactataacggaatgcgccgttacattgattatatgactacccgtgccaatgatggaatcgtttctttcggactgggtgattggtatgattatggagatttccgggccggattttctcgtaatacacctgttcctttggtagctaccgcccattattatatggttgttcgctatctggtggaggcggcacgtatgctggataataggtatgatgtagcatattacactcatttgggtgaagaaattaataaagcattccatcgggagttttatcacaaggacactcgtcagtatggtacgggaagccagtgcagcaatgccttgcctttgttcctgggaatggttcccgctgatgacagacaggcggtgcttgataatctggtagcggatataaaacgtcacggcaaccggctgaccaccggtgatgtgggtaaccgttacctgttccagactttggcgcgtaacgggttgaatgagctgatgtacaccatgcacaaccatgaagaagcacccggctatggtttccagctgaaattcggagctaccacgctgaccgagcaatgggacccgcggcaaggttcttcgtggaatcactttatgatggggcagattgatgaatggttcttcaactcgctggcgggtatccgcaccgttgagggaaaaccgggaatgaaggaaatagaaatacgtccccgtccggtaggcgatttgacatacgtccgtgcctctacccaaaccttgtacggaaaagttgcggtagactggacccgcgagaatggagtctttacattgaaagtaacgatacctgtagggtgtacggcacgcgtattccttcccgatgaaaaagagccgaagatagtggaaagcggaacttattcttttaagaaataaacgcggttttcataggaaaagccccctgagggtatttggtaaaactaaaataaaataatgaacgatatgaataaacgtacctttttaagtctgttactatgtgtttgctgtctgtcttttctgcatgcagagcgtgtggatatgcagcaggcaggtgccgatgtgcaaggcaggaaactgaacacagcattgattaattccaccatcgaccgcctgaacgcccatggtggaggaaccctcttttttcccgcaggaacttatctcaccggttccatccacatgaaaagtaacatcactctggaactggaagcaggagccaccttgaaattctcggagaactttgacgacttcctcccttatgtggaagtgcgccatgagggaatcatgatgaaaagtttccaaccgctgatttatgccgtggatgcagagaacatcaccatcaagggtgaagggacactggacggacagggcaaagcatggtggacggaatttttccgcgtccttgtagacctccgggacaacggcaagagaaacatcaacaagtaccagcccatgttcgagaaggaaaacgacctgaaagccctttacgccgaaaccaacgaagactggcacggcacattggaccgtcgtttcttccgtccccctttcatacatcccatccgttgcaagaatgtacgggtagagggcgtgaagattatcaactctcccttttggaccgtaaatcctgagttttgcgataatgtgaccattaagggcattaccatccacaatgtgccttcccccaatacggacggcatcaaccctgagtcttgtaagaacgtacacatcagcgactgccacatttcggtaggcgacgactgcatcaccatcaaatccggacgtgacctgcaagcacgtaaactgggcgttccttgcgagaatatcacgattaccaattgtaccatgttgagcggacacggtggtgtggttatcggcagcgagatgagtgggggagtgaagaaagtaaccatcagcaattgtatctttgacggaaccgaccgggggattcgtctgaaatccacccgtggtcgcggaggcattgtagaagatatccgggtaagcaatattgtgatgcgtaatatcaagaaagaggctatcgtcctcaatctgaaatatagcaagatgcctgccgaaccgaagagtgaccgtactccggaatttcgtaatatctatgtgtcgggtgtgacggtccgtgatgtgaatacccccattatggtggtaggcctgcccgaagcacctattaccggtattgtgatgcgtgatgtgtatattcagaatgccaagcaacgctgtgtttttgaagactgcaaggacttggtgctggatgatgtgtatgtggatggtaaagaaataaaatagacttcctgatgaagaaacaactattatggtgcatggcggcactctctttttccgctgcatctgcacaaacttatgaaacccggttcgcacgtccgttatccgatgtgttgaatgacgttgccgcccgtttccaggtccgcttgaaatatgacgtggatacggtggggcgtgtgcttccgtatgccgatttccgtatccggccttattcattggaggaaacgctgaccaatgtgctttcccccttcgattataaattcgtaaagcaaagtgacaaggtgtacaagttgaaaccttacgaatacgcccgccgcacggatgccgacggagaaaaaatgctggcataccttagtggtttatatagtgataaaagtcaatgggaacagcgcagggagattctccgcaaagaggtgcgccaacgtctgggactggatgatatgctggggaaaacagtgaaggatgcaaagcctgttctttccaaaatacgcaaatttgatggctataccgtgcagaactttgcattggaaaccttgccggggctttatgtctgcggttcagtctatgccccccgcaccaaaggcaaacatgcactgattatctgccccaatggtcattttggacagggacgctaccgcaaagaccagcagcagcgcatggcgactctggcacgtatgggggctgtctgtgtggattatgacctgtatggttggggtgaatccgccttgcaggtaggaggaaaggcgcaccatactgccgatgcgcacaccattcaggctatgaacggaatatggatactggactatatgctggcaaaccgtaaagatatagatcctgcatgcatcggcgtgaacggtggttccggcggaggaacgcagacggtgttgcttaccgtcctggacgaccgttttacagctgccgcccctgtggtcagtctggcctctcattttgatggcggttgcccgtgtgaaagtggcaagcccatccagttggcaggtggaggaacttgcaatgcggagctggccgccctgtttgccccgcgtcccatgctggtggtttccgacggaggagactggacagccacggtcccccgtttggaatatccttacttgcaacgcatctacggtttttacggtgcgacggacaaggtgagcaatgtacatttgccgcaagaacgccatgatttcggtccgaacaagcgcaatgcggtttatgatttctttatagacgtgttcggccttgaccggaacatgctggatgaaagtaaagtaaccattgaaccggaagacgcattgaagagctttggtgagaaaggtgaaaaactgcctgccggagccttgagatataaagaatgattttgtcgtttatttattaggttaagagttagtgtagaatctccctcttgcatagcctgtgaaggtgagcaagggggagatttttttagatatgggggattaatactttttgtcgggtatatcaggccttgtcatgcggactgttaagtctttttgtgcggactgttactatagtcttcggcagtggaccgtacagtctgctacagtggactgtacggtctgccgcagtgaaacatacggactgctgtcgcagtctgtaaaaggtgaccgtaagaaatgctttaatggtactgaaaaaaagacttaatggggctgaagtgatgaattaacttcgcatttatgttataatcagttttagtttcccatccttgtggcgctttcggtcgttttcttgtttatagttgcggattcaaaccggtttctacgttggatttcggctgggtataatggaaaaagcggagattataacaagataatgcgtttctgtaatatggcagcaatctgttgtctcagttgcggggcgctgatgggcttggccatatagccgtcgaagccgttttccatggcccgttgttcatcactggcataggcgaaagcggtaacagcgatgataggcacatccaaggatagttttcgtatttcccgggtggcctcatagccatccatcaccggcatattgatatccatcagaattatctgaggggtatggagcttatacaaattgaccgcctcttttccatcccaggcatgtaccaggttatattctcgtttcaagatagattggaacagccggtaattgctctcattgtcttcggcgatcagaatggtcagcttgtctttttgcacggaaatgagttgatgctcttcctctttcttgttctctgcagcggcaggctggtatggaatggtgaaccagaaagtggatccttttccttcctcggactcaacaccgatgcgtcctcccatgtgctctacaattgtctggcaaatggatagccccagtcctgtaccctgtacaaaagagttcagtttgacgaaacgtccgaatatggagttcactttgtcggctggaatgccgcaaccggtatctttaacatagaaataaagttctttgtcgcatagtttgtagccgaaggtgatgcttccttgtgaggtaaatttgctggcgttgttcagtaaattgttcagtacctgcatcagacggttcttttccgttcttatgaggcaggagggaagtcctttctgtacaatcagttgaatgccgttgctctctgtccgataacgggtaacactttctatctcggagataatatcattcagttccacgttggaataacagaattccagtgtgccggcctctattttcgataagtccagtatgtcgctgattaattgcagcagcaacgtattgttactttcaatgatattgatatattcctgcttttcctgttcctcttctgcagcagcaaggatgtttgagaaaccgatgatagcatttagcggagtgcgtatttcgtggctcatattggcaagaaaagcggacttcagccggttggattcttccgcgcggtccttggctgaaagcagttcgtcttccattttcttccgttcagttatgactagggaagatcctaccaaagtgagcggcattccgttttcgtctttgctttccacagctgcctgcgcctctatccagtctattttccattgtgttccgtcattggccagcacgcggtattcctcttttactttctctattttcccgtctgccaggtcacggtaggcctgtatcacgcgcgggcggtcttctttaatgattttagcgaagtattgctcatccgaaacgctcaactgatcttcgctgatgcttcccggcatggccgccatggcaatggggcggttgagatcgcataaaatggtatggtctttcaaattccatttccaaggtacgatgttggctacttccagtgccatggaaagtttatggttcgtggcgctcagcatttgctgcgcattgtgcagttcggtgctgtccatacagaacacatccactgtgtccggttcggtagagcaattcaggacaacatcatagaaggtgttgacggtcttaaaataatatgggaaggtgatcgatttcttttcttttaaggtgatactcatgaaatgggtgaattccggcaaggactccgggaaaatttcagaggctcttttccctattatatcggatttgggcaagaaacatcgttcgaaataacggttgacatcccgatagatgctgtctataatatttccttctttatcccatattacctgttccttcatgtaaaggataggcatattgtctatcagattggtatattgtgtgttcgtgtctatttcattttgctgggcgcgtctcagcgctttcagcatttgaatgcgtttttgctgtgtcacggccatcagtataaaagcaatgagtacacttaggatgatccatttatatttgttcagaaagttggccggtttgtcatagaagacggtgtcaccagggcataggtcgggatcgagtcctttatttaccagtcttgtgtagttgaatgcggggtgtgcttcgttgggttcataaaaaggtatgtcgctggctttcttcccatgtagtatctcgtctatcgttttcagtaattgcctggtaaagatttggtcattatacatgtatcctcctaccatgccgccgtcatccatacctgcatagcggatggtgaacaaaggggcggagatgctggcgatacttctgtaggcattaatcagaaaattgcttgaagtgaacgattcggtgaaccaggtggataccagaatgcctgtggtcttgtctgttttacgcacggcgttatatagctgatgcagactgttggtacgcgaggagatgtattcgtaatccatttgcgggtatttgtctttaatcagctctcgcagttgcttgtcatattccggattggggtagatgccgtctcccaggaaaatcagtttcttcataccgggaatcatcctgcacatcagttgcacgttttcttccagatagatgggggtgtgcatgtaggtgaaattgaactcttctgccaattcgcttatgtgtgtcttttcttcgggggtgactgtatctctctgcctgtagaatttctcatggtacacataggggtcggctccgcatacaatggcaggtactttaccccataaagattgaatctcttctctaaaaatcaggctcatgctcccaatgaataccagcaggcggggaggggtggaaccatatttcgaggaaagaatttctgggaatctctcgattttagtggagtcgcctaccataaaaagattcagatgctctatgtaagcgtccatgttctctattctggctattttatgaacgatgggggtggtgatgctgttgctccagggagaggattcgttgtagctgttcagaatcagaatatagttccccgcctcggtgttttcctgtacatgggaggctttgccgatggttgcaaagagggtgaatatacaggtacatatcagtaaccgttgtatatgggctacacacgttcttttaagatttctgttcattattgatgtcctactcttcttttattatatagctacgatgcttgtgatgcaacaaatgtactattaaattaatgagtggacgaagaaatggaaatgtttaacaaatattaaaagagacaggaacgttttcgtataggcagatgggagatgattggatgggaattcctgccggccgatatggcagtggggcgcgaatgctgataaagggagtgggaggggaagtcattcttttgttctatttcttttttatataaaggaatagtcttatatttatcccgtcatcttatttttgaaaaagtaggggaacatcacttaatcagaagtagttatggaatatcacttacgtactaaattgaatggaaatatagcaatgacttcctgtttccatgaaaactcctttttgcagcgtgacaggagtctttataaatttatatgggtgcggcatggagcgttggatgtggaagtggatcatgtggtgatgcatctggaaaaagaggaaatgatttcgcttactcctttgcatcatgtgcagataaggggagtggacggtgaatacctcacttttttattcaatagtaacttttattgtatttacgggcatgacagcgaggtgtcttgtaacggattcctgtttaacggttcttcccgtgtcatgcgtttgaagctttcgccttcccagtcggcccgtcttgacagtattgtcgatattttcaggggggagtgtggaatacaagacaacttgcaggaagaaatgttgcgtattattctgaaacgtttcattatcacttgtacccgcatagcccgtgaaaagtttgatgtggacccgggacgtgagaacatgtttgatgtgattcgtcagttttatgtactggttgacagtcattttaaggagaagaagcaagtacaggattatgctgatatgttgtgccgttctcccaaaactatttctaatctcttttccctttacggactttcttctcctttgcgtgtcattcatgaacgcgtggatgcggaagccaagcgcttgttgctttatacgggtaagagtgcgaaagaaatcagtgagattctgggatttgaggatttggctacgttcagccgtttctttaagaaaatgaacaaggagagcctttcggaataccggaaaagagagaagcgggaataattgccaacctatatggggaaattgccatttaccggagggggaaaaccaccgacctttgcaccaggaagttaaatcttttaataatgaaagcaatgatggcaaaattaaaatctctgtttgttgcgtttttaacaatagcagcatctgcccaaaaactgggtatcaatcttatccgtgtggcaatccttgtaatttttgtatggattggtggtctgaaattctggaactatgaagccgaaggaattgtgccttttgtggcgaacagtccctttatgagtttcttttataccaaggacgctcctgaatataaagaatataagctgaaagaaggcgaactcgatgaaacgaagcacctgtggcatgaagagaacaatacttatgggttctctcatggattgggtattttgattatggggatcggtatcttgacgtttttaggcatcttctctccgaaaaccggtttggtgggggccggactggctattgtcatgacattgggcactttgtctttccttgtaacaacgcccgaggtgtgggtccccgatttgggaagtggcgaacagggattccctctgctgacgggcgccggtcgtctggtcattaaggatattgctattctggcaggagctgttgtcgttctttcggatagtgcgggaagggtattgaaccagttgaaaaagtaaagttggaaagaccggtcacggacatgcccttttatagggggtgtataatggatgtattccggcgagaagcaagtatttcctgcaagacataactatctatgaggcaagttgcatcctgtgtcatcttgctgtctgtcagctattgataatgaatgcaaatttggcagattctgcggttaacccctgttaagtgcttatctgtctgtgttaaaagaggaaaaaaaactcagacaaacggtacaaccgtacaatatttgtcattacattagcgtcataaatgttaaaccaaacttgaaattaacaaattaatagatattaagttatgaaacaagcaactaaaatggtactaggcgcagcagcaattgtagcagtcagcgcaggtgtagcaggagtaacggcttattctatgttgaaacccgagccaaacaaaagcgtggcttttaatgatgtgttccaacaaaatccgaatacaagactcgccgcgttggatgccactcaaatgcaaccggtggatttgactcaggcagcggaaaattcagtgcatgcagtagttcatataaagtcaactcaagaatcaaagactcagacggttaccgttcgtgatccgttctatgatttctttggtgatatttttggaaatggcagaggcggcggtcagcagcgtcaggtgcagactcctgaaagagtgggattcggttccggagtgatcatctcgaaagatggatatattgtaacgaataaccatgtaatcgataatgctgatgtgatcagtgtcaaactgaatgacggacgtgaatacaagggacgtgtaatcggcacagaccccagcacggatttagcgttggttaaaattgaagcggatgagcttcctacgattcccgtgggcaattcggaggctttgaaagtaggtgagtgggtattggctgtgggtaatccctttaatatgacttctacggtaacagccggtattgtgagtgccaaagcccgttctttaggggtatataataatggtgtggaatctttcatccagacagatgctgcgatcaaccaaggcaacagtggtggtgcattggtgaatgcaaggggtgaactggtaggtatcaattccgtactttattcacctacaggagcttattcgggttatgggtttgctattccaaccagtatcatgacgaaagttatagccgacttgaaagaatatggaactgttcagcgtgcggtattgggcatcaagggtactccgattaatgatgaccagcagatgatgccggaagaaatcaagaagaaggtgaaggaactgggcgccaccgacggtgtgttgattgctgagataattgagggaggttctgcggccggcaacttggaagtagatgatgtcattatcggtattgacggaaaacgtgtgaagaactttgcagagttgcaggaggggttggctaaacaccgtccgggtgataaagtaaccgtcaaggtgttgcgtgacaagaaagaaaaggatatcgagatgaccttgaagaatgcacagggaacaacgaaagtggtgaagagtgcgggcatggatatcttgggcgcagcattccgtgaagttcctcaggaattgaagagacaattgaatttgggatatggtgtggaagtcacaggtgtgacagacggtaagatgaaggctgccggtatccgtaaaggcttcatcatcctgaaggcaaacggacaacctgtcaaatcagtaaatgatttggaagatgtgctgaaagctgctacccagtcaccggatcaggtattgttcctgagtggtatgttcccatcaggtaaacgtgcgaactatgcagtggatttgacacaggaataagaagatttttaaggtagaaagtttcaataggtaaagtttagaggatgcacggtaagggttacttccgtgcatcctgattttatagtcaaacaggactgataaccttattttcgcaaaatatttaggaaaagaaggacaaagatagtcttttttgatttattagctaatatttttcaaacaaaaatggatgtattccatttaatgttgtaaatttgcatcccaaatttgttttatagagaatgagacaattaaagattaccaaaagtatcactaaccgagagagcgcatctctggataagtatttacaggaaataggccgtgaagacctgattactgtagaggaagaggtagagctcgctcagcgtatccgtaaaggcgaccgggtagcattggaaaaactgacacgtgccaacttgcgtttcgtcgtgtctgtagccaagcagtatcaaaatcaggggttaagtcttcctgacttgattaatgaaggcaacctgggattgattaaagcagccgaaaagttcgatgagacccgaggcttcaagtttatcagttacgccgtatggtggattcgtcagtctattctccaggcattggcagaacagtcacgtattgtccgtttgccgttgaatcaggtaggctcgttgaacaagatcagcaaagccttctctaaattcgaacaggaaaacgaacgtcgtccttctccggaagaactggccgatgaactggaaatacctgtagacaaaatctcggacacgttgaaggtttcaggacgccacatttctgtagacgctccttttgtggaaggagaagacaacagcttgctggatgtgcttgtgaacgacgactcgcctatggcagaccgttccttggttaatgagtcacttgcgagggaaattgatagagcactctctacgctgaccgaaagggagaaggatattatccagatgtttttcggtattaatacgcaggaaatgacgttggaagaaatcggcgataaattcggcctcactcgtgagcgcgtacgccagattaaagagaaagccattagaagattgagacaaaattcgcgtagcaagctgcttaagtcttatttagggtaagaaagattcggtttccgaaaagaaaacaaagcacaagatggaaggttgtttccgtcttgtgcttttgttcataatataccaataatgtctatcggttgcgctatgtgccgcatggtaatgggcacatcagcaaattattatagttaattaatctattactttttcgtatttgtccgtaaataactacttttgtcctctaataaaattataaaattagaattatgaaatccataaagattctgtgctctttattattggtactgatggtatgctcggcattctcattgaaaggaagtaaatctgtttatatagtaggcgtatccgcatcgtttacagattcattggtttatttcacggaaatccagttgctggacagtgtgaggctggataagaataagatgttgccggaacgctcacaatacagttatcagctgaaaaattatctggaaaacgaggaagggctgacgaaccgtacttgctttgtttatttctcgaacagcagaaagaaactgcagaagaccatcaacaagatgaagaccaagtatcaaaaaggaaagaccttgctgattcgcgaagtgaaccccaatgcgttcaagttcaagaaaccggaagagtaatccttttcttatgaaaaagattctatttctattcttggcagcctgctttttcttctcttgtgagaaggaaacaatcgtgattcctcagcaacatgccggaagaacggttctggcattcttttgggcggataacagtttgaatttcagtttgcgtgataatattcagacgatgatgcaaggacttcaggctatgaaggattcggctgctttattggtatattgggatggtgaggcttcggatatcagttggccggagccttgtatcgttgaatatgtaaccaatggtcaggggggtatcaacagcctgtctaaaggaacgatagatgcaatgatggctgataagaatacatctatctatgatttgattggtattggtaacatcagaaaaaaatatccccctcagacatcgacggagaaaaccgtcatgcagacagtgataggtgatatgatgagtgtttacccgtcggaaagttatggaataatctttggatctcacggttcgggatggttgcccactattgccggtacccgttctataggacaagatggcgggtggcattccagtgacacagcgttgataccggaattggcggaagtgctgcgtacggtaaatcctcaaaagtttgattttgtcttgtttgatgcgtgtatgatggggtgtgccgaggtgtattatgagctgaaggatgctgccagatattgtatcgcttctgtacttgatataccggcagccggatttccttatgcaagtgtgatgccttatttgtatgaaaatgcgatcaaggattatttggggccaatctgtaaagattatatagattattataactataatggttggggaaccatttcggcagtggattgcaatcagatggaaggcttggcggaagcggtcagaagtgtgattttgtccaatcaggatagtttgaagaacgtggatacagctgatttgcagcaatatggcaaaggcagcagcaacttcaaaggatatgcctatgatatgttacagtttattgaaaaattgtgtggaggaatggctccggacgattttacgcaacaattaaagaagacggtcgtttatacaggttatactcatgatcccgcctcatccttgtacagaatagatggggataactacagtggaatgggtatgtatatccccaattcattcaccactcccaaatatttgctttggaacaattatttcaagtcttccatagcgtggtatcatgcatccggatgggctgaaacggaatctatttgggggaattgaaggagaatgcagccagttgccttttacttgatcccgaataatagatatagcggatggaagtaccgaatttccggtattcctccatttccaccgagttgtctactgcatcctgcagggcttgtttaaaggcggcataatgggtgttcatataagtggcgttgtccagttctcctgtaacactgtagaaatagctcacactattatctttctcattataacaggtgctgtccagtgtaatcgtttcgttcatgcgtgtggggcaggaccggttggtcttttcggctgtctgtttgaatttacggacttgtgaacggtggttattattacatcctgccaaagtaaggatgcccagggccgctattataactgtttctcttttcattataaatcggtattttgaagcgaaagtaaactataagtttgaacaaagcaaatggatttttgttttttattagtaagtttgtgcaaacaaaaaaagtaaaacatgtctcgcattatagatgaattaaaacgtacggaccacaagcgttatctgggtggtcttgatttctttaaatatattggtcccggattactggttactgtgggttttattgatccgggaaactgggcctcgaattttgcggccggttccgaatttggttacgcgttgttgtgggtggtgaccttgtctaccattatgttgattgtgttgcagcacaatgtggctcacctgggcattgtgacgggattgtgcctgagtgaagcagccacgcagtattgtcccaagtggatatcccgtcccattttgggcagcgcggtgctggcctccatatccacttcgctggcggagatactgggaggagccattgccttgcagatgcttttggaaattcccattacctggggatctgtccttactacgatgtttgtcgtcattatgcttttttccaattcatataaaaagatagaaagagccatcattgcttttgtatccgtaatcggcctttcgtttctgtatgagttgtttttggtagatattgactggcctgtggcagtccgttcctgggtggttcccgagataccccagggcagtatgctgattatcatgagcgtacttggggcagtggttatgccgcataaccttttcttgcattcagaggtgatacagagccacgagtacaacaagcaggacgagagctccattcgtaaagtattgaaatatgaattctatgatactttgttctccatgattgtaggatgggccatcaatagtgccatgatcttactggcagccgctactttcttccgtacccggactccggtggaagagttgcagcaggcgaagtcgttgcttgacccgttgctgggcagccatgccggaatcatctttgctttggcattgctgatggcggggatttcctccaccataaccagtggtatggcggcaggttctatctttgcaggtattttcggtgagtcttatcatatcaaggatatccactctaaggtcggtattttgatttctttggggatagcattggttcttatcttctttattgagaatcccttttacggacttatcatttctcagatgattctgagtatccagctgcctttcacggtgttcctgcaagtaggactgacctcttccaaacgggtgatgggcaaatatgccaactcccggtggagttcattcgtgctttataccattgcggtgattgtctccgcattgaatatcatgctgttgctcagttgaataatgtgcgaatttgcccatgtgccaattgccatgcgggaccatagcgcagcacgtgggcacatgggcaaattttttatttcgttttgctttccgagataatcagcagcttgtcaccggcgtgcagttgcagagagccattgggaatcatgaactcgtttcctctttttatcagcatcaccagcatacctttaggcaggttcatatccattagtctgtttccttttgccagcatttcttccgtcagtacgatatcgcggaggtctgtattgatttcctccggtatctctactccgaaatcatttcctgttttttccagtggggtatccagatggagtaatttggccatccatgaaatggtcgttccctgaaccactaaagacaatatggtaatgaagaatacgatattgaaaatctgagtagatcccggcacatcagctactaccggataagtggcgaatatgataggtactgctccgcgcaatcccacccaggaaataaacagccgtgagttgatgttcatctttttaaagggaaggaggcagagcaggacactgagcgggcgggcgaggacaatcatgaaaatgccgatcaaggttgccggtatggcgatggacaacatttcatggggattcaccagcaatcccaggctcaggaacatgataatttggaagagccaggtcatgccgctcataaaagtagcgatctccttacggtttacaatgcgtgcgttacccaccatcattcctgctatatagacagccagatagccgtttcctttacacaggtcggtcatggtgaatgtgaagaaaataaagctcagcagcaagataggatagagtgactggttcttcaagtcaatcttgttgatgattgctaccgccagttttcccagcaggaatcctgatgtgccacccacagcaaactgaatcaggaatgaaatcagaatatcgtctgcccccatgcctgccgacgtgatgaactgtatcaggacgatagtaagcatatacgccatagggtcattacttccgctttccagttccagcatcggtcggaggttatgtttcagattcatgctttgcgagcgcaggatgttgaacacggaagcagagtccgtagaggacatggtagccgccagcagcatggccgtcatcagggacatggtaatgctgacattcgagaatccggaaatccaataaataaagaatccggtgaaaatagtagtaagcaacacaccgaaggtggaaagcagtatgccttgtggcaatacaggcttgatatccgagtatttggtatccataccccctgagaacagaatgatgctaagggccatcatgccgatgaactgggcttcgcccgcatcatggaactggagtcccagaccatcgcttccgaacagcatgccgaccaataaaaaaacaagtaacgtagggattccgaaccggtatccggtcttactcactacaatacttacgaacaataggatggaacctatcaagagaatgttttctgcattaaatatcatacttctgtgatcttgtttaattttttaatatgatgtgccagcatcaggcaggctgtgataaacgctaacagatcggatacaggcatactgagccagatgccgttcagtccccaccaatgaggtagtaacagcaggcagggtaataaatacaacagttggcgggacaaggagaggaagatagaaattttcgctttcccgatagattggaagaaactggaaattacaatttgtattcccacgaaaggaaacatcagtactccgatttgtaacccggtgcgtgccaatgctgtaagttctttatcgtctgtaaacatattaacaaccaaattagggaaaagttcgctgaaagcaaatcccaacgaagtgatgcacccccctgcaatcatgcaatatttcaaagtctgcttcacccggccgaatttgtgtgcgccatgattatagcccacaatcggttgcattcccatagtcagccccatgataaccattacaaacagcatcagcagacggtttaatatgccgtatgcgccgatagccagatcgcccccgtagagcagcaggctcttgttgaatataatgacaatggccgaagcgcagacattcatcaggaacggcgacatacctatactgaagatattctctacgatccgtttccttaatttgaatatccctttcttgaagcggatataacttttttcctgcatgaaatggctcagcacccatatcatgccggcaaactgtgaaaggatggttgccgtggctgctccgcggattccccaaccgagccagaaaataaagacaggagccagaataatgttgcatcccactgtcagcatggaggacagcatcgcctttcggggataaccggtggcacgcatgatattattcagtccgatcattacataggtgacaggacttcctattaatataatctgcataaagtcgcgggcgtatggcaacgtgtcatggcttgccccgaagaagaacagaatccggtccagaaacagcagggtgatgcctccgtagaaaatagaatttatcacacagagcaccgttacgtttcccagcaccttctcggcaccgtccgtatccttctgccccaggcggatagaagaaatggtagcgccacccaccccgaccagtgtacagaatgccaccagcagattcatcagcggaaaagaaatagccaaacccgatatggccatggcgccgacaccatggccgataaatacactatcaataatattgtacagtgatgtcagtgtcatccctatgatggcagggatagagtactctaaaagcagctttccgaccttttctgtacccagtatgtgcgggttgttttctttcattcgcgtttttgttatttttaagctttgcaaagttaggaatatggaggattattcggacctttgtggcgttaaatcaaactaaaagtaatatgaattcaacaaaaagcatagcagctttattcgattttgacggagtggtaatggatactgagactcagtatagtatattctggaatgaacaaggacggaaataccatccggagcttcccgaattcggccggttgataaaaggacagaccttgacacagatttatgccaactattttgccggaatggaagaggtgcagcatgaaattacagaagatttgaacaaatttgaaaaaaatatgttatataattatatcccgggcgtagaggctttcctgaaagaattgagggaaaacggggtaaagatagctatagtcacaagttcaaatgagatgaagatgagcaacgtatataaagcacatccggaattgaagcaaagtgtggaccgtatcctcactgctgaaatgtttactcattccaagcctgaccccgaatgctttctgttaggtgcgacagtttttgacaccgtgccggagaactgtgtggttttcgaggactcgtttcatggacttgaggcggggaaccgtgccggaatgactgtgataggactggctaccaccaattctgaagagcaaatacgcgacaaggcaaatgctgttattcaggactttaatggattcagtttcgaaaaaatgaagaatatgatgaggtaatgtcaactaaaacatctacctttgcagccgttttttataaattaaagtaaatatggcaggatatatttcaggtgatacacgcaaagtaactacccaccgtttggtggaaatgaagcagagaggcgagaaaatttctatgcttacctcctatgattacacgacagcgcagattgtagatggcgcaggcatcgatgttatattggtaggcgactccgcttcgaatgtcatggcaggaaatgtgaccacacttcctatcacccttgatcagatgatttatcatggaaagtctgtggtccgtggggtgaaacgcgcgcttgttgtggtggatctgccttttggcacttaccagacttccgaatacgaagcggtgaccaatgcgatcaaagtaatgaagattacgcacgccgatgctttgaaactggaagggggcgtggagatcattgatgcggtaaagaaaatcattgctgccggcattcccatcatgggacatttggggttaatgccgcaatctatcaataaatatggaacctatactgtacgcgccaaggacgaggaagaggccgagaagttgttgagcgatgcacatctgctggaagagacagggtgttttgcgctggtacttgagaaaatccctgcgtcactggcagagcgtgtggccagggaactgactattcccgttatcggtatcggagccggtggcgcggtagacgggcaggtgctggtagtatcggacatgctggggatgaccaacggtttcagtcctcgtttcctccgtcgttatgccgatctgcatacagttatgacgggagccatacagcagtatgtggatgatgtgaaaaaaggggatttccctaacgaagacgaacaatattaaaagtttttgctgatatgtatgatgacttcttctttccgtatgaaaaggcaaaactgtggactgggaatatgtttttgttatccctttccaattttttgctttatgcatcactatacatgatgcttcctgtgctgcctttatggatggtgcggcactggtattgcagttatgcggaagcaggagcagccattgctgttttcgggctggccatgttccttccgggaacattcaacagctaccttattgatacgttcaaacgtaaaagtgtgtgctttatagcgatattcctgtttgtggcatccagtctgctatatccgtacgttgcgaccgtaggatttgtagctttggtcagggctgtccagggagggctgttcagcgtcattaccatgactacgggcagtacattggtgattgatgtcactgcttcccgccgccgcacggacgccaatatcgcttttgcctgggcgggtcgttttggaatggtggtgggtcttgccttggggatctatatttatccttattggaattttcaccatatcatttataccagtatggctctgggagcgttggcgctggtgctgattccggcggtgaaagttcctttccgtgctccgctcagcacttcatggttctcgttggaccgttttttgctgccgcgcactttgtggccggggatgaatatgatgatggtggccattatctttgggatattggtggcacatatttacaatgaattgttttttgtttgtatcctgataggctttgtcctgtctttgctgcttttgcgttacgtgctttctcatgcttccggtcgttcggaggtagagctggggcaggcggcaatgataggaggattgttattgctcgctttttccaatagcttgatgaacagttatatagctggtattttgttggggatgggaaccggaaccactgtgtcacgtttctttataaaaatgatcagcctgccgaggcattgcgagcggggaacgggaaacaatacctatcagctgatgtgggaggcaggagtactgattggtttcctgtttgagaatatgtggactgagggtcatcccgataccatttattggatatgtatcggtatctgtgtcgttctgctgctgatgtatgagttcttcacacatccgtggtattacagaaagatggaggaaaaacagtgaaatatggcaacttacataaattaataatataaagaatatggcagacgacaaaaagattatcttttcgatggtgggcgtaagcaaagccttccaggcgaacaaacaggtattgaaggacatctacctatcctttttttacggtgctaagatcggtatcatcggtctgaacggttcgggtaaatcaacactgatgaaaatcattgccggactggagaaaagttatcagggagaagtggtgttctcgccgggctactctgtaggctatctggcacaggaaccgcatctggatgatgaaaagacagtgaaagaggtggtgatggaaggagtgcagagcatcgtggacacactggcggaatacgaagaaataaacaataagttcgggcttcccgaatactatgaggattctgaaaagatggatgcgctctttgcccgtcaggcagagttgcaggacatcattgacgctacggacgcatggaatctggacagcaagctggaacgcgccatggatgcgttgcgctgtccgcccgaagaccagccggtgaagaacctctcgggaggcgagcgtcgccgtgtggcattgtgccgtctgctgttgcagaagccggatattctgttactggacgagcctaccaaccatttggatgcggaaagtatcgactggctggaacagcatttgcagcaatatgaaggtacggtgattgccgtaacccacgaccgttacttcctggaccatgtagccggatggattctggaactggaccgtggcgaaggaattccctggaaaggaaattactccagctggctggaacagaagaccaaacgcatggagatggaagagaaagtggcaagcaaacgccgcaagaccttggaacgcgagctggattgggtgcgcatggctcccaaagcccgtcaggcaaaaggaaaggcccgtctgaactcttacgacaaattgttgaatgaggatgtgaaagaaaaggaagagaaactggaaatcttcatcccgaacggtccccgtttgggaaacaaggtgatcgaggccaaaggagtggcgaaagcttatggtgacaagctgttgttcgataacctgaatttcatgctgccccctaacggcattgtcggtgtaatcggtcctaacggtgccggaaagactaccttgttccgcttgattatgggactggaaaccgtagacaaaggtactttcgaggtaggggagaccgtgaaactggcatacgtggaccagcaacataaagatatcgaccctgccaagtccgtttatcaggtgatcagcggtggaaacgaactgatccgtctggaaaacagggatatcaacgcgcgtgcctacctcagccgtttcaatttttcgggagccgatcaggagaaactttgtggaatgctttcgggtggtgagcgcaaccgcctgcatctggctatggcactgaaggaagaaggcaacgtgctgctgctggacgagcctaccaatgatattgacgtgaacacgctgcgcgcgttggaagaaggtctggacgattttgcgggctgtgcggtggtgatcagccacgaccgttggttcttggaccgtatctgtacccatatcctggctttcgaaggaaacagtgaggtctttttctttgaaggatcctattcggaatacgaagagaacaagatgaagcgtttgggtaatgaggagccgaaacgggtgcgctaccgcaagctgatggaagactgatgacgccctgtctataaaatcttacccaagtgtacgaacagtaacgtattcttgggtaagtttgcatatacacacaacggttcgtcagaaatgtatggcaacttcctcagtataaagacgtttttgaggttaagagcctttttattatacacctatcttattatgcg

SEQ ID NO: 3887 - DNA, 92846 bp, Unknown
  gut microbiota DNA sequence
aaaactgcgtgaatcgactacgaatttcagtttgtcgttattcatggttcagatgttttgaaggttcaacactcttttggcggcactgagggcattggaggtgagctgccgttgccatgccttgtttttgggtgaccagcggaatccggaggatttcagttcctttcgtctgctgtcttcaggaatcctgtcaaacaggatctgaaggcggtcttccccatagttccatacaagtgtcccgccctcgaacggcacttccttgttttcccggctttgcatcgctttcagcttttcgcgcatccgttccgccagttccggcaattggaagaatttgtttctcggtgtgatgacgggtttcttcacccttgcgttatattcggaaatgaagtccacggccctacggacgatttccacttccccgtgattggccagagtggataccttgttcaggatgctgctgacaaacagggcacggctatagccccggcattgtccggtatcaatcccgtggatggtatcggcactgctcttgatgtcgcgtttgagcgtctgccatgccttttcctgtttctcttcctccggtcgtgcggcttcctttttccgtctgacggtttcaagaacttttttccgccaattgcggaattcttcgtaacggttctgatagcttctgttcgttttttcctgcctgtagtaatcaaatccgctccgtcccgtcaccatcgggttggcacagcgggagaggaccgagagctgggcggacaacttctgccggtaggcggcgatgtatgtatcccgttcctcttccggcatgagttgcaggtcgttgtgcagctcctctccgtaaatcatgatgtccgtctcgccgcgaatctccggattgaaggaactccaggcgtatgcgtcgcaagcctgtttccacatatcatccaaataggcaggatgtttgaatgctacggcttcccagtctttgaagtccttggaatgcaattcattgtgatcttccggatttccgtacaggtgtacatagttgcccgttccatgatgctcctttctgaaatggaacggtacggggggatagtccgtaccttttttccggatcatcgtgaccctgtgtgcattctctatggtaaggtctgctacttgctcttcgcagacctttgctgttgtttcattcataatcattacttttttaaatgtcagccgtaaatcatttcttccagttcatcgtccgtcaacaggcggatctcttcgtccgaacaatagtaagcgatttcttcgtccaaatcgaatgctgtcggatcaaggcttctgatgccatccagcagttcctgttccagtctttctacggaaaccagatagttcccatctttgccttgcacttcccgtgcaggatagctcattttccgataaaccaacatcgtcatttccggattggcttcctgctgtcctttgcttgtcgtctttctgttcatacctttatttttttaagtttgacatgatcggctccatggagccggattttcgttttcttacttgcctggctgtcttttgtcggggattgagcaaggcttggcaaaagaaaataccgcagcgaagcgaggatgattttcttttagccaaccagcccctgaaaggggccgccttgcgcaatcaacccgacaaatggctatatttgcaggtaagaaattgaaaggacggcaggatattgtgaattatagattacaaaaaaagccatccctagggggacggcttaatgactgaatttgtatacttattgtgcaagacgctccttcacgttgttcattgcttctttcaggctgctgttcatgacccgtgcataatgctgtgtcatacgtgtggaggcatggccgagcatgacggaaacatcttgaagaggcacattgttggcaagcgtgaccgtagtcccgaaagtgtgacgggcaacgtgcgtggtcagattcttcttaatgccgcagaaatcggctatttccttgagatagctgttcatcttctggttgcacatgacgggcaaacagcatcctttcttaatgcaggtcggatgttccttgtatttctccaatatggccaggggtacgggcagcaatggaatattgctgatggaagaagccttcctacggtgttccaatttgacccttccttttcttatccaccagtctccgagattgtcctgtaccagattctctttgttcagactggcaacatcggagaatgccagaccggtgaaacacgcaaagacaaagacatccctgaccagttcaagccgtggaatggtgaatttctttttcattacggtctgcaactcgtcataggttaggaataccggatcggtctcgtcctgctccatcttgtaaccgtaaaagggattcttgcgcatccattcctttgccaatgccatattggtaaatttcttgaagcatttcatataacggactatcgtgttccggcacagtcccgcctccgttttcaggtagatgtcaaacgcacggatgaactccggtgtcagctcatggaaagtgacatcctcctttccgtaataagaggggatgagcagctgtaatttcttcaccacgttcttataccggttgatcgtgacgggagagtagtctatacccgccagtatttccatttccttgatgccttccctcatggtgccgagcagtgtacgcatttcggtgtctttcccgaaaacacgtttaagaatcagttttggggtaatcagggcctgttccaataccagttccttgtgtttttccaaggcgcgtgcgtgcagttcggcaatataggcgttcagtgccactgatgccctgtccctgcctttactgcatcctttggcggcgttccataagttcaggggtacgcttctttggatacgtacatcgtcatagtctccattgatggttatccgcatcaataccggtgcctcaccgtttttcaacaatttcgttttaagcacgaaaaacagaatgttcattgttccttgtttcatcacttttgttttttgaggtgttacattcaattgtttcgtcaaaaccggatggcatgaggacgtggagcgaaatgttaaattcggtggtttttttgagggacttgtggaaaagccataaaaatcccatttttctcaggttcgaattgccttttgtatcccgggttcgattccttttttttatcccgatgggaaataccgaatttttaaatttctttcactttttcgacttcatccggtcatgtgtgcaaaattactttttcacaccggagattggaattgtcaaacagctgaaaaacaatgaagtatggtgcgtatttatggctttttcaaaagccttaaaaaaagccactgaattggcgaaatccaacttcacaaatatgtagcggaatgcgtagtgagggtaaaaaaagaacccttgaactatctctaattcaagggttttcatgtgtgaaaagcatttatgtactttctttggtggtgccaccaggaatcgaaccggggacacaaggattttcagtcctttgctctaccaactgagctatggcaccaaaatggttatcggtagagcttttcactttgtaatagaacacctctcagaaactattgtttcttgtttgcggttgcaaaggtaggcatattttttgattctacaaattttttgcaaattttctatgaaattctttttgatttcaaaaaaatgctttacctttgcactcgcaaaacagaaacggaatgtagcgcagttggtagcgcactacgttcgggacgtaggggtcgggcgttcgagtcgcctcattccgacattgtaaaggataagccactgaacttcagtggctttctgtttttttagagataaagccagaacaaatacgggacaccctattttatgggtcaaattctattctcggattataatgctaacatcctaccagccgaatattttttgtgaaagtatatagggaggtaagagtttttcgttatctttgctccctacatgataaaactgattttattttcctgttaaccattaggatcataagatataccttcttgatgatttctttaagtaaaaaatgagaattaatgaatatgagaaatttgtttttgactttagctttcggtctatgttccggcgtattcgcccaaaatacgactgtttttgaatctcctattatggggtggagctcatggaatacctatcgggttcatatcaatgacaccttaataataaggcaagcggatgctatggtgcaaaaaggactgaaagaagtaggctattcctatgtgaatgtagatgacggtttttttggatggcgggatgaaaaaggagtgatgcaaacacattccgagcgtttcccgaatggattgaagggagtggcggatcatattcattctttaggattgaaagccggcatttattcggatgcgggaagcaatacttgcggttccatctgggataaagatatgaacggcataggttccggtttgtacggacatgaatttcaggatgccacgttgtattttaaagagtggagatttgattttatcaagattgattattgcggagccggtcaggaattgaatctggaagaagaaaaacgatataccgaaatacgccaggctatagataatctgggttgcggacatgtttctattaatatctgtcgatgggctttcccgggtacttgggctagaaaccttgctcgttcatggcgaatcagtgcggatatccgcccggagtggggatcagtaaaatatatcatcgataaaaatctttatctgtctgcctatgcgggagaaggtcattataatgatatggatatgttggagataggtcgagggctaaaacctgaagaggaagaggtacattttggaatgtggtgtatcatgagttcacctttgttgataggatgtgatctgacaaccattccggaaacgtcattaaaactgttgaaaaataaagaactgatagctttgaaccaagaccctttaggattgcaggcatacgtagttcagcatgaaaatgaagggtatgtgttggtgaaggatatagaacgaaagcgtggtaacgtacgtgcggttgctttatacaatccttcggatacgatttgtagctttacagttccgatgaatattttggaattaggaggaaaggttaaggcacgcgatctggtgaaacagcaggatttaccggagataaaagggggtgttctgaatcgagaattacctccccatagtgtgctgattttacgtatggagtccgagaagagattggaagcgactgtttatgaagcggaatgggcttatctgccttgtttcaatgatttgggaaagactccgaaaagcatcgtatatgctccgttacatgaagcatccggaggcatgaaggtaagttatctgggagggcggaaagagaattttgcagaatggaaagaggtgtacagcgagcagggcggtgaatatgaaatgactatccgctatgtgcctaaagcagatcgtaagctggaagtctgtgtgaataacgaaaaaaggattcttcttgattcgctgtcggcggatgagactcaaaagatagcttcgattactgttccggtgcatttgaaagcagggaataataagatacgtatgggaagctcattttgctgggctccagatatagactgttttactttgaaaaaagtaagtgagtaggctgataagatctatcttcttgaagtaccactttgataaagagtaagaatatgagtgtaacaaatgtcacccgtgaggaattgtgggcaaagcaacatttgtcttgcaaaaacatggattatgcagtatgggaacgggataaatccatgctccagaagttgtccagaatcaatggcggctgttctttcgtggtggatgtatataaaggatgttatgcgtatgcttctacgggttttgtcgattggttggggtatgacaggcacaagatagaaacattggaaaaacagggtgattatctggagtcacgtattcatccgcatgatcgttcccaattggaagacttgcaagtcaggctggggaagttcatttataaccagccttttgaacatcggaatgactattgtaatgtgtatagtttccgtatactcaatgctcgtggcaactatgtgcgtgtaacaagcaggcatcaagttttggaacagagccatgacggaaaagcatggctcattatagggaatatgagtatggctcccggtcagaaagaatcagaacaggtggaatgtactgtgctgaatctgagaaatggagaaatgttttcacccggtgtggtgataatgaatccggctttcggtcttaccggacgtgaaatggagatattacgcctcatacaacgaggattcttaagcaaagaaattgccggtaaattatgtatcagtattcataccgtccatattcaccggcaaaatctgttgcgtaagctgggagtacaaaactctttggaggcaatacgcctaggacaggagtcggggctgttaagctgatgcccgatttcatcgggtcaaggcatccattctactactcctgtaacaggatgttgctttctccattccttaaatccgctataatcccgcaccccatcccggatgactgcctgataatactccactccgatgattttctcggtttccggtgtttcatattttaatcttagaatagtttcccgtatttcatcggtcataatttccgaaatgcgttgggctaccttttcaaaataaccgtcataacgtgaaccttcccggatgtgaatcatatccatctgccaaagttcattttcttcattttgataccatgcatgccattcgatacaggcttcggcagtatgcagcagattagcgcattctattcttttgatggacggattctcagctagtctggccattgcctgaaagctgtccgtcaggtttaagggtgatgaataaatatggaaatcaatgtccctatgtttcatcagcagccctgttctgagtgaacctaccagattaatttttgcaccggcatcttcccatatctggatgatgttcgtgtttttgataacttgccaggctttttcctgattctgtttggcaatgtcgaaaatattcatacgctgtcttttatagttggtttgcaaaagtagagaaaagctttcaaactgaagatagttataaataactatttattgccggaatgaatcgggagaaagggggtaacaaggaacttagtaatgtttccttttcaagtaaatgacagattgtattcccaacatgatgacaaacagatattcggttgtcatatataccgctaaaggtgcatgtacacagtggctcagccagtaaagataaagaagatataccataatggtaaccacttggaagataaaggcaatttttgtctttccggttccggtgacggcactgatgtagacatatccgggtactgcgaatatataattgaacagcatgacgatgaaaggggggacagtgtgttgcaccagtgtttcgttgttggtgtaaaatccgataatccaataatcacaaaacaatgcgactcctaccagcggaaaaccgatggcatatcccattttgatgattttgtggcagataggaaaaacacctttttgttgtccggctcctaaaagattgcttaccaaggaaccgttggtggctcctaaagaactgacaatcacaaaaaagagggtggaaacgctgcgggtaatgttggaaacggccagttccatctttcctaaatgttcgatggcgatgaagaacaggaaccacggcgccatactgataaaagaatgcagcatgctccatacggacaggtaaaacagtcttttcaatagctttccatcaaatatcggttgcagtccatacttgtttttatcaatctttctccacatatggataaggagaatgattaacgatcccatttctgctagcgttgaggctattgccgatcctgctatcccaaattttaagataaatattaacaggtaattgaaagggatgttgataagtacggctgctattgcggcccaagataaggacctggtctttattattcccacaaagaaagcccggagtgccagaaagggaaatgaaaataaaagtccgaaactgcgccagtccagatagtccgttacagcctgatggatttccggtgaggtaattaattgtttcaagaggaagggggaaaggccctgtatcaacaaacataaagagagtgctagtccggaaaggaaaaatagtccttgaaagaaggtacgtcctgtttctgcatagttctgttctccattcctgcgggcaatcatgacttgtagtcctatgctgaaaccgaagcctagcatataagttgccagataatatattcctgccaaggcagatgcgccaagttccacttcaccgacatggcccagaaagacggcatcggtaatgttgattaattgctccattaaaacgctcatcattacaggaaggttgatgagccatatttgtttatatgtataattcattgtttaacttaatgtataaccatgcttatgcacttatcggtttagggatggtgcacaatctgtgtggattaataataagggtataaaactctgtaacaaatcttatttaagatccgtcaaaatagccaaatagtttggattggtagtgctattcgttgaatgtagctatatacagagttgatgtttcattagttaaacaattgtgttttgcaggttaaatcaaatctcctggttcggcataaattttgtattcgctctctaatcccttgaaatcttttctgaggagtacaattttagctttgggggtaagccaaatgtttagtggaatggcattctcctcttgaaatgaaaatatagtgctgaattcttttctcaaagactcgtctgaggttgcggtataattagggagtgagaaaaatgaatttatgtagttatacagtatttgtttgcttttcatagatccccctttttcatatttctcacttttggcatacagcataacagatgggacaccttgatggatatgggtttgcgtactcagataatatccgtccagattatttgcatagcctgtggtaaaatcggagtcggttacgtctttccaattgaaagcaaggaaatcttttttatttgtgatatcaatggatattgtatcactactatagattatttcattgtttttgtaacctagcagataagtcttgtatgtgccgggtgaataataaacatgtgcccatttgaaaaatgttgtttccacatatctggcataatttgaatgactgaatactttaaagctatttggggaatgagatgatttccacactatggaatcatacacttcgcttagacaaggtgcatctttaccaaaatcaaaagattggtagaatacaataggagcaaatatgttttgagaacttgtttctgcttctaatataattttgatctctttattttctgtttctttattttggctaccatccatatcggcctcttctttggagcaagacaagacaaagaaggtaagtagtaaaaaacagtagaatatctttttcatgtttgtttttgagttgggtaaatagctctgtttgtaatgtcgaaaacaaagctagcaaatatatttgataatctcagctttgtatcctatattttatttttgactgatgatttgataatcaaaatcggtaaacaaagactttatagagattcaaaaggttcctgcacatacctcatatactcctcatagtctatataccttccacccattgactttaagtgtggggtttcaaactgacaatcaatcaaggttcctcccaacttctgaaatgtttgtgccagatagataagcgccagtttcgatgcattggggactagagaaaacatgctttcgccgaaaaaacactttcccaaagtgactccatagagtccgccgaccagacaagattcttcccatacttccacgctggtcgcgaaaccttgctcatgcaggcggatgtaggctttcatgatatctttgcccaaccatgctcccgtttcttccatccgcagattgccgcaggtttgaatcacttcatggaatgcctggttaaaactgactccatattgttctttgttcataaaagtacgcatggagtgagaaatgtgaatctcgttagggaaaatcacaaaccgtttcaggggacaccaccattgtatctgtttttcacggaaagcataccaagggaatatgccattggaataggcaaggaggagacggtctacggagaggtcgccgcccactgccaatagtccgtccggttcgccatagtgagggtcgggaaaaacaagtttttgagttagttgaaagaccatattgttttttatttattggattcatataatatcttctgtaggaacttctccgtatctctgcctctgcggagaagttgccgattcatttaaaggtattactctttgagtacttgcaagctcaattgtccgtttcctgctgtcactcttactttacctcctgtttttaatgctccgaataggatttcacgcataagcagtggcttcagctgcgaagtaattatcctgtccatttccctggcaccatattctttggtgaaacctagtttcagcagatgcttataggcttccgggctgagttccattcctacatgacgtgcagacagtttgtttttcagttcgttgagttttttgttcaggatgagagaagccattccgtaatccatatcatggaagacgactgttgcagacaaccggttgatgaattcaggtttgaaagtttttttaacctgtttcaacattgcctctccggcagtaatttgtccgctgaaacctatagaagcttggtgcgcgaattgtgctccggcattggaggtcatgataagtataacatggcggcagtccgctttccgtcctttgttatccgtcagtacggcatagtccatgacttgcagcaggatattgaatatatcaggatgcgctttttctatttcgtcaagcagtaacacacagttgggagttttgcggatagcatctgtcagcagtccgccgtcttcataacctatatatccggcaggtgagccgatgagtttggccactgtatgcttttccgtatattcgctcatgtcaaagcgttgcagggcaatacctagttcggaggccaatactttggctacttccgtctttcctactccggtggggccaacgaagagaaggctggccagtggtttgttttcgtcctgtagcccggctttggccatttgtacggcttccaccacttggcagacagcttcttcctgaccgtatatctttgcactgatgcgttcatgcaaggtttctaatgtggcattgtcctcttccttcatggcgagtacatccactttacagatacgtgccagtatatcggttatcaatgctttgtccaccgtttgtgtttctgtatctgtggggtggatttcacgataagccccggcttcgtccaccaggtcgatggccttgtcgggcaaaaaacggtcgctgatataccgtgcggcagctgtgacggcatatgctatcactccttcttcataaactactccatggaacgtttcgtacctttcttttaatccttctactatgtggatagtttcttcgattccgggttcctgtatgtcaatctgttggaaacgccgtaccaatcctctgctacgtgaaaaatagcggttgaattcttcgtaagtagtggaaccgataaaccggatctctcctccttccaaataaggcttgagcatattagaggcatccatcgaaccgtctcccgtccgtccggcgcctatcaggttatgtatttcatctatatatacaatggcgtgtccttctttccgtattccttccataatggctttcagccttttctcgaattcaccccgatattgtgtaccggccaataagttgcctaaatccagttcgtagatacgacaacctgtgaggcgttcgggaacattgcctgcttctatacgtgcagccagtccgtagaccagtgcggtttttcccactcccggttcacccacgtgcagagggttgttcttttctttgcggcagagaacttgaatggtgcgttccaattccacattccggcctataagcggattccggtcttgcagaccttcattgaggcaggtgacgtagttgcgccaaggttcgcttttctcttgctcagaggaagtttcctcttgaaactgattcatgtgctcgtaatttgaaatgagggagctgagaaactccggcatatcttctcccactgtttcttttagcagatagccggcccatgaatcttccagttgaagcattccttgtaccagatgaggaacatccatttcttctgcgcttgaatggctgattgtcatataggcatattgcagcagctcggagagttgacctgaaatttccaactcatattctatttcttgaggaactcgttccacttctttcgacagatattcggaaatggactgggacagttcttccggggtacaaaaacactctgccaatgctttttgaaaaggaacttgttccagcaatgcgctcaataagtgttcgggcgtgataaattcatgccgatattgcatcgcttggctctgcgcagaagcgaaagcgtagttcaccgaatcggtatttggtatatccatatcttattcttgattttttattcttcttccggtgtaaccgtgagtcggagagggaaaccctcttcacgagccatacgggtggctttttgtacttttgaccgggcgatatcatacgtatagatgcctattacggccgattcacttttgtgtacttgcatcatcaaagcttctgcttccatcgttgatttgaaaaaaacggtagttaatatctttacaacaaattccattgtagtaaagtcgtcattgaaaatagtaactttgaagcgtcgcggctcgcgaaggtctatacgttctttttctttataagatgattgttgttgttccatattggtatttgtcatacgtacttatggcacaaaggtagggaaagtattggaaaggtagggtagggaagagatgaattttgtagacggatggtctggagctgatgtcttgaattcctttcatgcctgtctgtcattcttaaaacatccatatataataagatgtctcaaggatgacagacgtgtatgaaaaataaaatgtgaaaaaatccaaggataagaggtggaaacttagacttttctgtgaacaaactggccgtcaatccaaatggtggcatggtttccccggaacttcagcaggatatattcggggtcttccggtcctttaggaaaatgatggataaaccagtcttgccataactctttcttggtgccagtgtctgatacaacttccacttctccggtcatggccacgctgtttccctctttgtagaaacatatgccggctttcggattagagcggaaatcctttgtctttgccgaactgtttcctgttgcaaaccagatggttgttaatccttccgttttgattttactcaagggaaccggccggggatacccttctttattgatggaagttagtgtgactacttcacattgttgaagcaaagcttttgctttttctttaagtgattccattgtttctttttagtatttgatacggtacaaaagtaagaaacgccaggatggcttcgttgtaaaaaaacgacttttatagtttcagatatgttaatgtggtttcttccgtaaccggtaaggataaaaaggaaccgggtgtattgcctgataaggcttttatttccttgctcaaatgggctgtgtcatagtatccggcctcaatggcaacagagaagagttggttggaagaggtggaacgcagtaaatccactgcattcttgaatttgataattcggctgtattccttaggggaatatccggtctgatgtttgaacttgcgctcgaagtgtctttggcacaagcatacattttctactaaagaacggataggcagttggcctttggaaaggttaatgcaatctactgcatatgatatctgtttttctatcttgttgttagtacataaggcttgggtgagaaaagattctatcagtctgattttgtcctgtatgtacggttgttcacataatctttctgctagcgagtcgttgaagatacctcctgactcaaaagtgctgattctttgattcccaagttcttccaatggtaattgcatgaagcggaataaaccgcaaggcagaaaacggataccaaacatatggatgcttttcgcataggttattagggtggagtatcggctcatgggacctacaaaataagaacggtagggttgcattataagactttcttgttccgctatgtcagctacttcgccaagggtgaagataaaatcggtgcaaccgtccggcaatatgttgattttcatcccatagtccggattgcctttaaattcccagtatttgtcaatatagggggctaaaagcagggaaggctggtattcattatacatgaagattgttatttctttttagcagcgatagctagtaatactcccagtaccacccctagaatggcggcaaataatacccgcatgtccggaggaagcaggaaagtgatggtgtgggccggataccagaacaaagggatggtctttttgaatacaaagctccaaagtaccgcccaattcaatccggtgaaaatacgtgtcatgggaataggggtggaaagcgctttgatagagccgccacaattcccgatatgagtgtctgttattttatgtaatgtcatgaatacaggagcgaatatagagttcattgtaacggaaatagccagtgcaaccagaaatttggcaagacagaaatccccgttcatcaatgtggaggcatattccagacccatatattccaagaaaatgggagtgccttttgaaaaaataatcatagccatattgatacccatacccagtaccccccagattaccatgcgtgggataataccgaaggtcttgttgtgatacactcctgtgctgatgcgaagcccaagcatttctcccaaagtagctagaatggcgaacttcacaaaactcatgaccataccatggattgcattgaaagatttgtaccattcataaatggtatcgctaataaaaaagggtagaaacaatgctattacaaacaaaaagaacagaatatcactctttttcatagatagaaatgtgtttttcattaatatttgcgacaaacatacgaaaaaaatctaagttcctaaccaaacaataatttaaattcgacggctctttatttgttatctagctataatcttttatctttgtttcccgtcatggaataaaataaaaaggttattatgaaaacaaaaggatggattttaactgtaatttgtagtatgttgttattggtggcgggtatcacttttgcatcaatggtgcttgtcgggcaaccggctttggcaaacgaatcattgtggtggtggatcttgataaatcttggtgtgatggttttattattcgggtatggcgtgaaacggggaatccagatattgcgtatcttcagcataccgaaaagcaaactgacacgggaaccaggtgtcgtggtttgtgattataatatcagcctgaaaaagtatgctttgtataaattgtgggacatccgtcatttcagtttttctttgttgttcatcatttatatttgtattgcactgtgtacagggcactatattgttcccgaagagcaaagcctgttcagtccgctgctgatttggttcttgtgtcttatttatatcttgattatgctgtctgtcagactaaataagatttataagcggagtattgcggggcagacttgggtagaaataactccggaagggctgacatatgataaggcggaactgaaacagacattcccttgggaggagatagcaggtatagctctttataagacctattgctttctgtatgataaaagaggcggtgaatttttgattgtaacttcggatgaaaaggtgaaagaatcccttctttactatttaaatacgaaaaaataatgaattaaagctaagtgttttttataataaggttgttcatattattataatgtgtatttttgtaacaaagtaataatgaaaaacctcttaagtatgaaaacacctgttctcgcgctattcatttctttagtggcatttggagcctgtgtgtccaataaacaaacccagccgtcaaccgattataaccaattggtgaatccgtttatcggaaccgattttaccggcaatacttatccgggagcgcaagcgcctttcggaatggtacaacttagtccggataacggtttgcccggatgggaccgtatttccggttatttttatccggacagtacgattgccggattcagtcatacccatttgtcgggaacgggagccggagacttgtatgatatctctttcatgcctgtaactttgccttatcaggaagcggaagctcctttaggcatctattccaaattctctcatgcggatgaagaggcttcagctggttattatcgcgtgttgctgaaagattatgatatcaatgtggagttaactgctacagagcgttgcggtatacagcgttatacgtttcctgaaggagagtcggctgtctttctgaatctgaagaaagcgatgaattgggactttaccaatgattcttatattgagataattgactcatgcaccattcagggatatcgtttttccgaaggatgggcaagaggccagcatgtgtatttccgcactcgtttctccaaaccgtttgcctcggtagagatggatactactgccattgctttgaaaggtaaacgtgtaggtacggcttatatcgcccgttttaattttgatacggaaaaaggagagcagattgttctgagtactgctctttcgggagtaagcatggaaggtgctgctaaaaacatggcggctgaagcacctcacaatgatttcgataaatatttggctgaaactaaagataattggaaccgtcagttgggaaaaatagaggtaacaggtgataacaaggacgataaggttaatttttatacagcattgtatcatacaatgattgccccgactatttatagtgatgtggacggggcttattatggtcccgataagaaaattcatcagacggatggttgggtgaattatggaactttttcattgtgggatacttatcgtgccgcacatccgttatttacttatacggaacctcagcgtgtcaatgatatggtgaaatcattcattgctttttatgaacagaacggacgtttgccggtatggaatttttggggaagtgaaacggatatgatgattggctaccacgctgtacctgttattgtcgatgcttatttgaaaggtattggtgattttgatgcagagaaggcattggaggcttgtgtggctactgctaacttggatgattatcgcggcattggtctgtataaaaaattaggatatataccttataatataaaggatgaatataatgcggaaaattggtcgctttccaaaacattagaatatgcttttgatgattattgcatagccgaaatggcccggaagatggggaggactcaattagcggacgaattctacaagcgttctcagaattatcgcaatgtgttcaatccggcgtcaagcttcatgcagccgatagatgataaaggagtattccaacctaatttcagcccggatgactacactgcccacatttgtgaaagtaacggttggcagtacttttggtctgtacagcaggatattaaggggctaattgccttgactggtggtaaggatcgttttacggaaaagttggatagtatgtttacttatatcccggctggtaatgcagatttgcctcttttcagtacaggtatgattggccagtatgctcatggtaatgagcctagccatcatgtgatttatttgtataataaggtacgtcagccttggaaaactcagaagtatgcggcgcaggtcatgcatgacctttatttcaatgcacctgccggactgtgtggaaatgaggattgtggacagatgtctgcctggtatgtattcagtgctatgggattttatcctgtcaatccggtaagtggtgaatatgagattggtacgccgttgttccccgagatacagatgcatctggataatggaaaaacgttcacagtactggcccctggagtaagtcgtgaaaatatctatatccagtcggtgaaagtaaatgggcaaccatacgataagagctatatcacacaccggcaaataatggatggtgctactgtagaatttgaaatgggtccggaaccgggaaatatttggtatagatagataataattggttcaacttattaagaattgtaattgtacaggaggtgagttaaaagtaatatttgttatcgttttgctgtagaggcggtttgaatctgcctgaaaattgtatgatgagcggaagctttttgcctctacagtggatgattggatcgttatttggaacattggctctctccttcatacaaaggtgaattatataatatgaacgaggaacttgatgacacctataaggccgtctttcgtcaatgctatcctaagctgttgttctatgcgacacggctggtcggtaccgaagaagccgaagatgtagtgcaggatgtttttgtggagttgtggaggcggagagattcagtcgtcataggagagcagattttagctttcctttatcgttctgtatataccaaggctataaatttattgaagcatcaggttatagagaataactacagtgcggcaatgatagaaatctatgaacgaaaattgcaatattaccagccggatcatgccgaagtcattaaaaagatagagaatcaggaattgcgtcaggaaatttttggagcgattaatgaattgccggataaatgtaaggaggtgtttaaactgagctatcttcatgatatgaaaaacaaggaaatcgctgatactcttggcatttctttacgtaccgtagaggcacatatgtataaggccttgaaatttttgcgcgaacgtctcagccatttattattgtcattgattatattttcagcaaaactgctaagtgtttttacaagttgaattgtttactatatgaatagggaaaaagatgagtaaacttaacgaagatattattatcaggtatttggaaaaccgatgctcggaggaggattttgttcttatcaatgaatggatgaaagaatctgatgagaatgccggagagctgttccgtatggaggagatttatcagttaggtaaattcccctttgaggaggaaaatctggtagtgagggcagagcgcaggttgggtagaagattgaaacgggaaaatcagaagaaacaagaggtgttcaagcttagaagtgtgttgcgttatgcagctgctatagtgggtgtgatggtgctggctgcgggattggcctattggttccggaataaagcggaggaattggtggtagcatcggctgctcatggacaagtgcgtgagatgttgttgcctgacgggacaaaagtatggttgaaccagtcgtctgttttaaaatatccgcgtgcttttgaaggaaaggaacgtcatgtatatctggatggagaagcttattttgaagtagcacgtaatcatgagaaacctttcatggtaaaaagcccggcaatggatgtcagggtcttgggaacctctttcaatataaaatgtcgtccggataacagttttgcggaaacaaccttgatagagggtgaagttgaggtaaaagataaatcggacaaaggaagaattactttgttgccgggacaaaaagccgttttaaacagggtaacagggcggatgcaagtaaaacaggtcgatcccaagatggagatagtctggcataatgacttgattccatttgaaaagtcatctattttccagattgcggcagcattggaacggttctatggagtgaagataatcctttcaccggatgtagacagtactaatacttattcaggtgtactgaaaaagaaagataatatagagtctgtgctgaattctttgcgtaactctattcctttcaattataagaaagtagatgataacaatatatttatctcatcggaaacaaaataatttttaaataaagatctatgaaaatcaacatgctcttaagcggctgtcttctagggttattgtgtttcactgcatgtgattctgagggcaatgaaatgaatgattacacccattatgtcaatccttttattggtacaggaggccatgggcatactcatccgggtgctatggttcctcatggcatgatacagccggggccggatactcgtattgacggttgggattcctgttccggatattattatgaagatactacgatcaatggttttgcccatacacgtcttagtggtacagggtgtgcggatttcggagatttcctgttgatgccgactgtaggtgtgcagcgtactgatttcttgggaacagaaagccagaagcgtcctttcgcatcggctttttctcatgaaaaggaatatgccgaaccgggatattattctgtttttctggatacatacggggtaaaagccgaactgacttcgacagagcgtgcggcaatgcatcggtatacttttccggaaagtaaggagtctggatttatcttggatatggactataatattcagcaacaaatcaatcaggtaatggaagtggaggcagtgaatgatactgtgttgcgggggcgcaaacgcagtgcctattgggcataccgacaggatctttatttttatgccgtattttccaaaccctttacgtataccttgtacacggatactgttcaggaaaatgacaaacagattcctgtatgtaaaatgcttttgcattttgaaacggcgaaagatgaacaagtgctggctaagttctctatctcttctgttgatgcggaaggtgcttataagaacctccaggctgagatgcccggttggaattttgatggagtgcgtgccgatgctaagaagaaatggaatgaatgcttgtcaaagattgcagtcaaaaccaatgatgaagaccagcgtgccattttctatacggctatgtatcatgctttcctaagtcccaatctgtttacagatgtagacgggcgttacttgggaatggatttgaaagtgcataccaccgacatgaaacatccggtttataccattttctctttgtgggatactttccgtgcgttacatccgttactgactattgtcgatcctcagttgaatacggagtttatccgttcattaataaagaagcatcaggaaggtggtatctttccgaaatgggactgtgtgtccaattataccggaactatggtgggatatcatgcggcttcgttggtaaccgattcttatgtgaagggataccgcgattttgatgtgcaggaagcttacaaggcatgtctgcgtgcagcggaatatgacactaccggtattgtagctcccgattggctgattccatatgttatgcccaaagcacgttattataagaatactcttggctatattccatgtgaccgtgagaatgaatcggtagcgaaagcattggagtatgcgtatgatgactggtgtatctccgtgctggcagacagcttgggagatactgaaaccaaggagaagtatgcccgttttgcagatgcttacgaattttattttgatcctgccacccgtttcatgcgtggattggatagtaaaggtgaatggcgtactccgttcaatccccgttcttccaatcaccgtaatgatgattattgcgagggtactgcatggcaatggacttggtttgttccgcatgatatcccgggactggtgaatttgatgggtggggaggatgctttcgtaggaaagctggactccttgtttacggtttcttcccagttggaaggggaggctacctctgctgatatcacaggactgataggccagtatgcgcatggtaatgagcctagtcatcacattactcatatgtataactatgtaaaccgtccatggcgtactcaggaattggttgacagtgtgctgtataaccagtatttcaatgctcctgacggcttgtcgggtaatgaagattgcggtcagatgtctgcctggtatattttgaattccatgggcttctatcaggtatgtcccggtaagccggtttattctatcggacgtccgttgtttgaggaggtgacgattaatttgcccgaccgcaagactttcgttatccgtacccacaataattcgaagaccaataagtatattgagtcggttttgttgaacggaaaaccgctggatgttcctttctttacccatgatgatctggtacgtggaggaacgatggagattaccatgagtcccgtaccgacggaatggggaaaacaggtgaagaattaaaagtataacttaacccaaatagcaatatcatgaaaaaactatttctatcagttgtagcgctgtgtgtcacgctgtttgtacaggcaaaggattatgcagactatgtgagtccgttggtaggtacacagtcttcctttgaactctctacaggaaatacttatcctgccatatcccgcccgtggggtatgaatttctggactccccagacaggaaagatgggggacggatggcagtatgtttatacggctaataaaatccgtggtttcaaacaaacccatcagcccagtccgtggattaatgactatggtcaattttccatcatgcccgtaacaggaaaactggaatttgaagaggacaagcgtgcaagctggttctctcataaagctgaaattgcaaaaccttattattataaggtttatttggcagaacatgatgtcgtaaccgaaatggttcctacggagcgtgccgtaatgttccgtttcacttttcctgagaatgattcatatgtagtggtggatgcttttgatcgtggttcgtctgtcaaggtgattcccggagaaaacaaaatcgtgggctatactacccgtaacagtggtggtgttcctgccaactttaagaattatttcgttattgagtttgataagccgtttacttatgaggctacgttctctaatgatgtacagcctgaaaaaccggatggcagtgttcctgtaaccttgaaagaaggtaaactggagcagactgatttccataccggagccgttatcggtttcaagacaaagaaaggtgaagtagttcatgcccgtgtggcctcttcattcatcagtcctgaacaagcaattcggaacctgaaggaattgggtggtgacagttttgaagtattggtacagaaaggtaaagaggcttggaatgaggccttaggtaaagtagaggtggaaggtggaacattggatcaataccgcactttctattcctgcttgtaccgttccttgttgtttccgcgtaaattctatgaactggatgccaacggacaacctgttcattacagtccttacaatggcgaaacgctgccgggatatatgtatacggatacaggtttctgggatacattccgttgcttgttccctttcttgaacctgatgtatccttcggtaaataaggagatacaggaaggtttggttaatacttataaggaaagcggtttcttccccgaatgggccagccccggtcatcgtggttgcatggtcggcaataattcagcttctatcttggtcgatgcttatctgaaaggagtacgtgtggaagatgtggaaacattatacaaaggactgattcatggaacggaagccgtacatcctgaagtttcttctaccggacgtctgggatatgaatattataacaagctgggctatgtgccttgtgatgtgaagattcatgagaatgcagcccgtacattggaatatgcatacgatgactggtgtatttatcagctggcgaaagagttgaagcgtccgaagaaggaaatcgcactttttgccaaacgtgccatgaactataagaacctgtttgattcggaaagtaaattgatgcgtggcaagcagaaggacggcaagttcgctcctgaattctcgccgttgaaatggggaggtgactttacggaaggaaacagctggcattattcctggtctgtattccatgaccctcagggattgattgatttgatgggaggtaaggaaatgttcgttaccatgcttgattctgtcttttcggttccccccatctttgatgatagctattacggacaggtaattcatgagattcgtgaaatgacagtcatgaacatgggtaactatgcacatggaaaccagcccatccagcacatgatttatctgtatgactatgcaggccagccttggaaagcgcaatattggttgcgtgaggtgatgaaccgtatgtatacagccggtccggacggatattgcggtgacgaagacaatggtcagacttcggcatggtatgtattctccgcattagggttctatccggtatgtcccggtacggatgagtatattctgggtgctccgttgttcaagaaggcgacacttcattttgaaaacggaaagaacttggtaataaccgcatcggataacagcgataccaaccgatatgtagatgaaatgcgtgtaaacggtactgtttataccaagaattatttgaagcataacgaattgttacaaggcggtactattgacttcaagatgaccgaccgtccgaatatgcagcgtggaacacaagaaagtgatttgccttattcattttcaaaagacgaaaaagtaaaataaaagtttcaccatgcacttctctcttataaagagaggttggagggggatgttctcttttggcagcattgcaagagtacatcccctttttctttttaagtatttcttctatacgtcaaagtccgatgatattactacttttgcctttcctctgcttttttctggaaaatttagaaaaaagaacaagattgagtaagtgttttcttttagctgcctgtttttattctcgaaaggggaatgagaaccccttcactggagaaaaacaagtcagtgttaacgaatttataaattatgaaaggcaatcaattaatgagaaagcccaaattactcagggcgcttttgattcttttgtttgtggctgcacccatacaatggacccgcgcgcaaatcgttctttcaactcccaagacaacgcttggagcagtgatcaagaacattaaatcacagtctaactatcagtttttctatgatgacaagctggctgaaatgccggtgaatgccattgatgtgaagaacggttcattacagtctgtacttgatgcggctttgcaaggcaaaggaattacgtataagatagaggataatattgtctatctttcagcatccggagagcctcagacacctcaacagacaggacaggaacatacagtgaccggaacagtggttgatgcgacaggcgaagccttgattggtgtaaacgtacaagtgaaaggaaatcccacagccggtacgattacagactttgaaggtaactattctttgtccgttcccggaaatggtgagattgtgttctcatacattggttaccgttcggaaacattgaagcccgatggcaagaatgtactgaatgtaaccatgcaggaagatacacagcagattggcgaagtggtggtaaccgctttgggaatcaaacgtgagaagaaaatgttgggttatgcggttcaggaactgaagagcgatgaactgaacaagacaggtgatccgtctgtgaccagtgctttgcagggtaaagtggcaggtcttcagatgaatacttcagctaccggtctggggggctctacgaagattaccatccgtggtaactcttctcttaccgataacaaccagccgttatggattgtggatggcgttcctttcagcgacaacactacatccgacgcatctcgttatggtggtgtggaccgtggtagcgcttccatggacattaatccggatgatatcgagagtatttctgttttgaagggtccgaatgcggctgctctttacggttcacgtgcaggtaatggcgttatcttgattacgacaaagaaaggtagtaagaaggatggtttcggaatccgttatagtggtaatttcacttggacagctatcggcgagacattggatatgcaacgccgttacggacaaggacatattgatacaaaagatgccaagactgcggtgtatgacaaaacggatagcggaagctggggcccggtattggatggaagcatgaaagaggcttggaacggagaaacgtacgcttactctaactatggggataagttgaaagattattttgataccggtttctcgcatacgcataacgtatctatcagcaacggtacagagaaatcacatttccgtacttctttcggatactccgacaatgacggtgtattccccactgaaagtttgagccgtgtgaatgccgatctgaatgcaggaacggaattgaacaaatgggtgtctatggacggaaaaatttctctttcacgtacaaaagccgataaccgtccactgtatggagattacggtgctatttcccagttgatgagaatcccgaacaacgtccgtctggatgacttgaaacaatattctgatgaaactcatgcacatgtgaattggacagggcctactgccagtatccgtaatccttattatgtattgcatcagcgtcagaattcggatgaacgttggcgtgctttcggatattatagcatgaaaatcaatttcactgattggctgcatctatctgccaaatacgcttttgactactaccgcaccagagtgcaaagcaccaatgcgggggatggtatcaatggagaagccaatacttccatgattacgaatgattcaatggaccgtagtgaagaaaacttcttcgagtcaaatgctgaagtcattttgatgggtgaccgtcagttgactgataacttccgtctgggcttcaatgtcggtggtaactttatgtaccagcgttcggaaactttgggcgtgggcgtaggtaatatggtggacaaaggtaactggatgctgaatgcggccaatttgttgagaaccggtagtgaggatggctacaagcgtgccatgaactcggtgttcggctctgtacagatggcgtggaaggaatatctgtctttggatttgacagcccgtaacgactggtcatccactcttccgtcaggtaacaattctttcttctatccgtctgccaacctcagtttcgtagtgtcggacttcttgcgctctatcgacaaaccgttgccaagctgggtgacatttgccaaggcacgtctgtctgccgcacaggtaggtaaggatacaagcccttatcagttatacaatacctactctttcaaattcgataatggtgtattgaccccgaccaaagacaatgtgaagatgaacgaccagttgaagcctgaaatcgcgacttcttacgaagcgggtctggatatgaagttcttgaacaatcgcctgggatttgattttacttattattacagcaagacaaagaaccagattatgaaagtacccgcagcagctccctggagtggaggacaatgggtaaatgcaggtatggtaaccaatcaaggcgtggaactgatgttgtattccactctggtagaaacaaaggatttcgcttttgacttgaatgtgaatatggctcacaacgtatcgaaggtgaaagaactggctccggaagaaaatgtgaactatatgttctttaacggtgacggaaacttccctgtaaaagtaggtacacgcgccggacacaaattaggcgagatttatgctacatcgctttataagcgcaatgaaaacggtgatattatcgtaaatgaaaatgggttgcccatgactgtgaccaatgagtccgaatatgtgaacaaacctatcggtaatatccagccaaagctgaccatgtctgtatctcctacctttacttataaggggattacactgtccgcactgtttgatatgaaattcggtggtgatatcttctcttattccgagatgctggctaccggaaacggtttggctaaacgtaccttgaaccgtggtgaggaaaacaactatatgatggtatttcccggtgtgacagagtcaggcgaggtgaatacaaaacaggtgtccgcttcagaatactatggtgcattgcaggctgaggatttcatctacgatgcttctttcattaagctgaaagaattgtcaatcggctattcattcccctcatccatgctgaagaagactcctgtcaactcgctgaatgtttcatttgttgcacgtaacttgtgctatctgatgaagcacacaccgggtacaagccccgaaggtggctatgacactacgatgttctcacaagccattgactatgcatcgttgccgtttacacgtactttcggtatttctatcaacttaggtttctaattaattaaaaggaaaaactgattatgaaaatcaaattatataaatccgtagccttatgttcgttgctggctttggccggatgccatgattttgaggaattgaatacaaatccttacgcaccgatttacgacccgactgtggagaatgtatcggccgacggtatagatattgattatactttgacggaacatgccatggcaagtttgaaagggatggaaggtgctatcggaagtatttttgccaacttcacctacgaaggtccttacaatgattatcagacaacaaccaatctgactcatgatatctatgccggttattggggaaacaatgtcagcggctttgtgaatcaggcacctacctattcttatacggatggatggtcggccagccgctggaagcatttctatgatgaccgcagcacttcggaatacagccagttggtcaagacattctatttctgcaataaggattattaccatacggcattctatatcacccgtatttattatgctttcttgttgtccatgcagacggacacttacggagatattcctgtagcctactatgtgaagggagctatgccaccggaagaaaatgtgacctatacacctcaaaaggaagtttataatatccttttccagctgttggatcaggcaataacagagttgcatcaggaaaatcttcctgctgtcagtcagtatgatttaggtgacaatgacaaatgttatgggggtgatgtggacaaatggcgtcgttttgccaatacactgcgtttgcgccttgctttgcgtgtatccaatgtagacccggctttggcccagactcaggcaaaggcggctttgacagaccctgccggtttgatgcaaagtcaggatgacaatatgaagcagactccgaaacgtcagtatatcgccggcggtaatgaaaatatctacgcgttgttgttcagttggaccggcaatgctgtattgtcgaaagaaatggaacgggcttataagaatcaggctttgaaagaaggtgcggcagccgatgccgttactttcaatgagaattctgagaactgttatctcgaccctcgttgtgaagttttatggttccgtcctactccgtttgattcgttgactaccagtccgcttcctacagagaatctgaagagagatttcaacggagtgatgaatggagaaaccaatgtaggcggttcttatctgaacagatattctgccaaccgctgtattctgtcatctgatgccatgaacaaggattattggtggaatctggctcgtgaaattgtctggatgggttatgctgaaagcttgttcctgaaagcggaagcggcattgcgctggccgtcattggtggatgaaacagccgaagccctttatttgaaaggtatcaaggcatctatggattattatgaaattgatgcggacaaggccaatgaatacatcagtcatctggatggcgtaaaagcatttgccggtggtagcaaggaagaacagttggaacagattattactcagaagtggattgccgttttcccgaatggaaatgagggatgggcggaagtgcgccgtaccgactatccgcgttatctgctggctccggtcaatggaaacaattccaatggagaagtggcgtccggcaagcttatcaaacgcatcaactatcctaacagcgagtcccgtaaccccaataaaccgggcaatgtgaaccagggtagccgtgtatggtgggatgtgaccgatacgatgaatgatagaggtcagtggcatactccgaataatttccgctagaaattgctatctttgtatcctagggaacataaaaagaaacaaaatgaagcaaattctatttttattggcagccgtcctgttattgggcggctgtgcggaagagaagaagaccgacgttcgttgggctactttcaatatccgttacgacaatccgcaggacagtttgaacaattggcaatatcggaaagaccgtgtgtgccagtttattaaggaccatgagctggatattgtcggtatgcaggaagtcttgcataaccagtttcaggatcttcgcgcaggcttgcccgaatacgatggtatcggtgtgggacgtgatgacgggaagacagcaggtgaatatgcgccgcttttctatcgtaaggacaaatatgaggtgttggactccaatactttctggttggccgaaaatcccgatagcgtaggaatgatgggatgggatgcggtttgtgtccgtatcgccacttgggcaaaatttaaggacaaggctaccggaaagatattcatggctgtcaatactcattttgaccatgtgggtgaagaggcccgccgtcaaagcgcattgctcattatccgtaagataaaagagatcgtaggcgaacgtcccgcagtggttacgggcgactttaatgtgaccgatgcgagcgatgcatacgaaacaatcaccaccaacgagtttgtgatgaaggatgcttataagacggctgcccgtgtgaccggcgttgattatacttttcatgattttgcccgtatcccggccgaggattgtgaaaagattgatttcatctttgtcactccgcaagttctggtgaagagttgtgaaataccggctgaagtaccggaagctttactttccgaccataatcctcagttggctgacttggaattctgattttttaaataggtgaacttacgccggtagagtctttaaaagggctttatcggtgtttgttattttattctgttgatacttctcattatatgtaatcttctcccatttaaaataattttcctccttcgataagtgtgataccttacttaattgttctatatttgtatcattaatccaatttaatagtatgaagacatacagttactatgtattatttttgttagttgtgttttgcggatgttcccgtcccacggaattaacatcgccggatggcaatataaaattagtattcaacctgaatgaggcaggagcgatgacctatggagtttctgtaggaggaaaaccgttcatcactccttctgttatgggctttgaaggccgtgacgggctcaatctctccaaagattttcagatagaaaatactgagtttaccacaaaggatgaaacctggacccagccttggggggagaataaatctatccggaaccattataacgagatggctgtgcgcctgaaagatccggcgaatacacggctgaccctccgtttccgcgtgttcgacgacggtctgggctttcgttatgaatatcaagtaccccaagtggacagtgtgttcgtgatggacgagctcacttcattcaatctggcgcaggatggcaagtcatggtctattcccgccagttttgaaacctacgagttgctgtatcgtaccctgcccgtcagcaaggtggataatgccaacaccccgatgactttcaaaacagataacggggtatatgccagtattcacgaagcggctttgaccgatttccccgaaatgactttgaagcataccgaaggttgtcacttcaaatcggaactggcctcctggcccgatggggtaaaagcccgttttgccggaggaactttcgttactccgtggcgcagtatccagatagctcccaaagcggtaggtctgataaactccggcctgatactgaatctgaatgaaccttgtgcgctggagggtgatttgagctggatacgtcctatgaaatacgtaggtatctggtggggaatgcatctgggggttgaaacgtggacgatggatgaacgccacggcgctaccaccgctaatgccaaacgatatatagattttgctgctgccaataacatagaagcggtgatgttcgagggctggaatgaaggctgggaaagttggggcggtatgcagacttttgattataccaagccttatgccgatttcgatatggcagaggtggcacgttatgccaaggagaaagggattgaaataatcggtcaccacgaaacgggtggcaatatctttaattacgaacgccagctggacaatgcttacaaatggtatgcagacctgggagtgcacagcgtgaagaccggttatgccggaggactgccgggcggtcacagccatcatggacagttcaatgtacgccattaccgcaaggtggtgcagactgccgccggttatcatacaaccgttaatgtccacgaacctatcaaagatacaggaattcgtcgtacttaccccaatatgatgacgcgcgaaggcgcccgcggcatggagtggaacggatggagtgaaggtaatccccccgaacatcacgagttattgccgtttacccgcttgctgggcggtccgatggattatacaccgggtacttttgatattctttatgaaaagacacgcaattccccacgccgcaagaagtggaatgacttggataaaggaaacagccgtgtgaataccaccttggcaaagcagatagccaattgggttgtcatttattctccgttgcagatggcttcggatatgattgagaactatgaagggcatcctgccttccagttcttccgggattttgatgcggactgtgactggtccgaagccttgcagggcgaaccgggagagtttgtagctgtggtgcggaaagcgaaagataaatatttcctgggagccaccacgaatgaagagtcgcgtacactcaccattccattggatttcctggagaaagataaaaaataccatgccgtgatttatgctgatggagaagatgccgactggaaaacgaatcctacttcgtatcagattaaggacaaagaggtgacagcagccgataccttgtctgtagtcatggcaaaaggtggtggacaagcggtgagctttattcctataactgactgatttaccaaatgcttcgtcctattgcgtttatagattccgaaaggtaacttcatctccttctgaaaggggatgaagttatcttcggttatagccgaattcaacaaccttaatacttagatataaatgaaaacaaccgaaaccccaactccggccagacgccgtagtcctattttttgggttcccaccgcttattttggtatggggctcccttttgttgtcctcaatatggtagctgtactgatgtacaaaggtctgggagtcagtgatgcgaaaatagccttctggacctcccttatcatgcttccctggacattgaaacccctttggagcccgctactcgaaatgtaccgtaccaagaaattctttgtcgtcctcacccagatggtgtcgggagtcactttcgggttgattgccttgtcgcttcatcttccgtccttttttgcaatcactatcgccttgttcgccattgtcgcctttagcggggcaacgcacgatgtggcctgtgacggggtatatatggacgagttgaatgcacaggaacaggctaagtatataggttggcaaggtgctttttataacgtagccaagattatcggtacaggtctgctggtttatctggccggtttcttgaaagatgaatacgaaggtcctgccgaagatgcggtactctattcctggacggtcattatgattgtcctcggaggagtgatgttcgctttgggactttatcatacccgtatgctgccttcgggcaagcatgcccattcggtcacctctttttcgcagagtatggccgagttatggaatgtcatccggaacttctttactaaaaagcatatcgtttattacatctgctttattattttatatcgttttgccgaagggtttgtgatgaaaattgtacctttgttcctgaaagccggtcgtgatgtgggcggtttgggattgacagaacaggagattggcatttattacggaaccttcggagcggcagctttcgtactcggttcattgctgggcggatattatatttccgcacgtggattgaaaaagactttgttctccttgtgttgtgtattcaatctgccttttatggcttacacgctgcttgccattttccaaccgcagagtgcgcctcttatcggcggagccattgtgctggagtatttcggatatggcttcggctttgtgggacttaccttgttcatgatgcaacaggtggctgccggccctcatcagatggcgcattatgcttttgcatcgggtatcatgaatctgggtgtcatgttgcccggtatgatgtccggatatgtcagcgactggctgggctataaactgtttttcatctttgtgctggtggctgccattccggcattcctgatgacttggtttgtacccttcacgcacgaagacaagaaatagagaaaaactattaacctaacaaaaaagagaatatgagtgaattgaagattgcgggcaatccgttgcccggtatgccgtgggaggaacgtcctgaaggttgtaaaaatgtaatgtggagatgtagcgcgaatcccatcattccccgtgatttgctgcctacatccaatagtatattcaatagtgcggtagtacctttcggcgaagggtatgccggagtgttccgttgtgatgatacaaaccgccggatggcgctccatgtgggattcagcaagaacgccgttcattgggacatcaatccggagaagttgcagttccagtgtgatattcccgagataggtgaatgggtgtacggttatgacccgcgtgtctgctttatcgacgaccgttactatgtgacctggtgtaacggatataagggccagcccaccatcggcgtggcatggactacggatttcaagacattccatcaggtggagaatgctttcctgcctttcaaccgtaatggcgtgctgtttccccgcaagatcaatggtaagtttgccatgttgagccgtcccagtgacaacgggcatactcctttcggagatatttattatagcgagtcgcccgacttggagttttggggacaccatcgtcacgtcatgtcacccgcgccttttgaagtaagtgcatggcagtgcctgaagattggcgccggccccattcccatcgaaaccagtgagggctggttgctgttctatcacggtgtgcttcgttcctgcaacggttatgtctatgcctttggatcggcattgcttgacttggacgagccctggaaggtgaaattccgttcgggaccttatcttatctctccgcgtgaaccttacgaatgcatgggtgatgtgcccaatgtatgcttcccttgtgcggctttgcatgatccggcaacgggacgggtggccgtttattatggttgtgccgacacggtgaccggtctggcattcggttatattcccgaaattatagaatttaccaaacgtacttctattatttaagcaccgtttgtgctgttctcattcgaaaacagaggatgtgtcctgtggctgtcacttcggcccggacacatcctctttgtctttttccgggaaagggaactgtctggttataaagcggcttttaagtgctgtcttctctttggctaagcgttttcttccggatgattaagggcttttatactgaaaccttctacagtccattgcaatggactgtagagtctgacgtaatggactgtacggtctgctacagtggactgtacggtctgcaccggaagactatagaagataataggaataaagaccttagttgtatggagaaaaaggcttatgtttgctgttgaaagaggttaggttccgatatggaaagacatcagaccggtataccggcaaattattcacaggcagtcctccgcctctcgatttttctctttatctttgccggaaaaataaagcagtccatgaaacgacccaacgtacttaatttaacctgccctgccatccccgtagttcggatcggttttgtcggattaggaaacaggggtattcttgcacttgagagatatatgcacctggaaggcattgaggtgaaagcgctttgtgatttgcggaaagagaatatagagcgtgcagagcatatcttacgggagttcggccgtcccgaagccgagaactattcggaagaagggatgtggcgcaagatgtgcgaatgcaaggagatagacctcatttatatttgtacggactggctgactcatactgatattgccgtttatgccttgcagcagggccgtcacgtggcgttggaggttcctgccgccatgagtgtggccgattgctggcgtttggtggatacagccgaagaaacccgccgtcactgcatgatgctggagaactgttgttacgatgcatttgccctgactacattgaacatggtgcagcagggggtgttgggcgaaattactcatgccgagggatcatacatccatgacttgcgcaagcattattttgcagacgaaaaagcgggtgggtatcacaatcactggataaagctttacagccagcagcatacggggaatccttatcctactcacggcttgggtcctgtctgccaatggatgaatattcatcggggagaccgtatggagtatctggtttccatgtcctcgcgtcaggccggtctgtctgcttatgccggacaggtgtttggtgcatcctccgaagaagcggcgcagagttatgagatgggggatgtgaataccacgctgattcataccgcaaaaggaagaactatcttgttgcaatatgatgtgaccactcctcgcccgtacagccgccatcagacggtgtgcggcacgaagggattcatgcagaaatatcctgttccctgtcttctgctcgatgaatatggcaaggaacctttgtccggtgagcagtttgagcggatgatggagcagtataaacatccttttacggcagttatcggcgaggaggcgcggcggaagaatatgccgaatgagatgaattatatcatggactaccggcttattcattgtttgaggaacggtttgccgttggatcaggatgtgtatgacgctgccgaatggtcttgcattacggaactgagcgagcgctccgtgcgacagggcagtgtaccggtggagattcccgatttcacacgagggaactggaaagagagatagtgctgtcagctctttagcacaggggggataaaccgaatggttctcacctgaagatgaaaagaacgctgatatgttaatctccaggtgaaaatacaggcttgtttattgaactcccattgatgttatcgtttcttgtcttgtggtgtttccactattatttttccttctttcatggtgaactgtgcgattttcaaatcattcaaggcgtccagtacggtattcaccgggagttggcggttgatatggaaatagatgcgttcgtccagtaacggacgtgaacggaatacgatgctgatgttataccatgaacctatatcttgcatgacttgcctcaagtcggtattgtcaaaagaaaattcattctccgcccatccttttctcttctccgtatcaactcttttcaattggagttttccttgtttatccaaggatatttgttcccccgggtgcatttccttactttgattgcgcttggtatgacttacattcactcgtccttgatagaggatgacatccggcgagtaacggggataggctttcacatcgaacaccgttcccagtactcgtgtttgtagttgctcggtgcatactataaaggggcgggaagcgtctttggctacttcaaaacgggcctctccgcttagtttgacactgcgaatggtatctgtaaactcctttagatactccagacggctgtttgcgctgagcaataccttgcttccgtcgcttaattgaacggaggtaatggtagcgggcggggtgcttacaattatccttttcccttcttcccgaaaagtaatttcctcaggaacttccagtgaagtgaagacttccacttcctgcggctcaggttgtagtaaaggctggaatacaagtaccaaggcgatgacagcggcggctatacctggtatcgttattcgtcggatagattggtgtctgatacggtgacgacggatgaatgtctgccaggctttccgggtttcgtctgcggtgggaatatcccccaatgcttcaccaaagagttgttccaattgatggtcattccaagttccgttttggggggagtcttggttatggggattctttccgttgtccggatggatgtggtcatttgttgaaaactcctttttcattgtttatcctcctttttcagtatcgcttcgcgcagagtccgcaatgcttttgatatatgttttttcacggtgtcggggctgattcccaattcgtcggctacctgttgatatgtttttttctcccaatagcagcttcgcaagatggtgcaagtcggttcgggcaaactgcgggctatgttttccgcttgctgcaacagtgcctcgtgtgcgcggtaaccctgattcatttccgcacgggtggcttcgatgaggcggtctatgtgttgctgttccacattcaaatgcttcaagcggttgaggcatccgttacgcacggtggcatagagccaggcgctacgggtgttttcctttagttggtcgaactccttccaggcttgttccatggtttcgcttactatgtccttggcttcttccgtattgctcatcagggtggtagcaaagcggacgaggcgtgggtacatttctgcgaacagtcgttcgaagtgctcttctttatggtttcttctcctgaataaaatctgcatgtttccttgtcttccgtgaacaaaggtacggaaatttccttttctccgctggggttacagacgattcttttcgctttgtccggctccggttcctttatatttgctcttggtggcattgaatttataggatacttggaggccgaagcgttggaaatcccggtaaatccgattttccatataggcatctatgccgtataaatcaaaatggaaataccctgttctaagaatatcattggcggtgaatgttatggtgagtgtctcttttaaaaaggatttggaaaggcgtgcattgatttgtccttccgtgcgcgttacaaaaaatccttgccgggaagcggtggagagatatccttccatattgaagaaccagcctttgggaaggttgaagttgttgtccagactgatatagaaacggggttggttccggtgttcggtgattcctattttattcgcattcatgtccaaaaaagccatattcacattgagttgtggttcccaacaccccagtttgggagaggcgttgaaactaatgccgtaattatgggttgtaggaatggtctgtgtggcaaataagaggacgcccggatgtgtatcttccttgtagggcataattatattggtatacatattgagaatacggctgaaataggctgagaaatagagccaattccaagaggcgccggccgaaaagcgatgcgtcttttgggttttcagcaaagggtttccttgagaatactcatatttgctgcgatagcggatggaattggtcaataggctataatcggggttatttttacgtaaccggtaagagaggctgaaacttttgccattgtgtgaccaactggcggccaatacaggaataatatcattataggtagggctttgtgcatctatccttatccctttttcataataatctgtttgttgatgttcataacgtattcccatattcagtttccaatggcggatggatcttgaatagtcagcaaatgcggcatatacggattgtttgatgtggtcgtcggcatcagcagagaaaccgttttgggtaaagatatcatggcggttggtaaaagtttcttccgtaccgaatgaaaaacgtccgttccataaaggggcactgactaccagcttggcggcatagagggagctgcgcatacgactgtctgcttgcacggttgcatcgtcattattcatggcgttctggtcggaatgcgagcgtttgaacaggtaatcggcgttgaagtcaatattccatttgcccagttctcctgcgtagtaggcgtttgccgcgtgatcccaacctgtatgtatttgttctgctgtagtaaagtttatccggtcggtttcttcatcgttacgtctggtgacggttttaccggatgaatttctgtctgcattccctattccggtttcgggcatatagcgcagaccgaaagaatggtgttcatccggttcataattgaatcccagctcaccggaaaaacgttggctcttatgggtctgcacatcatttttgttggtttgccaaatggcggaacccttgatgcggttcatatttgtggtttttccatacgagttttgctgtgccatatatccctttacaaagagatccagaccgccggtgcgataatttaatgccatatattcgttggcgttggcggaatgtccttgtgaataagtcgtattgaagtggccgctcaacccttgtccgcgccggcggatggtgcggaggcggatgacggctgctacgtccgaggcatattcggctccgggagtggtgatgacttctgcggataagatttcgttggcccggatacggtccagttctgtcatgtcacgtactttcttattatttatatagattacaggagaaccgcatcccattacattgtattcgccgttatggccggtgacgaaaggaagatggggcaacatttctgcggcagaccccattcgggctagggaagttcctgccacgttggcttttagtccgttgggacccacttctatcatggggcgtcgggcgctgatggttacttcctgcatcagttgggtgtcgggaagcaggtgaaacgtaagagtagggtggtaaggttgcacttccgtcttatagcctatataagaaacccgtatcaagtaaggtatcccttcttccgctatcatcaggaaacttccgtcttcacgggtgacacatccgtttacaaaggtggagtcgccgggagtcaataagagtacattggagtagggcagcggttcattcttttcattggttacttgtcctcgtatttcggtaatgcgtatgtctcttccctttttctgtatggcgaagtattcttcccgttctttacaaatgaaaggaatgccgttcaggacagtgccgatggcttcaagttcggtcttttgccggatggaggctgtaacccggtagctttctgtttcgttataggagaagataatattctttccgccttccttttcgattagtttaagggcggcgggaagtggtttgtcctttaattctatagagaattgccggggtgtttgtgaatgaagcggaaggatgatgctgaataatacggtcatgatccacgctgttttcaaatagccgtctggtctcattttactagtgtttaattgttctttatgagtaatacaaccgaggtttgtaatcgggtacggtaaaataaggaaaaagattcgatgggttgtcggaatggattcccgtggttggttcatgcgaagggaacggatataactttatgaagaatttatgaaggattggaataagaatggttcattgtaatggcttgaggttcaaagtcttgcccgcgtatgaagaatttgaaggaaaaaaggtggaaaatgtgttttgaagagatggttggggcagatacttgtgtgatacttgttttatgaaaattgtagatggcagtagctatgaagaacagagggaataaaaacaaggtggctgaaaacaaattcagccaccttgtttttattgtttaacctgtgttttattctatctcgacgctatgttttaccggagtcaggatgaaagtaaattcataatcaccgtagggcaacatatattgaggcaacggcagagctccccagctgtttacacaacccaaccccatctgagccttgtcgatgatcaggttggtcaggtctgctttctgtacttcgggcgagtgacgctggtctttttgttcgccatcatccagtgaacagatggtataatgcaaagcggatgcagagaatggagcatcacctactaccttcagtccgttaccgccggcattcagttgcttccaccagcggatatcggtcttggttcctgtttcctgcggacggatataggagtagaattgttcatccacactctggcgataaatacccaagtctgtgctgtggttgcggtcactgtagttttctaccggaccacgaccataatattctacggtttcaaaacatttaggcatctgcatttgcataccgaagcggaacatcggagatactttggcattcttgtcggctgtcatcttttgggtcactttgatggctccttcgttgttgatgacataagtcagatataatttggcggaaacattcttcatgtcatattccgcattcactactatctggtcattttctgttttggaattcaaggaaaccagtttcaatcccgggtttttccatgcggcatatctgttttgcaggccggctcccatatcattgtctgtcggggcacgccagaagttaggggtcagggctgcgccttctttcagcatttccgttccgtccactgcatatttgcttaagtaaccgttctgtttgttgaactcggctacgaagttattgccttttacgatcagataatgatattggttgtcgatgatttgcggaacaacggtggctacattggtcgtttccacgttcttcaaatccatagacggtgctttgtaatcattcagtgtcaactgattcttggcgacggtgaaacctgcgggcagcaaaccttcgcggtttttcagtttgtaggaaacgttcagcaaccattccttgcaggtgcaggtcttgccgatattcaacgtaatcttggctgtttcctgaggagcgacttttaaatcatccacgcgtccggtgcggattacttttccatctttcagtacttgccattccatatagtaggcggacagatcacggaagaagttctcattgaatacatttacttcccctttgcttaaatcggcgggagtagtccagatattttggtaaaagtgacctacttcatacatgtgcggattaggaacacggtcggggctgatcaaaccattgtcacagaagttattgtcagaagcgtcaaaacggttgaaatctcctccgtaagcatagatcatcacgccgtcttttcctttccagcggcaggactggtcaacgaaatcccagataaatccaccttgcagattcggatatttacggatcaaatcccaatattctttgaaaccaccctgcgagttacccattgcatgggcatattcacactgaatcaatggtttggtagcatcggtacgttgaccatatttttccatgccgttataatcatagtacatcggacagaagatatcggtatgttctttctggcgtgcttgttcatattggcaggcacggctggggtcttctgctttaatccatttatagcattgttcgaagttggggccgtcaccggcttcattacccaatgaccagaagatgatgctcggatggttgaatccgcgttgtacattgcgctggttacgttccagatgggctttcttataagaggggttcttggccagcgtcttgtcgccgtagcccataccgtgagattctatattggcttcggccacgacgtaaataccatattggtcacataaatcgtaccataagttgtcatccgggtagtggcaggtacgtacagcgttcaggttgaattgcttcattatctggatatcctgtagcatacgttcgggagatactacatagcctccgtccggatccatttcgtggcggtcggctcccttgaacaggactgccttaccgttaaccaagatctggtcacctttcaattcaatcttgcggaaacctactttgacaggaatcacttcattgctgccctgcatgctggcacgcaaggtatataaataaggtgtttcggcactccactttttggggttctctacgttcatggtcaccagaccggatttgttggcggtagcggttgccacttgcttgccttgtgcatctaccagttccaaatcgactttaccactgcctttcaaatccagattgacagccaggctgccgttttggtaagctgcgtccaagtcgggagttacacggatatcttgaatgcgttttttgttgcgggcatatagatagcagtcacgtcccacgccgctataccggaagaaatcctgatcttccagataggtaccgtcgcaccagcggaatacttggaaggcgatcaggtttttctgacccggttttaaatatggagtcaggtcaaattcggcttccagtttgctgtcctcgctgtagcctacataacgtccgtttacccacaaatacatattggaggtaaccgaaccgaaatgggcgataatatcttttcccttccatgaggcgggaactacaatttcacggcggtaagaacctacatggttattctctgtcggcacttcgggagggttgttctggaactggttacgccaggcatagcctacgttcacataaataggatcaccgtatccgttcagttcccatacggcgggaacttgcaggtcatcccagcctttgtcgttgaagccggttttccagaaatcagtcggacgggagtctgcatcctttacccagttgaacttccaggttccgttcaaagtcatgtagttagttgattgttttttgtctgctttcttagctgcatctgcattctcaaaagcaaagtagttcgtgtgcatcggcgcacggtttaccgcatttatttccgggttgcgccattcttggaaggtctgtgcgcctgctgtaagggcgaggactgtgaacagacctgtcataagttgtttcttcatgctattattttattggttttgtgcaaatatagtgaaaataatagttaccgatgggacataaatcgggcaatatttgttataattgtgaatgatttgtgttctatcctaaaaaattatggcatttctgaggcgtatttggaataaatggcagaatttactgcatgatgagaaattaaagcataaaatatatgtgattatttttgaaagcgacacaccgatgggaaagttattcgatgtggcgttgatagggttcattgtcttgagtattctggtggttattgccgagagtatcaagagttgggataccgttatcgggccttatctgcgggtgtcggagtatgtttttactttcttttttacgttagagtatatgttgaggctttattgttctccccaaccgcggaagtatgctctgagttttttcggtatagtggatttgctggctaccttacctctatatataggctggcttttcggcacggcacgttatctgctggtgatccgcactttccggttgattcgtgtgttccgtatctttaaacttttcaattatctgaatgaaggtaatttcttgttgcgttccttggtgttcagcagtcggaagattattgtttttttcttgtttgtactgatattggtgacttcgatcggtacattgatgtatatgattgagggacagcggccgggcacttctttcaataatattccgaatagtatttattgggcgatagtgacgatgacgacggtaggttatggggatatcactccggaaactccgctagggcgcttcctttcggccattgtaatgttactgggctataccatcattgcagtccccacaggaattgtttctgcgtctatgatccaggaacatagacgcagggtggccctgaaatgtccgcattgtggtaaggacggacatgaggacggggctgcttattgtaaatactgtggaggaaaactggtaaattgattatggaatgctgtatgatagaaagttattctatcacccatcgcttatcatgcgccaccgtctttttcggatcataagtcattccttctttggtagggatttttatcacgtaagtccgcccgctgtggttggacaaggatgtttcccgtaaccagggattcatattctttaatatggccagattgattcctttgctgcgtgcgaaacgtgccaagtctgcaattcctttcgtcacagtgatttccgtataaggaataggcggatacaaatccgatgcacgcaggcggaaaccgaaagtagtgggggcattgaacaattgtttggcggcaagaatgcggtacacataccgggcagtctcttctaccagttgcaaatccaacgagtcgtccacatcctgtttggccagttggctggcaatgcgtgcctgaccggcattgtaagaggcggcgacagccacccagtccttatattttgcatacgcgtctttcagatagcggcaggcggcacgggtcgctttctcaatatggtaacgctcgtccacattgttgtttacctccaatccgtaatcccgtcccgtaccttgcatgaattgccatagtccggcagctccggcagaagaacgggcggtgggattcatattactttctattaccatcaggtacttaaaatcatcaggtattccgttttctttcagtatgggttctacaatggggaaatagcggttggcttttttcagcatttgcaaggaagtactgtgcatataggtgaatgccaatagttcacggtccatacgctcgtggcggtcaaagcggctcaaatcaatggttttgccacagaactcaatactggcgggaacttcgggactactgtatttcaatgccgtaatacctgaatcttcccgtatgatagtggtatcttcctgctccgtttttggagtagcgcaactgctgcttactaaggccggtgatgcaactacaatgcaaaaggctgccacagcagccagattgatggttatttttctcattttttctttattcgttttcattctctttttcttttccgccccgtccgaagttacgatattcggtaggggtgaaattggtacgctttttaaataccgagaaaaagtgttcagtagaggtataattcaattcataacatatctctttcactgacatggaactttcaatcaacagctgcttcgctttgcgcagtttcagctcttggaaatacttggcgggcgcataaccggtgtattctttgaatactttgcggaaccaggaataactgattcccaatttcatggccagttcttccgggtctatatccttgtacacattttcgtgcatgatgattttggcactttctattttttgtgccgcattgtccacctcatagcgtttgttctgcgagatagcaagtacggctcccataatgtgtaaaacgatgccggacaaatattgttgcgctgcggtcttgtctgcttccgctacttccagtgcacgggcaaaaagactggccagttcttcattgataccgatatccagaatctggctttcttttgagataaagctgttttttaccagattgtctataatcgggccttcaaaaccgatgtaatattcgttccatcctgtcttttgcagcggcgcataggtatgccactgtccgggaaacaggaaaagtatctgccctttggatatgtcgacagacggagtagtatcgctggcgaaagttccccgtcctttagtaatgtataccaactgatattcatgcagcacacgtcctttctgggccgtgaaataataagcgtccgggtggttgcgtggtggataaacgctcccggccctgatggcctggaatccgacggtagtcaccgacaagccgaaacgcttgtcacgctcattgacaattaggtatttaaaatcagcgccttggtcgttgtaatgcatgtttctctgttttaaaattaggtcacacttatcggcaaatatacaattttttatcttaacagcctctaacctttttgttctaagtgtttctggaggtataattttgacatctcccttttttatttatggttcattctttcttctttagatccatttctccggagaaagaaatagattgtctgtttgtgggggtgacctgtatgttactgctgccattgggataaatggtgatattgtaaaggtaattgtcttcctcgttccgtacttttagtgtgattttagcatttccctttttgctatatgttgaagtatattctgataaaggagcactaaaatttaatccttttccacctccgtaaggaacgttatacgccactccgaaataaggcagataggaatataccgaatcgtttcttatttctaaagaataatcggaagtcaggtgtttgctgcctcctttcataggcattacccggtccacattgattttgtatgcctttgcgtcaacagcctcgcgtactgcttgttctctttgttgtttcttctctttcttgttctgagccgttataggtatcatactgcctgatagaaggagacttgccaaaaggaataatttatttgctttcatatctctctgtaggtttagtgaatctgtccttgccaaagatagccaaaaagaatactcattgttctgaaaaaaacataagataatcaaactgtcaatgagttaagtacgcgatttatcttttgagtcccgataataaaaaagatgatttgtccccatgcggagtcaaatcatctttaaaatctccccattaggggaagactataaaatattatttgggtagattaaaagccacactcatttctttcatctgttcctgactcataccgtccggctcaaatcccatattcttggcagcgatgtaaatcaatgcggatttatttaaaacatcgatttggtcgaatgcggccattacgtcacggtcaacggcaaaaatgccgtgtttttcccacataacgacatcataatcggctagttccttgatggttgcatcggctaattctacagaactaggcaattgataaggaatcatgcccaggccacgcggacagaatgcttttgtttcaggaatcatactccataacaggttggttgccacatctttttccatgaactttttgttgtgagacagggcaatcagttcgatggggtgtgtatgcacggatgctttgtaaggagaacctatgctgatgaggtaattgtgtacgctcaggtgggagggaacttccgaagtaggttgaaccggtttgtcggcaatgatgacatagctggcacagtcatccaaaatacggatgacagaaccgttgtccataggccaacgcgccaaatcccgcatacgcatattggttcctttgcaataaaaataacagcctttcaagtgaggcagtgttacaccgatttgttttacttcgctgatagcgggcatctgacggatttcatcgtctacatattcggtgatattgacggtgatattacctccgttacgttcggcccatcctttttgccacaaatatccggctacttcggctactttattcacctctttggccaattcagggcgattgtctaagattgatttcatatcttttttatttgattgttcataggatattgttattcatctttttcattctgaataacagtatgctacaaatatagtaattcttttaaaataaattaggaaatacgagagaaaagataagaactaccagtccggttatcagaacagtgatagtccgggtagatacgcctttccattcttttaataaaataccccatacgttactgaaagtaacattcaaagccatcaatatacaccatgagaaagctagcagtacaggactttcggtcaggaaacttttacccatttccaaaccgaagaattgcatataccacagtactcctgccaaagcacagaatatcaagttatttccccatacattgcttttggcataatcactcatggttttgttggctatattttgttgcagacagtaaaccgcattggtcaaaaagcctcccaatgttactaggaagattacgggaagtcctgcataaagcccttctacgcctcctgccaatgcagcttctttgatgggcgttccggcatcgagtcctaaagcgaaacaggcactcatcacacctgccagtagggctaccaacagtcctttggtcagagcgaaatcttttactgccgcgcgtttttcttcttcactcatgtttttggcgcgaagactgccggcatatcctataatggcaatacccgacaaagtgatacatactcccagtaaaagaataagtccgtttccttcaaacaggttggttccggcaaaaatggcgggaaaaagtgtgccgaatccggcacaggtgcccagtgcgatactttgtcctaaggccactcccagataacgcatggaaagaccgaaggtgagaccgcctactccccataatataccataaaagatgctcatcggagcacctcctgttccccaaaggtcaaataaactgcttccttgagggatacctagcaacgcacccaataacgggaataccagccaggcaaatacaccttgtagcagccagaaactttcccaactccattctttcactttttttataggtacgtatgaactggattggcagaaacttcctatggcgatgatgattaatccgataatgatttccattgtttatattcttttaggctacaattatgttcccggtaggggcagcacttgaggccgcccctacggaagacaatcttgtagttggatattgattagcgtttcgaagtgacttctgcttcgtatttctctacttctgcaatgaactcttcgcctacgggtacattgttcttcaagcagaacatatcccatacagcattccaaggcaaagctttttcttcttcgagcagagccagacgttggaagccttgtccgtttgcttcatattcgcgtagtttggcaatcggttccaataaagcgcgtaccatacatttttgagccgcgcggctgcctataacgtatgcaccaatgcggttgatggaagcatcgaagtagtcaagtccatagtgtacacgatccaaggcgttgcaacgaacgatttcgctgaataaatccatagtcgggtcgtccatgatggttacatggtctgagtcccaacgtacggggcggcttacgtgcagcatcagttcggggacatacaacaacaaggaagaaactttgtcggcaacactttctgtcgggtggaagtgaccggtatccaaggtaatcattttgttgttcttggcaccgtagccaatatagaaatcattagaacctactgtatagctttccagtccgataccgaatacttttgattcgatacagtctttcatgttcttatattctgttgcgaaaatctgatccagagagtctttcaacaaagcacggtatttcatgcggtttacagtgatgtctttgctgccatcgtgtacccacaggttcatgatacaaggatcgccttgggctttacccatctcttcggctacggcacgacaacgtttggtatgctcaatccagaagttgcggataccttcatcgggatttgataaagacaagtcaccgcttttaggatgagagaatgaagtagagttgaaatccagtttcatgttgttttccttaccccattcaatccagcttttgaagtgttcgggttctacttcgtcacgatctacgacttttccttggaagtcgccataaatttcgtgcagattcaaacggtgagtacctggtatatatgaagctgctttcagaatgtctgcacgtagttcgtcgatgttgcgggctttgccgggatagttacctgtagcctggataccaccggtcaatgaacctgcctgaacttcgaagccggttacatcatctgcttgccagcaatgcagtgacagatggaaattctgcatggtttccattactttttctgtgtcgacacctacagcggcataacgttcttttgcgatctcatacgctttattaatcaattcttctttcatgatattatttgtttgtttaatgaataaatttcaaggtgaatattaaatatcttctctataatgagctaaatacttcttatatgcttcttcccattcttctgcttgctggggttcaaaagaaacggtttctatggaagtgctgattagttggcgcatagccgcgatatcgcttaccagcccgttggcttttgcctgtaacataatgttaccgatagctgttccttcactgggacctgctataacaggtacgcccactgcattgcaagtgaactggtttaacagattgtttcgtgagcctccaccgataatgtgcagcttttcgatggggaacggggccatttgttgcaaatagccgaatacttgtttgtagcgcagggcaagactgtcgaatatgcaacgggtgatttctccataactctgtggtacaggttggttggtttctttgcaataatgtccgatggcttgaatcatagatgtcggattggagaagcagggggcatcgggattgatgagactgcggaaagcgggaactgtcagagcggcatctatcagttctgtgtaagaatagttgttggttgcttcccattctttgcgacaacgctccaacagccacatgccacagatgtttttcaggaaccgggtagttccttccacacctccttcattggtgaagttctgttcaaagctttccttatttataatggcatctttcacttcaattcccatcaggctccacgtaccggaactcagataagcgaatctttcgttttgtgctggtacggcagccacggctgaacctgtgtcatgaccggcaacggcaatgactggaatagctcccagacctgtgattttctgcacttcttctgtcagtactccgataggctctcccgggaaaacgaaacggccgaactgttcttccttgatatctgctacatccagcagttccttttcgaagcgtttggtgcgtggattcaacatttgggaagtagaagcgatggtatattctgttaccattttaccggtcagcatatagcttaaggcatccggcataaacagtattttatcggctgcttccaaggccgagcaatgattgcggtggagtgttgacaattggaacaaggaattgaaattcataatttgaattccagtgatgtcatatactcgttcacggggaatatgggtaaaatattcttcaggtgcacctgttgtgtgagggtcgcggtagcaataaggattgcggagtaactctccgtctttgcccacgaatacgaaatccaccccccaagtatcgataccgatggaccggataggcagattgtctttggctaccactttcagtcctctgataatttcattgtataaggcgtaaatatcccaataacaatgtcctccggtttctataatatgattagggaaacgagtcagttctttcaactccattttgccttctcccaagcaacctaagatggtacgtccactggtggcacccaagtctaccgcaaagaaataagtgtgttccatgcctttatttttgattttaaggaattaatagtgatgcaaaaatagtttattccccgaaagtcgtccttgtttttttgatattataactgttggatttggttgtacctgccgtaaaacataatattaccgtctttttaagaagatcgcattgaaaagaagaatttggtgtgattttggtttactcttgggatgatagataagagctttattgaaaatatgcataaagtcgcaaaaatattctcttttttgtatctatattcccgaatattctgtaattttgcagccgaatcagaataattatgcagtatgaagagcaagaatagcagacttgatgccattaagattattatttcgagcaaggaagtaggtagccaggaagagttgttgcaggaattggcgaaagaaggattccgattgacccaagctactttgtctcgtgacttgaagcagttgaaagtggcgaaagcagccagtatgaacggaaattatgtatatgtattgccaaacaataccatgtacaaacgtatgactgagcaacattcggccagtgagatgttgatgcataatggatttatttccattgaattttcggctaatctggcagtaatcaagactcgtcccggatatgctagtagtttggcttatgatattgataaccggaactttgatgaaatattgggaactattgctggtgatgatactattatgcttgtcattcgtgaaggctgcacaagagcgggagtgaagaatgcgctttcattgattataccgaatatacaataaaataatatagataaaaaaggaaatggatgctaaacaagtggatgtgatggtggcagatgcctcacatgaagtttacgttgataaaattttagatactattagagaggcggctaaggtacgcggaacaggcattgcagaacgcacacatgaatatgtgactacaaagatgaaagaaggaaaggcgattattgctttatgtggagaggattttgcaggatttacctatattgagtcatggggaaacaagcaatatgtagcaacttcgggattgattgtgcatcccaattatcgtgggatgggcttggccaagcgtataaaggcggcttcgttccgattggcacgtctgcgatggcctaaagcgaagatattcagtctgaccagtggtgcggcggtaatgaaaatgaatacagaactgggatatgttcctgtaactttcaatgaactgactgatgatgaggccttttggaaaggttgtgaaggctgtatcaatcacgatatattagtggcaaagaaccgtaagttctgtatttgtacagccatgctttacgatccggctttgcacgaagaagacactatttaataaattaaaaattaagaattaaaaattaaaagatgactgcgcgttcatgtacttatttctcagttttcaatttttaattctcaattaaaataatatcattatggaagaaaagaagaaaaaagtagtagtagcattcagcggggggcttgatacctctttcactgtaatgtatctggctaaggaaaaagggtatgaagtgtatgcagcttgtgcaaacacgggtggtttcagtgaggagcagctgaagcagaatgaagagaacgcttacaaactgggtgctgtgaagtatgtgacattggatgtgacccgggaatactatgagaagagcttgaaatatatggtattcggtaatgtgctccgtaatggtacttatcctatttctgtaagttctgaacgtatcttccaagggttggccatagcgcgttatgctaatgaaataggtgcggacgctatcgcacacggctcgactggtgcgggtaatgaccagattcgcttcgatatgacttttctggtattggctccgggggttgagatcatcacattgacccgtgacatggcattaagccgtcagcaggaaattgattatttgaatgaacatggttttgccgctgactttacaaaattgaaatattcttataatgtaggtctttggggaacttctatctgcggtggggaaatattggactctgcgcagggtttgcccgaaagtgcttatttgaaacaggtgaccaaggaaggaagcgaacagcttcgtcttacatttgaaaaaggtgagctgaaggctgttaatgacgagaagtttgatgatcctatcaaggctattcagaaagtggaagagatcggtgcaccctacggtatcggccgtgacatgcacgttggggataccattatcggtatcaaagggcgtgtaggattcgaggctgctgctcctatgctgattatcggagcccatcgtttccttgaaaaatatacgttgagcaagtggcagcaatactggaaagaccaggttgccaactggtatggaatgttcttgcatgaaagtcagtatctggaaccggtaatgcgcgatattgaggcaatgttgcaggaatctcagcgtaatgtaaacggtacagctatcttggaactccgtccgctttcattctctactgtgggtgttgaatcgaaagacgacctggtgaagaccaaattcggtgaatatggtgaaatgcagaagggatggacagcagaagatgccaaaggctttatcaaagtgacttctacacctttgcgtgtttattataataaccacaaggacgaagaaatttaataagtatgattaaagcaggaattatcggtggggcaggttatacggcgggcgaattgattcgtctgctgattaatcaccctgatgtagacataaagtttataaacagcagcagtaacgccggcaataagattaccgacgtacatgagggactctatggtgaaacggatttggtttttaccgacgaacttcctctggatgagattgatgtattgttcttctgtacggctcatggagatacaaagaagtttatggatagtcacaatgtacccgaggatttgaaaatcatagacctcagtatggactaccgtatcaagagtgatgaccatgacttcatctatggtttgccggaactgaaccgtcgtgctatctgccatagcaagcacgtggccaatccgggatgttttgccacttgtattcaattgggtttattgccgttagccaaacatctgttactgaacgaggatgtaatggtaaatgccattaccggaagtacaggggcaggggtgaaaccgggtgctaccagccatttcagctggcgtaataataatatgagcatctataaaccgttttctcatcagcatgttcccgaaatcaagcaatcattgaaacagttgcaaaacagctttaatgctgaaatagattttattccttaccggggtgatttcccgcgtggtatctttgctactctggtagtcaaatgcaaggtggaactggaagaactggtgaagatgtatcaagactattatgccgaggattctttcgttcatattgtagacaaaaatatagatttgaagcaggtggtgaacaccaacaagtgtttgattcatttggagaagcatggcgataaactgctggttatctcttgcattgacaatttgttgaagggggcaagcggacaagcggtccataatatgaatctcatgttcaatctggaagaaaccgtagggctgaggttgaaaccgtctgctttttaataaagaagagtttatgaaattatttgatgtatatcctctttttgacataaacattgtcaagggaaaaggttgtcatgtatgggatgatcaaggtacggaataccttgatttgtatggtggtcatgcggttatttctatcggtcacgcacatccgtattatgtggaaatgataagcaagcaggttgcacagttgggattttattccaattcggtggttaacaagctacagcaggaagtggcagaccgtttagggaaactttcgggttatgatgattatcaattgtttttgataaacagtggggccgaagctaatgaaaatgcgttgaaactggcttctttttacaatggtcgcaaacgtgtgctttctttttgcaaagcatttcatggacgtacttcactggcagtggaggtaacccacaatccgaaaattatagccccaatcaatgacaatgggcatgtgacttatctgcctttgaacgatatagaagcagctaaagcggaattggcaaaaggagatgtctgtgcggtgattattgaaggtattcaaggagtaggcggtattcaggttccggaagtgaaattcttgaaagaactgagtaaggcttgcgaagaagtggatgcagtacttgttttggatgaaatacaatccggctacgggcgtagcggtaaattttttgctcaccaacatgcaggtatccgtcccgatatgattacggttgcaaaggggattggcaatggctttccgatggctggtgtcctgatcagtccgaaattcaaacccgtatatggacaattgggaaccacttttggtggtaaccacctggcttgtgctgctgctatcgcggtgctggatgttatgaaaggtgagaacctggtagagaatgctgccaaggtaggtgctcatctgctgaaagaattgaaacaattcccacagattaaagaggtgcgtggcgaaggtttgatgatcggtatggaatttgacgaaccgattaaggaactgcgtcagcgtctgctgttcgaacagaaagtatttaccggagtcagtggtacgaatgtaatccgtctgctcccgcctttgtgtctgactatggctgaggctgatgaatttattggatgctttcgtaaagtgttggtataagctggagattcaagagggataataatcagcgaaagaaaataaggtctcgtcaggaaacatttcggttccggcgagactttttgatttcatcttcttcaaagtaattttatttttagtttttcataatacgttcttctccttttttcccttatctttgtagctatagacttaatctttaataatatgaaagtagcaattattggtgcgggaaatatgggaggggccattgctcgcggccttgcccaaggcactatcattccagcgagtgatgtaacagtagccgatccgttcagcggaagtctggaaactctacaggcggattatccggagattaatgtgacaacggaaaatccgaaagcgataaaggatgccgatatcgttattctggctgtaaagccgtggttgatagaccaagtgttgagtgtggttcatttgactccacggcaagtattggtttctattgcaggtggtgtaactttcgaacagctggtaaagagtgtaggtccggaacagaccatattccgtttgattcccaatactgctatttctcagttggaaagtatgactttgatatccagtcgtaacgccagtaaggaacaggaacaactgatgctggatatctttaatgaattaggattggctatgcttattcctgaaagtcagatggctgctactacggctttgacttcatgtggtatcgcatatgtcttgaaatatattcaggcagctatgcaggcaggtattgaattggggatctatccgaaagatgcacagaaaatggttgcccagtctgtgaaaggagccgcttccttgatattgaataatgatactcatcccagtgtggaaatagataaggtgtgtacgcccggtggtatgactatcaagggtattaatgaattggatcacgaagggtttgactcagcgatcattaaagcaatgaaggcttgtctgaaatagaagcaacctcatggaaatgacgtggataacacggttctcgtttttgtgtattgtgttatctacgtttttatagaaggtacttttgcaggtttagtataaaaatatgttcacttttttgtttccgatttcatatttcatgttatctttgctatacaagatcagatctaatgtgaaagagaaatatgataaacacagaattgttcaaagaagtgtcacctttgtcggccaaggattgctttattttgatagagcgtcagaaatcgaattttaattttcctatacatatacatcccgaatatgaactgaactatattgagaatgcaaaaggcgcacaacgcattgtgggagactccatagaagaaatagaagaagaggaactggtgctggtcaccaatcctcaattggaacatgcttggagggattataacaacaagccgcagaatatccatgaaataaccattcagtttcattccgatctgctttccgaccagattctgaacaggaaccagatgatcagcattcgggaacttttccaccgtgcccgtaaaggaatcgtgttcagcagggagactatcgcgaaagtccgtccgttgttgaaaacgctgtcttgcgagaacgatagtttctattccttgataaaactgcttgttattcttcatgaattatcattggacaaagggatgcgtgagctgtcaaccgggcagtttgccattaactctgtttccaaagagcatactaacgagaagttgaacaaggtgctggattatgttcattttcatttttcggaagtgatccgtcttgcagatgtagctaaaatggtaaatatgagcgaggcctcattctgtcgttttatcaaacagcatacttccaaaagttttatcgatttccttactgatatccgcttgggggccgcttcacgtgctttggttgattcttccttgtcaatagctgaaataggatatgattgtggctttaataatctatccaatttcaaccgtatctttaaaaagaaaaaaggagtgactcctaaagagttccgtgataattatcgtaagaacaagactatcatttaaaaggttcggccggaactttctcatggacttgcctgattttgacagcactaaaagaaagcggattttctgaaagttcggggatgttgtaggatttgaatgcctggaaataatgttccgtgtctttttgcggtactacgaacggcttgtaagttttttcttctttattcggatagccagaacaaggcttctcatattgacggtctctattttgataaaatatcataagtatatgttcggatagtattggtttgtctgtcggtaaatttccatctttgcctttgggttacaacctggtaaaactttgaatactaaccttaaaaaagacaagtgtcatgaaaaagctatcttacctttttgccgtggcagcttccgccgcttgcctctgtgcctgtaccgatgttaccgatgctcttccggcagaacaaatcccggccgatgcacgtagtaccttgggggccgatgtagttcttcagtggaacaacgaagaacaaaccatcgatggttttggtgtggcgcaggccggctggtccgactatctttatgccaaccgcaagcgtcaggagattatggatgtgatgttcggacaggacgggcttcgcctcagtatcctcaggggcgaggtattcccccattacgatgaaaccacgtttaatatggacgaggatatcaatctgtctttggacgatccttttttcgatattgatttcaaccgtgatgagaatcgtgttgccgaaggcatcgcacagcgcaacggacagttgtggatcatgaaaaaagcgaagcaggaatacggtgtggacaaactcatcttttccgtttggtctgctccggcttatatgaaaagcaacggcagtacctcgcaaggttttttgaaacgcggcagctaccaggcctttgccgactatctttccaatttctgtgatgcctacacagcggcaggcctgcctgtctatgccatctctcctgccaacgagcccgagtatgcggcaagctggaactcatgcctctggcttcccggtaccactacgctgggaccgttcattgtgaataacttaggtcccaagttgcgacaaacccatcccgaaacccggattatctttggcgagaatgcccagtggtctgccattctgggctttatcatgggcagtaaaaattatgtgcgcgacattctgaacctgaatcctaaaatcaccaactttcccgtcattgccgccggacacggctatgtggatcctgtgaccgggaaagatcctgccattgaaccgttcagcaaagccgaatcgaagggaattcccgtgtggctgaccgaaatcagcgatcctacggaaagttatgatgctaccatgaccagcggcttgaaatgggcgaagaagttccatcgtttcttgtgtgaggccaataccggcgctattgtgtggtgggcaggtgctataccggatggcggaaccaccgaggggctgattaacattgaaaagaaccgcgtggactatgaagtgaccaagcgttgcgaggtgttcggcaacttctcccgttacatccctgtaggcagcaagcgcatctcggcgcaatatgatttcgaacaaggctatatggtgtctggctataaatatggtgacaacggttacacggttgtagccatcaaccctgcggatcatgaagtagttatttcgttggctcttgaaagcgctcaggtttccggtgctttgcaaggctatgtcaccgatgacacccgtaaatgggagccggtggaagctgttcaacctgccgatggtgtctataccctgaccttgccggcccgtagcgtggtttcctataccggaactgtgttgagtagttcgtctttgtaacattggttctgtttttatttctacgctgcaatagttttttgttccgtcattgtattgcgctgataaacagtaatatgcggtgacggaatttcctgtatccccacgaagtgctttttcgtttttttcttgcagaagccggttcgtcggatatcggtttccatgtcgggtacgtaatcttgatatatgtacggcagtatccgtgcaaggggatgggagtttccatgcaagaagactgcatcatttgttgcaccactcggctgaacgtgccttttcactcaagtgaagtgccgttgccacctgtgcgaaacggttgcttcaccaaggtgaagcaataaagtcataagactgttttcacggttgcatcctgttgataaaatacatctattgaagttttgtcattttgtgtgtggcggttgttgtgttgtacattgatgaacgataccgccgcttacctaccggttgagagcctttatggatgttttttcacagtaattggttgataattagaagaatactgtgtgggaaaaattttatatttcacggtcaattcagatgtgttttccattgtcttgaagaatttttttttgatattgataagatttcattgtttaatgcttgaattgtatttgttcctgcttgcttgaattgccatctttgcaatgttaatttttaattcaaataactatgaaaacaaagacattcttaatttcagctgctattcttccatccatggggcattaccgttgtttgcgaaagcaataacgtgttggaaatctatttttagttaattttacagcaatattttttaattaaactctaatacattatttatgaaacaaattgcatttacatggttgctgtgcatacttagtatatgtgcctatgctcagcaaattactgttaccggaacagtgacggatgcggagaataatccgttgattggtgcggctgttgttgtagtaggaactacggatggcgtgattaccgattttgatggcaaatataccattaaggccgcttccggtcagtctttgaatttctcttatgtaggttatcgggagcaaactgttaaggttgatggccgcagtgtgattaatgtgaaattgtcggaaggtgaattgttggacgaggtggtggttatcggttacggtacagtgaagaaaagccatttgacaggtgcggtcgcttctgtttccggtaaagagttacaggcaaatgttgcacgtagtgcttcagctgctttgcaaggaagagttgccggtgttactgtgtcggctgccaacggtcagccgggggaaggcttgaatattaatgtccgtggtatcagttcattgagtgccaccagtccgctttatgtgattgacggtgtgtatggtgatatcaatatggttgatcccgctgacattcagtctattgaagtgttgaaagatgcttcggctgctgctatttatggttctcgtgctgctaatggtgttgtattggtcactactaaaggcggtcgtttggaaactcctgcccgtgtaacagtggatgcctatacaggcgttcagatggttgccaaatacattgatgtaatggatggtaatcagcttcgcgatttggcaaaggctaccggttatagttcggcagaagggttgctgaattggaatggaggtgctggaacagactggtagaaagaactttataactcggctatggtgagcaaggttagcttgaatgtatctggaggaaacaagacttcgacctataatctgtcgggaagctatcttaaccaggatggtattgtgaatactaccggttatgaggcatggaacattcgtgctaagaatactttttcttttttcaataatcatttgcgtatggggactacgttgatgatgaaattctataaaaagaagtatgaagatgtttcatatacctccgctctgacagctgtgcctatgtggaatgtatatggtgaagatggcacttggggtgtcgctccggaatggaccagaggagataatcctgtaggttggacagaagcctatgattaccaaagacatgggatagatattttattgaatggctatgccgaagtggatttgttcttgaaaggattgaaatataaattcaatgtaggtataaacaaatatacaagacgtaattatgcctatagttctccttattatttcagttctacttcacaaaagaatgaagcggaattgtcggaaagtacagactgggagaacgattggttgattgaaaatacaatcaattatgataatacgtttggcaatcatacggtttctgctttggtgggttattctgcccagcgtaacaatgcgcgtggttttggtgcaggacgtaagggtttcccggaaggtttctctgtgattgacgccggttcggtttcttcacaaaatacatcgggtagcgcgtgggccaatacaatgatttctatgtttgggcgtgtgatgtattcgtatgccgatcgttatatgctgtctgcttctgttcgtcgggacggttcttccaaatttgcagatggaaaccgctggggcacattcccgtctgtatctttgggttggaatgtgatgaatgaagatttctttgaaaatatcaaggaaaccatgaatgaattgaaaattcgtgccagttatggtgtattgggtaatttgagcggcattggcaattatgctacccagtctgttgtttataaaggtatgaataacatgatgggcacagaactttgggaaggtgccattaccggtaaggaatggacttcacccatgaatgtgacttgggaaaagacgaagaccttgaacttgggtttggattttgctttcttgaacaataagttcagtgtcagtgctgattattttattcagaaaacagaagatatgttgttgtctatgccgcagtctttgagttttggcttgagtgggaatcctacagtaaatgcaggtacagtagaaaacaaaggatttgaaatttcattgaatcaccgtaataatgtaggcgatttgtattatcatgtaggtgtcaatgccacctttatcaagaatgaactgacggaagtaaacggaagtcgtgatgaatggcagggattcaatcctcatgccaaaggaacgattacttatgccaagaccggtcattccataggttatttcaatttgataaagacggatggtgtattccaaagccaacaagaaattgatgcgtatgtggataagaacggtaataagatccagcctaatgcacaaccgggtgacttgcgtttcgtggattataacggagatggtaagattgacaataatgaccgtcaggatgtaggctctgctttcccgaaagttaacttgggtgtaagtctgggtgctgaatggaaaggtttggatttgaatatgttctttgacggaaactttggcaacaagatttacaatgcccagtattatagtacggtttataatgaatcaacgggaaaccaatatgcagaacgcatgaacagctggactgaaaacaatcattctgacattcctcgctgtttgtttggtactagcgatcctaatggtacaaactggggctatacggaccgttggttggaaaatggttcattcttgcgcttgaagactttggaattaggttatacgttgcccaaagtatgggtatctaaagccggtttgcagaatgtgcgtgtttatacggctatggaaaaccttttcactataaccgattataaaggatatactcctgacttgggtatggtagatgccgatggtgccggtacatcaggtggttcgggtgtaatgacccgtggttgtgatgacggtcgttatccgatggcacgtactatcacctttggtttacaagtaaatttctaattaggaataagtaatatttgcagaatatgaaaaagaattttataaaatacatagctgcattggctgtagctccaatgttgttgtcttcttgtagtgatgactttctgaatgagattgatcctaaccgtcagactccgaccactttctggacatccgaggataatgtgatgaaaggcttgtccgcagtttataatcctttccgccgtatgaccagtggatattatggtgggctggaaggcatcatgcatcttcagatgcgcggtgacgacctttaccccactcgcggagaagaaccttatatttgggaatatttgtcgtttgtcaacacaacgaatacaaaggatttgagctggggaaacatctatgaaggcattcagatggcgaacgaattcatatatcgtgcggctacggttgatatggacgaaaccaaacgtgagcaaatgataggtgaggcttatttcttacgtggattctggtacttccgtttgcgtactgattatcgtgatgcggttatccgtactctcccgcaggatgcagatccggaaactcatggactgtctagcggtgatgaagtgctggaacaggctatttcagactttaaggaagccaagtctcgtttgcctaagcttcgttcaagcgatgagaacggtcgtgtaactcaaggtgcggctattgccatgttgggtaaagcttatatctggaaaggggattatcaggccgctaaggatgagtttgaaattataatgaatggttatggttacgatttgactcaaaagtatgaggacaacttccgtgacgatacggaatttaatgccgaatctatttgggaaatcaattatgatgccaaaggtaattcgggtgactcttggggcaatggcactagtgacgactcgtttatgggaaacaaccttgctcattattttggcccgacactgaaaggtgagaatattggcggtggttggtataagatgcagccttctccctatttgataaaagaattcatttccgaacagcgtccggaaggatctgattccaaatgggataagcgtttgtacactacgtgcttctttaaatattctgatttcggtgatgtgaagccggatgaaaaattctatggtggtaaagtggaatttgatgatatgtttaaatggacggtactgcccgaaggcgatggcaaatatggtattgccaagcaaggatatgctcctgcttatccggttatcgagggtgttcaagggcgtttcatgatgaagaagtttgcagcttggtgggttcccacaggatgtacgatgtattctaacgatgctggacgtatcaacaatttacgtattatgcgctttgcagaagttttgttgctccacgctgaggcttgtctggaaaccaatgatgaaagcggagcaatgaaagatattaaccggattcgtgtacgtgccgggctgccggagaaaaacttgagtggaaaagatgctataatgacagaactccagaaacagaaattgctggaatttgccggagagaatatacgttgggatgatatggttcgttggtacggaaatgatcctgctaagttgaaagctatcatgcacgaacgcaagaccgattctcaacattatgaattgctttacgaagaaaatgaaagtggtgaaaaggaattggtaggatataaaccgacagaccgcatttcggatacacaaggatttgaccattttgaagctaaattcttgtacttcccgatacctcaggcagaggtggacgctaatttgaatttggagcaaaagccggaatggagatgattgcattgaactgataattaaaaagtatgagagggagggggatctctccctctataaaaacaatgaagccaaatgaaaaggaaaggatattatttatgctctttgttggttatgatatttgtatttttgtcatgtcgtgatgaagaacaggattgtacccaagctatgcaggatatacaaaaccagttgaaggaaaatgatttattgaaatctgtttctcaagaacgtgaacaatgtgttttgttattcgagtccaataagataatttttccgcaagagttaatccaaagtgtagatgtggatgcggaaaactggaaaacgactttgacatttgccaatggaagcacttatgttatacctaccttaggtacttcgattgacaacttgatattgagttctacagtcaatccttccggttgcaatccattatcggccagtgtagttgtaaaattacctgtattgggacgcattaaactgattgtacacagcaaaccgggaaagcatacgcctgacgtggaatatacatttaaagatgtgggattaaaacagaatattccggtattgggactttatcccaattataataaccagatcactttaatttatacagatttgcaaggaaatgaacgtgctcggtccaatctaaagcttcagacgaaaacattggaaagcagaaggctgcctaaggaaatcagagtggtaaaggctcaatatgaccgaatggagccaggcatgaatttggtaaactcccccggacaggatgaaacagacacttctatcccttatatgatagatgcagacggagaaatccgttggattcttgattgggagaagtcggatgaacatcgatatatcggaatcgggtgcggattgatccggatgcagaacggacattatatgaccggtgacggaaaccatcatcggatggtggaggtggatatgatgggaagtacaattcataattgggatatgctggaaaggggatacactatgcatcatgccatatctcaagataagcaaggcaatatattagcgactgtgagcaagacttccgctaaaatcgccaatgggaaagatgtacggataaatgattttattattatgatggatcccgaaaaaggggagatattgcaagaatgggatttggtgcacatgttggattcggctcgctatggaatgaccgattatgatctaacctcagacccttttgcacaaagtgccagtaattgggcgcataataatggtatagtagagtggggagatgattatctggctacagctcgttatcaaggaatctttaagtttaataaagctggaggtattgagtggattatatcgcctcatgggtattggagagataaatacttgaaattattattgaatcctcttcatgccgacgggactcctattactgatcctgaggtgatagccggaacgaagaattgtgatgattttgaatggccttggggatgtcatacagctgtcccattacctaatggacacattctttatttcaataatggttatgggcgtaacttcaaactggattttacagacaggaaaaatatttatacttgcggcatagaatatgaagtggatgaagtgaaccgtacggttcgccaagtttggcagtatggaaaagagcgtggtgccgcgtattttactccggcccgttccggggtgcaatatttggaacaaacgggtaacagattaatttgtccgggaatgagcaatgtgcttagcaatggcaatcgtggtgcacgcgtgacagaagtagatcctgaaacacaggatgttgtgtttgaattggaattggaagatgcgatttaccagcgggtttaccgtatgtctctttatcctgagaaccaataacaacactgtatagaatatgattgatttttgataaaatagtataattctagatgcttggatagcattcttttactgtaaaagatggattgataacaatgaaaagaaaataagatatgaacggatatttcaaaaaacaaatagaagcattgcgccaacgccatgaagcgttgttgcaacgtcctaatgaaatgcaggaagaaacgaacggtgtcatccgccgttatgtttatccggtactgacacgccagcatattcccctggaatggcgttatgacttcaaccctgccaccaacccttgttgtatggagcgtatcggctttaatgctaccatgaacagtggtgccctgaaatggaacggaaagtatctgatggtggtgcgtgtggagggagcagaccggaagtcgttctttgccatagccgaaagccctaacggggtggacaatttccacttttggaaacgtccgctggtattgcccgatgtggatccggcggaaaccaatgtgtatgatatgcgtcttaccgctcaccaggatggatggatttatggtatcttttgcagcgaacgccatgatgacaaggcaccggcgggagatctgtcggcggcggtggcaaaggcgggaatcgtacgcacgcgcaatctggtggactgggaacggttgcccgacttgaaagcggcgagccaacagcgcaatgtggtgttgcatcccgaatttgtgaatgggaaatatgccctctacacccgtccgcaggatgattttattaatgccggaaatgggggaggaataggatgggcgttgatagacgacatcacccgggcggaggtgaaggacgaaatgataataaaccaccgttattatcacacgatcaaagaggtgaagaacggagagggaccgcaccccatccgcacctcccaagggtggctgcacctggcgcacggagtacgcggatgtgccgccggactgcgctatgtgctctatctgtatatgaccgcagccgatgaaccgtggcgcgtcatagctgaaccagccggctatctgctggctccgctggcgggggaaagggtgggcgatgtgtccaatgtgcttttctcgaacggatggatagccgatgacgacggtacggtatacatctattatgcctccagcgacacgcggatgcacgtggcggtttctacggtggatcgcttggtggactactgtctgcacacgcctgccgacggattgcgttccgcagcttcagtggcggcggtgaacgcgttgatagatcgcaacgaggcatttctgaacgggtaaaatagaaggaatataaaggcattgataagataaagtcgtttttaatgcggaatggctgttttttaggtggaaagagaagtggataatgccatttattttcttgtcgaaagggaataaatggctaattttgtaattataaacccaaaatagatattgtatgaaaaagattgctttatgggctatgtgcatagccgtaatggtgttgtcgggttgccggaaggctccggaatggaaagcggaacatgtgtttgtcatcggtttggacggatggggcgcctacagtgtggcaaaggcggatatgccgaacgtgaaggcgttgatggatgccggatgctacacgttgaaaaaacgcagtgtacttccttcatccagtgctgtaaattgggcttccatgtttatgggggcaggtcctgaactgcacgggtacacggagtggggatcaagaacgcccgaactaccttcgcgtgtgctgaacgagcatggcattttccccaccgtgttcagcgagttgcgcaaggcggctcccgatgccgagatgggcgtactgtatgaatgggatggtatcaagtatctggtagatacgctggctttgaaccatcatgcgcaggcacccgactataacacgcatcctacggctttgtgtgacatggcctgtgagtatattatgcagaagaaaccggtgttgagtgctttctgtttcgacaaccctgaccacgtagggcacggtgacggacacgatactccggcttattatgccaaactgaaagaactggacggctatgtgggccgtattgtggatgccatcaaggaagcgggtatttatgaaaacagcatcattattgtcaccgctgatcatgggggaatcaataagggacatggcggaaagaccatggaggagatggaaacgccgttcattatcgccggaaagaacatcaagaaggggggagctttcgaagagagcatgatgcagtttgactgtgcgtctactatagcatctgttttcaatctggagcaaccgcaggtgtggataggacgccccatgacacaggtgtttgaataaaagatgaagcggatactatgaaattgcatatcgttgatattctgattatttgtgcttatctgatggttattgtcgccatcgggttgtttttgaaaaagaaggcggcaaagaatatggattcttattttttgggcggaaagtcgttgccgttttatatgttggggctgtcgaatgcatcgggcatgtttgatattaccggcaccatgctgatggtgtattgggcttttgcttatgggttcaaaagtctgtggattccatggttgtggcccgtgttcaatcaaattttcctgatggtctatctgtcggtgtggctccgccggagcaatgtgctgacgggcgccgaatggataaagacccgtttcgggcaggggcggggggctacgctctcgcatactattgtcattgtctttgctctgctcagcgtgctgggcttcttgagctacgggtttatcggaatcggcaagttcatggagatcttttttccgtgggaggtagtgtcgcagtatgtgccctgggatattccgatacaatatgtgcctcatttttacggcattttctttacggccattgctaccttctatgtgatgctgggcggtatgctcagcattgtgtggacggatgtggtgcagttcctcatcatgacggtggcgggtgtggtcattgccattatcgggatgaacatggtggctcctgaaatgatccgggaatttgtgcctgcagggtgggagtcgcctttcttcggctggacgctggacattgactggagtgaacggatgagtttgctgacggaacgcatggcggacgagccttacagcctgatgggtgtctttgtgatgatggcgttgctgaaagggatttttatgagtatggcgggacctgctccgaactatgacatgcagaagatcctgtcgtgcaagtcacccaaggaggcggcgctgatgagcggttcggtatcggtcattctgctgattccgcgttatctgatgattatggggtttgcgttgctggctatctatttctttaaagtggatggaggactggaacagatgacggctgtccacacggatttcgaaacaattcttcctcacctgattacgaagtatgtgccggtggggctggcgggtttgttactggcaggattgctgtcggcattcatgtctacattcgcttctacggtgaatgcggcaccggcttatgtggtgaatgatatttatctgaagtatatcaacccaagggcttccgtcaggacacagatacgggcgagttacctcgtttcggtactggtggtggttatcagtacggtgatgggcttttttctgaaggacatcaacgagattttccagtggattgtgggcgcgttgttcggcggatatattgccgccaatgtgttgaagtggcactggtggcggtttaatggtgaagggtatttctggggaatgacttcgggtgtggtggctgccattgtgatgaagttcacggtacccgattcgttggtactttattttttccccgtgttgttcggcatttcgctggtgggttgtatcgtgggtacgtactcggcacctcctgctgacgaggagacactggtgaacttctatatccgggtatgtccgtgggggtggtggaaaccggtggcggccaaggcagtagcacgctatccgcaggtgacgcgcaaccgccatttcaagcgggatatgttcaatgtggcgattggtatcgtgtggcagtgctgtctcactattgtgcccatgtatctggtggtgcgcggtacggggggactcattgcgtcggtgttgctgctggtggtgaccaccgtggtgttgaaatatacctggtacaggccgttgtgcagggaagagaaggaatatgatgagttgatgaaacgtatcggaatgaactgatagacaaaaaagggtaaatgtgtcaaaactaaaatggctaccccgcaaagttacagatcgtatttataacacttaaaaaagggtcgtatcaagctctgtattgagtaatgatacggccctttctttagccttttaggatgttcaaatgccagattataagttcatattttcaaaaacagagttttgacatcctctttttgtctgtcaatatcaaccggaaggtttagctcacttcgggcggctccagtatgcggctggcgtactcatgttgtagcggtagctcgacaccttgtttcatcagtattcttccggagaacattttgttgtccagtggcagcggacgggcatcttttccggtttagttccgtgatgcggtattgcttgtcggctttcagcctgtccatgcggaaacggggaataatctgattgcaataatgctgaatcttgtaggcaagaacacggcatgttttttctgtggggtgtagagcatcagtgagaaagcacctctatcattgtaaggcgagatgagacggtatgataaattgcccagctgtatcatcggagggattttcttgtaggtaataatggcttcacgttttcgggaacggacaacggcagggaggtgttcggagtagctatcagaatatcttgttcctatacccggagcggaaaggaagagaagaggcataagtttgccggaagtagttttttcatgggatggtatttttttgaagaataatgatctgtatgtttggaattatgcaaaaatgaaagaagtttttggcattttatgatagaatattattcatgtggcactatgtgcgcattttatgtaattatgaggtgcttttccgcaataaatatcaaggaatctttttatctttgcgaatattggtaatcagtgcttaagtataaaaaaaggttatggaaaagagagataaagaggaaatgagccgcaggaagtttctgaagatagtaggcgtcagtgcggctgcatcggcggcagccctgtatggttgtgcatccgaagggaaaccggcttcatccgaggcttctgtgttgggcgaagtgcctgtggataaaatgacgtatcgcgtttctcccaaaggggagcgtgtctcacttttaggatatggatgtatgcgctggccgttgaaacctgcaccggacagcgatggaaatgtgatagatcaggatgcggtgaatgaactggtggattatgctatcgctcacggagtgaattatttcgatacatctcctgtctattgccaagggttttctgaaagagccaccggtgcggccttgaaacgttatccccgcgaaaagctcttgattgcgacaaagatgtccaatttccaaaactatactcgtgagaattccatcaagatgtatcatcagtcgatgaaagaattgcagacggattatttggattattatttgcttcattccgtaggtggaggggaagggataaagactttccatgaccgttatattgacaatggggttcttgactttttactaaaagagcgtgaagaaggccgtattcgtaatttgggatggtcatttcacggatcggtggaagtgtttgattatttgctgtcgctggatgtgaaatgggattttgtgcaaattcagatgaactatgtagattggcgccatgcttcgggtagaaatgttaacgcggaatatttgtatggagagttggccaagcgtggaattccggctgtgattatggagccgctgttgggaggacgtttgtctaaactgaacgaccacctggtggcgcgcttgaagcagcgtcgcccggagaacagtgtggcatcgtgggcgttccgttttgccggtacgtatcccaacgtgttgtgtgtgctgagtggaatgacttatatggaacatttgcaggataaccttcggacttattcgcccttggaacctttgaatgaggaagaaaaagagttcttggaagaaacagcccaattgatgctgaagttccctacgattccttgcaatgactgcaaatattgtatgccctgtccttacgggttggatattccggcgattctggtgcattataataaatgtgtcaacgaaggaaatgtgcctaaaagcagtcaggatgagaattaccgccgtgcacggcgtgctttcctgataggttatgatcgtagtgtgcccaaactgcggcaggcaagccattgtaccggatgtaaccagtgtaatccgcattgccctcaaagcattgatattcccaaagaactgcatcgcatagacgcatatgtggaacagttgaaacaagagactttataatggaatggataaacatgataaaataacgaatgcttatgttacgtaaaataagacttgccgccgcccttttgttctttacaatgatcacgttgctgtttttggattttactggaactgtgcatggttggtttggctggatggcgaaaatacagttccttcctgccgtgctggcattgaatgtgggggtggtgatagcccttgttttgttgactctgcttttggggcgtgtctattgttcggttatctgtccgttaggggtgtttcaagatattatttcctgggtttcgggaaaggtaaagaagaatcgtttccgctactcgcctgctttgtcgtggttacgctatggggtattggcagtgtttgtcgtcgctttggtagcaggggtggtttcattggcggcgttgattgctccttacagtgcatacggccgtatcgtttctaacctgctgacacctttgtatcagtgggggaacaatgtacttgccctatgggcggagcgtgtggacagttatgctttttattcggtagatgtttggatgaaaggtctttctacttttgcagttgcagtgggtactgtgattgtgctttttattttggcatggcgtggaggaagaacttattgcaataccatttgcccggtgggtacagtattgggattcttatctagatattcttattttaaaccggttattgatacgtctaaatgtaatggttgcggactttgtgctcgtaattgcaagtcttcctgcattaatcccaaagcacatgagattgattattcccgttgtgttgcttgtatggattgtctaggcaagtgccgccaaggggcaataaaatatgtatcggggcagatgcttctgaagaaacaggctccggcaagtgaaggaattggcaaacaggtttctcaggcgtctttaaacaaagaaaaggtagatactgcacggcgtgggttctttacggtttcggctttgattgctgcaagtgttgccgtaaaagctcaggaaaagaaagtggatggcggtctggctcctcttatagataagaaagttcccaagcgtgccactcctattgttcctgcgggagcattgagtttccgtcattttgcgcagcactgtacggcttgtcagctttgtgtgtcggtgtgccctaatcaggtattgcgtccgtccggtgatttgaaacatctgatgcagcccgagatgtcttacgaacgtggatattgtcgtcctgagtgtgcgaaatgtgcagaagtatgtcctactgatgctattcacttggctgatctgacagagaagtcatctgtacagattggtcatgctgtgtgggttgctcagaattgtatagtgaacacagatggggtaagttgtggaaattgtgcccgtcattgtcctacgggggctatcttgatggttcctaaagataccgatgatggaaaatcacttaagataccggttgtgaatacagaacgttgcatcggttgtggcgcttgtgaaaatctttgtccgagccgcccgtttagtgctatttatgtagaaggtcatgagatgcatcgtattatctgaatgaaatagaaaggaagatggatgaattaatcagattgttgcatgaaggcggctattcctgtgttatcagaaaggaagagatccgtacttttacccaacgcggggtagccgatttatatgatttgctgaatcagcatccggtctttttgcatggagcgcaggttgctgacaaggtggtaggaaaagcagctgccgcattgatggtgctggggggtgtccgggaggtttatacggatatcatcagtgagcctgcattggctgtattgcacaaggcgaatattaaggtggagtgtgttcaaatagtttctcgtatttggaacagaaaccggacaggttggtgtcctttggaaactctttgctatgagttggaatcgcctgaggctatgtatccggtgattcagaattttgtggaaaggatgaggggattcggaagctaacttcgtggttcttgtcttgtttcaaatgtgctgatgatgctgtacgttcggagagtaaacgttttgcatataatcttaactaatgttgtctgtcagatggttttcttcgaaacttaatgaaattttgctaggaattcttaaatcttcattatctttgaagcataaaacaataagattatgagtgaccagataaaacaaatagctgagcgtctccagggattaagggacgttctggagctgactcctgatgaggtggctaaaagttgccagctttcagtggaagagtatttgggtatggaaagcggggagaaagatatttctgtcagtgctttacagaaaatagcccgtaaatacggtatcgcattggatgtattaatgtttggtgaagaacctaagatgagttcttattttctgacccgttgtggttcaggagtgtcggtagaacggaccaaggcgtataaatatcagtcattggcttccggttttcgcgggcgtaaggctgatccttttattgtgactgtagaaccgaaaccggaaaatactccgattcattttaactcacatgagggacaagaattcaatttggttattgaaggaagaatgttacttaatataaatggaaaagaattgatcttgaatccaggtgacagtctttattttgattcttctattccacatggtatgatggcattggatgataagactgtgaaattcttggcagtaatattataataaattgagattaaaaagacagcgttgtcattgactgcaactatttctaatttttggttctcaatttttaattgaataagattatggtagaaaaattcttagaacagaccacatttacctcacaagaggactttataaagaatttaaagattaaaatccctgaaaattttaattttggttatgatatagtagatgcctgggctgccgaagaacccgataagaaagcattgttatggactaatgataaaggggagcatatacaatatacttatgcagacttgaaaaagtatacggatatgactgcttcttattttcagagccttggtattggtcatggtgatatggtgatgcttattttaaagcgtcgttatgagttctggtactctattattgccttgcataagttaggagctgtggttattcctgcaactcatctgttgacaaaaaaggatatcgtgtatcgttgtaatgctgctgatatcaagatgattgtagctgcaggagaagatgtgataacaaagcatattatagatgccatgcccgattgtccttcagtaagaaaactggtcagtgtaggaccggatattccggagggttttgaagattttcataaaggtattgaaaaagctgctccttttgtcaaaccggaacatcccaatacgaatgaagatacttcattaatgtatttcacttcgggcactacaggcgaacctaagatggtggcacatgattttacatatcctttgggacatattgtaactgccagtttctggcataatttgcatcgtgacagtcttcatcttaccattgccgatacaggttgggggaaagctgtctggggaaaactttatggacagatgatagcaggagccaatatttttgtgtatgatcatgaaaaatttacaccggcagatattcttggaaagattcaggattatcatatcacttctttatgtgctcctcctactatttatcgttttttaattaaggaggatattagtaaatatgatctttcttctttggaatactgtactacggcgggagaggctttgaactattctgtatatgaaacgttcaagaaaatcacaggtatccgtctgatggaaggttttggacaaacggaaactacattgactttaggtacttttccctggatggagcctaaacccggaagtatgggggtacctaatcctcaatatgatatagatttgttgacacacgacgggcgttctgctgaggatggagaacaaggtcagattgttattcgtacagataggggcaaaccattgggattgttcaaagaatattatcgtgcttcggaattaacggaagatgcttggcatgatggtatttattatacaggtgatgtggcttggcgtgacgaggatggttatttttggtttgtaggccgtgctgacgatgtgatcaagagttcgggttatcgtataggcccgttcgaggtggaaagtgctttgatgacccatccggctgttgtggaatgtgccattaccggtgtgcctgatgaaatccgtggtcaggtggtaaaggcgacgattgtcctttccaaaacttttaagggtaaggaaggacctgagttggtaaaggagttgcaagatcatgtgaagcgtgtgactgctccgtacaagtacccgcgtgtcatagagtttgtagaagaacttccaaagaccatcagtggaaagattcgtcgtgtggaaatccgtgaaaaggataaataatctgatcggagttttattggtaaaataattaaaaatgaaaaaggttttacttcttgtgtttttaagtctggcctggttgtcagcaagtgcgcaagccttggttcctattacatggacagcctatggtctgacttttgaggctccaaaagggattttggtggaggaggatacagaggagacttttcttctgaacaattccaggttttatatcaccattcagtctttggattcggatggtatgacaaaaagtgacttgaagagtgtattaaaagactatgccaatgatgacggggtgaaagaccagtcggctgtgcaggagtttgagttaccacagtttttcggtacttatttaaaaggaagctgcgaaacagatcattgcctttatgcttgtctgatgactaaggcggcaggtagtggattttatatatctattatctatagcaaggaaaatgaaaatattgccgaaaaaatactgaaaagttttacaatggaggaataaacaaaagagcgttaatgcttgtttctcagataagaaagcgttcaaaatttaccagaaaattactagattattaatagcaaatgaaaggactggcttcgtgagaaggtagtccttcttttttgtgtagttatgaatgtttagggaatctatgattcatgtggaatatgctttgccgacatcagaatatcaaatgattttgggccataataagggacattcagaaaataatataagttagccaactaattcgcaatactttaagtatgcattagctggctaacttattattctatgaatgtctcaggttaaggcattaacgtccggtccaccataagggagtgatgatattatctgggcctcctaataactctacagcttgtttatagccttcggggtctgcattctccaggctggaaggatatcgcatacgctgtggataaaattcccatttctgtccgtctttccaagaattaggattccaggcattgaccatgtctgaaccggtcattgaactttcgtttgcaggaatctcaaagaatggtaatcccaaacggcggaaatccgaccacatttccaataccaaatacggagtttgtgcaatgaatttttgagtgataattttagtcaggtggtcattcaatgcttttccatataacgttttagaagctgtaggatattcataagtaacagtcttctgttccttgctgtatccatccacataagtcatttgttcagcagtaggttcagtggtatgatcaaatttgactgaagtacctacacgattgtagttggtggaattcagataatcattcacatattcgctaacaccaaagtattcaaaactagctttaataccgttttcataggcttctttcgctgttgttccagtgttccaaccatacaatgaagcttctgctagcaagaaatacgtttcccatgctgcaaagaatatgcgagatttgcccttacagtagtctttacccaacattggaagagtacagccggggccatatccatttgttaccagttggttataagccaaggttggtgaccatccaccacgcgaaccagcgggataaccattccaacaacgagttgcatcaatctttatttctccgggattatccttgttaggaatcggatttccgttttcgtctactgtgtaaagaacgaaatctttagctgtcctgtcattatatttatctatgtagttctcagcattttcatcatcaggcagacagaatatctttaatgcacgcgggtcaagattttccggcataccatccagccaatattgtttagtaggattatctgtattagcaacataatgtctgtcatatttaatacctaaataattagctggtttaacataactagccaaatcggaacgttgttctgttactttaataccacctaaattagtcagaagattggcaactgttgaagaaagaacctgatcgtcaaatgaacgggtatatactccggaaaagacatcccatccatcattttcttttactgcaaacatatcatcagccgttaaaatcttgttacctttggctgcatcctcaaattcggcctgtgcagttgccttgtcgatgtttgataaacgcatggccagacgcatacggagtgaatttgcatatttctgccacttcacaggatcatattttacattgtcaaacgggtcgcatttaccttctgcctcaacaggcaggacagaggtgttgatagctgctgcggcttctttcaactcctttaaaatgaattcataatcatctttctctgagttgaaaacaggattttcccctaggaaactttcaataggataaggtccgaaattatcgacaaactcactgataagataggcacgccagatacgggcaaactgctttacgttcgggaaaaattctttttcatgtgcagtggtagtggccgcttcgagctggttctctactgctgtaatagccaacgtagcatttttaatactggaactgagatcaggataataataagcagatgtgtagtcatcactatagcggcctacgttcagaaaactcatttctccacaaattctggcagcactagcccaattatagactactacacgttctgcggtaccgggattcatctgtgcctgtcctatagaattattcaatgcatattgaggttttacatattcctcaccggcggctgtgggattggtattgacttcatcaaagtcagagcaggaaactaatccggcgcaaaagccaagccccaaaaataatttattcattgttttcattgttctttttcttttttatgattagaaaccaagagttacattaaacaggtaagaacgtgatgtcggagctgacgagttctccaaacctgttgcattagtacttgtagcatatactgattccggatcaatgccgtccaaatggcttgaaatcatccatacattattcacggtgaaaccaagcttaacctgttggaacggagtctttttcaacatagatgacgggaaacgataactcaaggcgatgttacgcaaacggatgttggtagcatcatagatataagcttccgaaataccggcgcggcctgtagccaaagctttgtaataacgttctaaagaaacactttgatcatttaccttataaccgttgccatctttgataactcccgctacaacgatatcctcacgtttaccgcctggagcagtacattcggcaataccactacgttgcaagttcatattggtgaatgagaaaatatcgccaccaaaacgtccgtcaatcaggaaactaagtgtgaagtttttataattaaatgtatttgtccatcctaataggaagtcaggctgttgttcaccaatcttatgcttgtcactagtggcctgtggcagtcctgattcattgagtaataattgtcctttaaattctccttcttctactcgttgatatttggtaccccagatttcaccataagcacctcccgcaactgcataaacctgtaatgcgtcagaacctcctaaagcatactgcatacctggttttcccggtaataattcaataatcttactcttgttctgagagaagttcaactgagtatcccaactaaattgagctgtttcgatagggcgtgcattcaacatgatttcaataccggtattttgaatgttacctgcatttactttcatgttatcataaccggaaaggttatttaaaggaatattcattaactggcgttttgcgtttgtcttgtaccatgcaaagtcaactcctaaacggttattgaagaatttcaattcagcaccggcttcccaagaagtaatcaactcgctgcgtacatctgcatcgtatttggtttttccttgtccggcagttgtattgccattagggtctgaaccaatactatatgtattatataactgatatgcatccatatcgttacctacttgtgcaaaagatgcacgtgctttagcataagtaaaccattcgggcatgcctttgcctactttacccaccatatcactgatcacccatgacaatgaaacagacggatagaagaatgaacggttttctttattcaaagctgatgaccagtcattacggaaagttgcatccaagaatgcccaaccattatagttgatcccaagagttccatacaaagaattgatttttttatgaatataggtttcggttattgacaaatcttttttgtcaccattggctaaagagaataaatcgggagcagtcaattttcccatagcattatccaaacctgtagattttctttccattaagttaccaccaaaagagaaattaccaccaaattttccaaacaattcatctttatggccactgatcaaaaagctgaaattattttcgaagaactttttctcactagtgctgtaacggctgttcttattattagtaggacttcctgcatacaatttctcttcaccctcagtgaaatacatatcactaccggctttgatttcagcatccagccaatctgtaaatttgtacttcaatgatccgttcatcaggaaacgattgcgactgtctttattgggattataatctttagaccaataagggttgataccccctttactccaccagatcatttcgccgaattcgtctttgacagggctggaaaagtcacggatgtcaatagtcgtaggcatattgaaaatagtataaaatgcattattcccacgtgcaccactgatagggcggttttctgcgagggtattgatgtattgtacttttgcatcaatgctccaacgatcatctttaccaaaagtagaagatgcacgcaaagttaagtttgtacggcttaagttagcacccggtatcatgctggagtcatccatacgattcaatgaggtgtaaatggatgttttatcatactgctgctggaatgatatgctttctgataagttcacacctgtatcaaagaaattttttacgttatcaaagatttgcatatttgcagttgtaccatcccattttgtatagctttgccctgttacttcaggaccccagctatagccgttagttgagtcgaacacgccattctcaccttgtccaaaggctttttggcgtttagggagcataaatgttgtctcagcggaaactgaaccagagatagtgatacccaaaccttcacgctttgttccttttttagttgtaatcaaaataacaccattaccggcacgagaaccataaagtgcagcagctgacgcacctttcaacacagacatggactcaatatcttcagcattaatatctgaaagtccattacccatatccaatgtcgggttatcaatatcattattacttgctcctgtaaagttatccattggcacaccatcgacaacaattaacggctggttcaaacctgttacagaattcgcaccacgaagctggattttggaagaaccgccaggaccattacttgaacggataatctggacacctgaaactttacctgtcaaagcatttgcgaggttcgtttcacgagcttcaagtaacgcgtcaccttttacctcctgcatggcataacccagtgcttttttctcacgtttgataccaagagcagtcactacaacttcacccaatgtttgtgtgtcatcctgtaaagttacattcatgggttgtccatcccaaggaatctctactgtttgataacctacaaatgaaatttgaatgatatccccttttttcacattggataaagagaagtcgccatcaagtccggttatcgtaccattagtcgtacctttcactactacagacgcaccgataacggtttcacctgtagcgtctactacaactcctgtacaagctccattttgttgtgtgattttcacatcggcaacgccgggattggcgaccgcgtatgctgctcctgtagaggcacccattaggaacagcaacatactgactgattttagtcgttttaacatagctgtgatttttttttaagtttattgaaaatcaagtaattccgtttccttagttccttcagaactactcttacagctattgtattgatattcagtggagttgaatatgataacgacaaaaagaaatttccatttaaagccgttaaaacaaactttaaatggaaattttctacttcatttctacccaaatcactactttgcacaaagaaataagggagtattacattccgtaaaagaatgagaactttcaataattgatgggaaagtttttcatcttacaaatgaaaacagcatcggctcattgttttagaaagtccttatctttttcaagaagaatcaactctttacttacatataaataatatttgcaaaataattctatgtatagtcctgaaggtcaaaataaaacaatccccttgtttttacaggaaaaacaaggggaactgttattctttaattttattttcagttcttcggtcctttgccaaaatcaggattttctttatccatccatacacgttcgtcatgcaaaacttgcggattttttgcatttgtaccttgatatgtataaccttgtgctttatatgcagcgatagttatgtcatgtaactgatctgattccaaaggctccataacagcaaatcttctagggataggataagagtcacccaattgttcgtcaaattccttacgcggtaaaatggaactattcttcataggaacaccagaacgcataatgttaacatattgatcaatcggtgcattaaaataatggagatattcttggatatacactttttccaaatcagaagctttatctccacttaaattataagcctctttcttaagcagttctgtcagccattcctcttgcagcttaatggaaacatcatgagggtcatttacataaggactgtcataataaggtatatgattctgaccggcaacataatcatatccttttactgaagcagtgataccgtctgtaaaatactcttgggcacttttttgtccattccaagtagctcccaacagggtgaattcagccaagaagaaattggtttccgctgccgaaaaatacagaccataccagccatattgttgagtgtcctgaaccggagtaacatccggagcatccggataagtatatgtcaacaaaccttttaccatttcttgattccggtaagtacacggataatagcttttcttggcaccagctgccgagtacaaaacaaacaattgtcctgtggggtcaaaataatcctcgtatttgtccatctgtcctgcacctatttctacaggaagaccataataacgtacccaaggttcacctggaccaccccattctttaaagactttctttccatttttaacctcagaaattacattcttttctacaaaatccggcatttctcttttttgatcaaaataagcctgcacaacattagaattgtagtcattcttttggaagaaataaagcaaacgcggatctttgttgtttaccaaaaagtctataagatgttgcgtacctactcctacagaaaaatcattattccaattgttatcgaacttacccttgttatatacaaagtcatcatccgtagtagcaattaagccaacaggactttctgctacctgttttactatttcaaaagcacggttccggtctttgtttatcaaacgggctgcaattttcaatttcaaagaattggccagtttgccccattttttcaaatcacctttataaataaagtcctgattattcaaaacatctttgatttcgttactgctcagataattaatagtctggtccagttctttcagccatacttccaaaagttcctcttgagtgtcatacttaggcaataacaaaggaggattggtatatctggcttgttctgcttctgtatattgacgtgagccatataggtcggcatcttggatacttaaataaaccaacaaaggattacaaagatattggatatattcataagtcgctttttcctcttcaggcaactggctgatttgatatcgaatctcattagcataacgaagaacttcgtttacttcataaccacaaccattggcttcatcagtcggacgatttgaacgagttgtattacctcctgatgaaactgttgtttgcgaccaggtagaaagatcattaaatcctccaaaccactgtgcataatctcccggttggaaagaagcctcacatttagtgaacaggaaacgaatatcaggctttgtaatagtagacggatctgaatttaattcagagaattcatctacacaggaagtaaacattacacttcctaaaagcagtgcggctgctaaagttctatatttcattgttgataattcttttaaagttaacaattagaaattggcattaattgtaaatatgtaacttgccgtataaggctcgaaaccacgaatacggaactctgaagctgaattagaacgtacagattccggattcaggttattaggtaatgaattatacagatatcccaaattacgtgcactgaatgacaggttcaatccttttgcacccagtttgtgactgatgctattaggcaaacgataatttatagtaatattacgcaaagcgatataactcaacttgtgtacccaaatgtcatcaattgtctgtgctccccatgcataattatttccataccatgaaccggcatgagtgggttccagttttccttcctgtaccagctgtgcgtaagacagtccgctgacatccatttttgttccatccaccaaggtcgcaattgttccttctttaaaaacaccttccggaatcataccatcagtatattgaatacctttggaatcggcgtattgactagtccaagtcatacctccatgttccgggtcacggtattgcaaagagctttctgtccaaccggcctgagttccgtataagttacagtaagatgccaccaaacctccaaaacgcatatccagtccgacattcaaacttaaatctttccaagttaacgttgttgctacagatcccagaaaatcgggtgtcatgttgcccactacttccgctgttttgctttgtgctctatatgcgcctctccagctgtcatcccactccaacaaaggtacaccgttttcattacgtgcctgagtgacatctgacatcaacacaccataagactcaccgacttttgctacagagccgatatgatagtcgtatgcgtttacataaccggacaattcaatatagttggcaacattaggatgcaaggatacaattttacttctgtttcgtgtataagtgaagtccagatcccactgccagtctttagttttgataggagtagtatttaatgcgatttcaatacctgagttttggatattaccagcatttaccaactgttgggtaacaccggaaatagcaggaacattgattttcataatctggtctgtggtattttccttataataagtgaaatccaaattcaaacgattattaaaagtacggaaatccaaacctatttcccatgaattcttacgttccggtttaaggtcggcaatcttcatcagtttgtccagttcattggtatagatattgccgtcatacatttccattgtggcaaaagaatacgtctgattgacagcgtatgggtctgtatcattacctacttgtgcccatgatgcacgaagttttgccaagttaatccatgaaggcatactttcgcggaaagtttcattaatcaaccatgaacctgatacagaaggatagaagtatgagtgattacctgtacgattggcatataccaatgcagaagaccagtcattacgtcctgtaacatccaaatagaattgattcttccatcctaaatttaaagcaaaaatggcagaaataattcttttgctgcccgatatggtcgattcgctctttttagtcttttttgagttctccacgaaccattctccaggcaccaccattcctccgtcagttgatacttttgaatgttgggaagaggtgttgtaatactcaaatcgtgcgaatccaccgagtgaaaaatcttttatctgcttgctggcagtaaaagttccccctacggtaaattgttcttttatatcttgcgtaataccataatatcctccttcgtttgcataaccggaacctaattgcttatcttctatagaagtataataacggttcatattagcgtctgctttaaacttcagccaatctgtcatctttacatttacttcaaatgtaggacgaataacagtttccttccgtacataatcgtaattatctactttgaagaaataatttttagcgctggaaggaaccgaaccatattggtcaccatagctggtactggcaataccaccatgctcacctaaatatttgttccggaaataatctacgtcaaatagcgggttaatcacattggtatttgcattgacaaacaattcacccgcattcagttgtgcattacgcggttttgagttggcaaagctaaaagaagcagcaacatccacccaatcgttcaacttatggctagctttcaacaacatggagtaacgttcaaaagtattgttttctgttgttgatttggcatttttataagataaagatgtataaaatgatgttttttcattaccaccgcgaatagaaacattcgtgtttgtattgaaccctaatttatataaatccagcatattatttttacgtggagaataggtagtccatgtaccatcataattgcggatttgagagccatcatatctaggaccaaaaccaaagttgggtactcctactaatgtatgttccccattctgatttactgtaaactgatgttcatcccacatacttccattttggtcggcatcagattgtcccggcatgtatcctggaccatataaagtttgaatatccggagtcttgaaagcatggtcaataccaaatgtttgagaaacgctgatacccagcccttgtgtacccttaccggatttggtggtgattacaaccgcaccattcaaaccgcgggaaccatacaatgctgttgccgcagcacctttcaatactgatacagtttcaaaatcatcaggatttaagtttttcaactcattaccatagtcgctggcgttgttggcacctgcgtcccagtctgctgtcgtattaccagatacaccgttatccagaatcactccatccaccacatagataggctggttgttggaacttaaggttgaagctccacgaatctgtatcttggtaccaccaaacaaaccaccatctgatcctgagatttcaacaccggctactttaccttgcaatgcggctaccggagaaatggtattggcagcttttaattcatctcccttcacttcagtaactgcatatcccaaagctttttcttcacgcttcaatcccaaagctgtaaccacaacttcacctaactgttgcgtatcatcttttaaagttacatcgataggctgtccggtccattttacttcctgtgtctgatatcctacaaaagaaataacaatgatatctcctttttttacatttgacaaagaaaaatcaccgtcaagtccggtaatagtaccattagtcgtaccttttactactacagatgcaccaatgacagtttcacccgtagcatccttgacaattcctgtacatgtaccactttgttgtgtgattttcacatcggtaacgccgggattggcgaccgcgtatgctgctccggtagaggcacccattaggaacagcaacatactgac

SEQ ID NO: 3888 - DNA, 11664 bp, Unknown
  gut microbiota DNA sequence
tctatagaaggacttttaaatacaattttctatctattttctaccgaaaagagcactaatatagaaagccgaataaccataatggtattttattatttattccatactctatatcatcagcgacaatatatgcatcagaaagtccatttatttgttgtttacctttatgtctaccaccgacttcaaaagtatagcgtccatcaataaagaaatcactctctttagaaacgtttattctgtggcaataacgcaattggttggcaaaaaaagtttccctgacatttccaatatcaatctgactggcagacaatgcatacattaaattaggattctccaaaaacagtttatcaggtttttgcaagcggcttatgccggagccttctttttggagattcatagtcagacagctgtcatggagggcatccagataggccagcaatgaattacgtgagattcctatccgttcacttagtttgctgacattaggaataaaaggcgccgactctgcaatgatatatagtaactgcttaattttagttgtatatgaaatatcaacccctcttaactgtggaatctccaattccacaatcagattgaccacttcatttattcttgaataataaagagcgggtaattcattgtaataaggataatatccatgtttcaaataatcagaaaaatgtttcagaactttaactttgtctactatcccgacagataatgccagatgattgtccaatatattatttaaagtcaatatcggcaatgatagtttttcattccagtttaaatactcgcgaaaagaaaaaccttgcatttcataaacaatagcccgccggcttaaatccgatttggcatttaagatttcaagcaaggacgaacctgtaaagactacatgaagttcaggtaagtcatcataaatatttttcagttcttgagaccagttggggtatttgtgtacttcatccagaaacagatattttcctccccgctttacaaaatcggaagctaaatcataaagtttatgttcactgaaccaaatattatccacactggcataaagtacggttttatccattggaaggttcagtttgatatactgcaacaataaagttgtttttccaactccccgggccccctttataccgataagacgagcttcccattctatctcattcatcaggctacgtacaaaagaagtatttgttatagccagtttcttgataaaggattcaaataatcgttccatttcttctttttgtttatcacacattacaaaaatagtaataaattgttcatcgcgataaacaaaacgagtttttttttaaagttgcagcaataaaatgctcacattgccatttgtttaaataaagttcagaccttcgcccaagtgtactgcccttttttatttggcttatgttaagtggctctatgacctatgcataatatgctttgccgatatcagaatatcaaatgattttgggtataataaaaaaggaagagaatatatcacataacctcttccttttttattaataaacttggactagcgtcatatttcagactgttttttcattaattcaaattaggtccttcgccaaattgcggatttccttcatctacccatacacgctgagagtttagtttgtcaggatctgcattgtcagtaccataagagaacccttgcgctttatatgctgcaattgtaatatcacgcatctgatctgtaggagcaggttcacttactttgaaacgtctcggaattaatgttgaataatccaataaatcactaaattcctcccaaggtaataatgtactgtttttcatgggaataccggaacgacgtacatttataaactgatcaagagggctcattatatagtggatgtactgctgaatatataccttttccaaatcagatttagtatcaccagttaatttgaaagcatcatgagagagcatttcattaaccatggtatcatcaatcttaatagtagcatcgagcgggtcatttacacaagtacgtgaataataaggaacttgattgagttccgctgctttgtcatatacataagcagataaacgacaaccttctgtcagatattcttgagccgatttaggtgcattagctcctaataatttaaattcagctaataataattgtacttctgctgctgagaaataaatgccataccatggggttatttgaatatctttatcaggtgttacatccggtgcatctggataagtgaagtcataaataccttttactaattcctgattgcggaatgacagcgcttcataatctcttgttccacctgcggaagtttttaactggaacaataaacctgtagggtcaaaaatccatttgttattctcttccaagccagcaccaatctttaaaggggctccgtaataacgtacccatggttcgcctggacctgtccagcctttaaatttaccgtcttcgataatagcgttttcggcgatataaggaggaatttctttaccttgatccaagaatgcttgtattacagctccgttaaactcattctttgtgaaggcacttaacagacgtgtgtcgcggttgtctttcataaagtcaattaataaatcatgtccggcaccttgagggaaatcattgttccagtgattgtttgttcttccgcgattataaataaaatcatcagttgcggattctaatataccagcctgattggctatgacttcatttgctatcttaatggctctgtttctgtctttattaacaagacgtgctgctagctttaattttaaagagttggcgaatttcgcccattttttgacatcgccattgtatatgaaatcctgattacctaagatatcgctaatattattagtcgtaagatagttaatagcctcgtccaattccttcaaccaataatcatataattcttcctgtgtgtcaaatttgggatacaatgtgcctccataacgagccatctctgcttccgtgtattgaagtgagccatacatatcgctatcacccattgccagaaagacagctaaaggattacatagatattgaatatatccataacgtgctttatcttcatcagacatttgagaaatttgataacgtaaatcatttatcatacgtaaagtatcatatatattcgatcctgtactaccttgctcggttatcagattaaaactgtctacattaccacttgggctaacaatacactgtccccaagcaccaatacgcggaaaatcataataccatgcagaataatccatcggttcgaattgatataggcattccgtgaataaaaaacggatattaggagttgaaatgtcaccttcacttgagtttatatctttaaactcatcggcacaagaggataaaagtcctgcacctaaaatgcatgaagcaaataaatattttaatttcatactaattcaattttatattgttaaagcattatgcattagaattcggcattaatagtaaacgtatagtttctaatatatggttcataaccacggatacggaattctgcagatctattaccacgaacactttccgggtgaacgttattaggcaatgaattatatatatagcctacattgcgtgctgctaaacttaaattcaaacctttagcaccaatctttgatgctatgcttttaggcatacgatatgacaatgtgatatcacgaagagctatgtaacttaactcatgcacccagtcatcattaacgacaccttcgccccaagaatttctaaacacatgatatgcactagcatgggtcggttcgataatacctgcatcaatagcttgctgatgggtcataccactgatgtcatgtgatttgccatcaatacctgtagctgaagtacccggggcaaacactccttctaaaataacaccatcttcataggtgattccattgctaccccctgcatactgacttgtccaagtcaaaccaccacttgccgcatcacgatattttaaagacgttttagtccagccggcatttgaaccgtaacggttgctatacatagctactaaaccaccgatacgcatatcaagacctacatgtaaacttaaatttttccagcgcaggcttgttgacatagaacctaaaaaatccggttgcatatcacccaattcctgaaccactccacttctacgttcgtatacagcacgacgcgtatcactgtagttcaacaaaactcgcccttgatcgtcacgagcaggaagaatatcagtcattaacataccataacttccaccaactttagcaacagaaccaatacggtagtcataggcgtttacttgacctgcaagtgaaatatattcagctgcatccggatggagttctacaatcttactcgtatttttggtccatgtgaaatctagtccccattcccaatcttcattttggaaaggaatagtattcaaagctaactctataccttgattctgaatattaccagcattaatcaattgtgtactgatacctgatacccaaggagttgctatttccattatttgatctttggtattttctttatagtaagttacatccaaattcagacggtttttaaatgtacggaagtccaaaccaatttcccaagcatttttacgttccggttttaaattggaggctttcattattgtatttaaagtattggtataaatattcccgccattaggcaattcaattgtaccaaatccataagcctggtttacataataaggatcggtatcattacctacttgtgcccacgagccacgaaccttagcgaaagagatccattcgggcaattgctcacggaatgtttcactaataatccaagaacctgaaactgaagggtaaaaataagaatgattacctgtaccattagcataaactaatgcagaagaccaatcattacgtcctgtaacatccaaatagacttgattcttccatcctaaatttaaagcaaaaatggcagaaagcatacgtttttcgcttttcaatccaccatcggattttttaggattctttgagttatcaacgaaccattgtccaggaaccaccatacctccgtcagtatttacagaatattcatatctgctagtattataatattcaaagcgtgcaaagccaccaatataataatcttttatagttttgttccaagtaaacgagccaccaaaagtggtttgttcctttgtgttttgccaaattttataatagcctccatcattggcatatccggttcctaattctttgttatcaccacgattgtagtaataattcatattagcatcagctttaaatttcagccagtcggttattttcatattaacttcaaaagtagggcgtacaactgtttctttttggcgataatcatatttatcaatttcgaaccaataggttttaccaggaacatttccatagatgtcaccataatcagtacttgccactccaccatgttcaccgagatatttgttacggaaatattgggggtcataattgggagtccatgttccgtttacgaaattttcaccgatattgcgtgctgcatttcttggcgttgaattagaaaaattcacagaagctgcaacatctacccaatcatttaatttatgtgttgcttttaccaagaaagaataacgctcaaatgtattattcggagtagtggattcagcatgtttataagacatggaagcatagaatgtggttttgtcattaccaccatgaatagctagatttgtattggtgttgaaacctatttgatacatatccaacatattatttttatgtggggaataagtagtcattgtaccgtcataattttcaatttgactaccgtcatatttaggaccaaatccagttccccaagttccaattaaggtatgttgtccagctgagttcacttggaattgtgttggttgccagatattaccatcaccatctgcgtcataacgtcctacatacggaccatcaccatagacagtctgaatatctggagttttatatgcatggtcgataccgaatgtttgagagaaactgatacctaatccactaccacccttgccacttttagtagtaattacaacagcaccattcaaaccacgagaaccatagagtgcagtcgctgcggcaccttttaaaacagaaactgtttcaaaatcatcaggatttagatttttcaattcattaccatagtcactggaattactcccccagttcaagtcatcattaccagatacattattatccagtataacaccgtctactacataaataggctggttgttattgcccatcgtggaagcaccacggatttgaattttggctgcgccaaagataccaccatctgaactggaaatttcaacacctgctacttttccttgtaatgcagtaaccggagaaatggtgttggctgctttcaattcatcaccccttacttcggtaacggcataacccagcgccttttcctcacgtttcaatcctagagcggttacaactacctcacccaacaattgagtatcatctttcaaaagaacatctagaggtttcccggtccattttatttcttgagtagcataaccaacgaaagagataacaatgatatccccttcctttacattacttaaagagaagtcaccgtcaagccctgtgatagtaccattcgtagtccctttcactactacagatgcaccgataacaccttctcccgtagcatccttgacgatacccgtacatgtccctgtctgttgtgtgattttcacatcggtaacgccgggattggcgaccgcgtatgctgctccggtagaggcacccattaggaacagcaacatactgactgattttagtcgttttaacatagctgtgattttttttaaagtttattgaaaatcaagtaattccgtttccttagttccttcagaactactcttacagctatgtatctgataatcaaagcatatgtactttagtaattttaagatgatctttgtccttgaatttacaaacaggaaataaatttgcgatttctaccagttttctactagctaccatcccgttaccatagtcaaatttaaattaggataggattaataaatattgtattgtaatactttttattctgtcaccacatatcgctggacttcaatattatatggtgacagaactttcagtatttcctcgaaatggtttatcagttagagccggttcagcagatactggtcgccatagcgggtatgtaatttcttcactcccatcagagccaaatgttttccgaaggctctcatcttgacatcacgcatggtttcaggactggcctttttcatcacttcataaatctggccgatagtccatctttgaaacttctccccatcccggggcagactgaagcagctataaaagaggctttcctctatgggacggcgcaaaaatgcgtcattacgcaagctgacagcctgttcttctttgggtgagagccaatagcggcggttatgttttagttcatctcttaactgagcataaagttgtttataattgatgcgaggcaaacggatactccctttggtcatcaccggataaaaacggcggttaccggaagaatcggtcagcagatcgcaaaaattggaagtgccaataaatgaactaaggcgcggttgctggctatagctgctttgaaacggacggcgcatactaagaccgctcatttggactagattcttcaaccgtgccagtttaccttcttccatccgattgaattcgtctatattgataagagccaaagagcgcattttgcgcagggtatccccctcgcgggtcacatcgaagtcatcggtataatatccacgtaacgctggtggaaggagcgaccggcaaaaggtagacttcttcaggccctgaaggggattaaccaaaatgggaatcaggcagttgccatgcatccggtttttaccgctccattgcatcaccatgcccagcatccagatatgaaacacctccacccattgcgtttcatcgcttaccgagtgtgccagctcgcttactctgtcgtgcccgtcccagtgtggcagatgttccaaataggctgtcacggggtgaaaagaaggaatgcgtgacgaacccagataacggcgcatatcacggtccatacagttcacgccttcctctattgcattaataaccaatgtgttgaattctcgctcatccaccacacggtatttatcgaacttgtgcttgtcatgaaattcgcattgttctgttatttggttgtaacgaaaggaataatgagtggtgaggaacgaatcaagccctttcatggcttgtttcagttttgagtctttttctttttccattaaatctgtttttttattgatttgaggtgtgaagatagttctgcaaaacagggttttgcaagaactttgcccgacaaattaaaataaatccaacgtgtgaaacatttatggcagaatctttgcaagaggacgaaagaatccgtatcttcgtccggaagaatctgggttctcactgacgtgaagttgcctactcactttagtgaagagccattgccacacgggtgaaactgccgcttcactaaggtgaagcaacagaatgttctgtaagtttgcacgataacatcctataaataaaacaaatacatagtacattatgtcagacattaaatttgatatctatgaatctccggcaaatgacggggaaaagaaaaaataccatgtgagaaacaccaacaagcagaccatccactcgaaggacttgatacacgaggctacgctttatacttcagtaagccgttcggactgggcggcagtggtagagggactgatagatattctgtccgagaaattaggtgacggcaaacgaatccatatcaacggattagggtatttctctgtcagtatcggctccacagaaagtgaaaatcctaagaagatgacccgtggcacagtacagataacaggagtcaacttccagcctgagaaaagtttcaagaagagtattataagccgggcacattttgtaagagaacgatacaaggtgcacacggtggacttgtcgcctatcgaagtggacgggctgctgagtgaatattttaaagatcatcgcagtatcacctgcgcccggatgcagcaggtctgcggaatgacccgttctaccgcataccgccgcctacaggcactgacccaaggagcccatccgtcattacaacgcgagggctacaaaaatgccactgcctacataccggttaaagggcattacggacgttcctacacggcagatcgctggtaacgagccagatagggtgaagggagaattttgtgtttcatgtaaaatgaattgttatatcatactttaaaataagaaaaaatgaaaagaaccatcttgaaaaacgtaggaatcggcttgtgcttcctgcttagcaccgggacggtctgcgcgcagaactaccctggaaaagtgaagaatgcacaaggtatcgaggtgacctaccaatcgaattacaaagggaaagcccggccgggacatctgttgatgaccgtgtccggtgaccgcgtatcattgaccaacgtatggccggagcaaaacgaccgtcccaatccccgcccggaagacaagacacctgtaaccggcagttacatagactacactacccggcaggcataccgcagggctgaactacctaacggacaagtgatatctgcggtcactcccttcgaattcggcaaaggtttcacgcaaacgggcgaaggaaaacacttagggatgaactgcaaaattttgcgcacatccatcaattccaacaccatcgaggtgtggtataccaacgacatcccttttcgtggtactccgcaagccaatgtgggtgtacctgacggattggtactgagagtcgtgcgaaacggtgacatgattcaggaagccacccatattaccccgctgaagaaaggaaaggatgtgttgccacagtcgtggggggaaagcatggatgcggccgactaccaatataccatcaaccaaagcggagttatcacaattccggtcttcgaccagcagagcatctgcttcaacaacgctaaattgcccgaagtactggaggatggcgtacaatacagtgccggaggcggcaccatcctgttgaagaaagtgaagctgcccgactatgtgaagaatcgtaccgtctttgcggaagttgtccaatactcggacggtgatgcttacgaccgcaccggttctgtctttctgataccggaaggcaagcagctgtcttttcttgatgccatacgtgatttgaagaaagttccctctttccgctcggaaaatacggactaccacgggctgatttccacagcggagtatgatgtgcctttagagttgatgcgtttcttcaccggtttcggtgtgcgcaagttcaattataataaggtgaagggacaggactgggtggactccgtactttacaaaatggaggtaaccccactggccgaaaaattggaaggggaagcttggattggcgcttacatcggcaactgggatgccaaaggacatcgtctgtcgttgaaactgaagtattatcctgatgaagaacatcgagtttataatactcttccgctgttcaatacagtgaattatctggagcaggcaggacagccttatccgattttcatgcgtcaggattctctgaccgtaaagttcaccttgaaggagcctgccaagaacgcccgtctgtactatctcaccacgggacatggcggttggggaggcggtgatgagttcaaccagaaaccgaacactctctatttggacggtgaaaaggtgatctctttcgtaccttggcgggatgattgtggaacttatcgtaactggaatccttgttcgggtaatttctccaatggactgagctcttccgacttgagccgttccaactggtgtccgggtacggtgaccaatcccgaatacatctatttgggtgatctggaagcgggtgaacacagcatcaccgtaaaaataccacagggtgctcccgaagggggaagcaatagttattggtgtatctcaggtacgcttatttattaatgtaaattcctttgtcctgcgataacagaaatgtttctgtcaccgcaggacaaggaatgttccaacttttctatctcctcaaaggacaatcttgtccttgggcaagttgtcacatgggcaagttcaaggacttaaaattacagcctacagtttgtttggacttctttccctcttccgttcttcctttcatattccttctttcctttcatcttttgattgttgtctgcaatactgtctatataaaaaaggtatattttctctagcaatacaccaacggcatggactggcattaccttttttcctttggttcttatcccaatatgcgttacctgttttctaccgactaccaaacaaacggtaaatattcgatgaaaaaacaatataaatcatttcaagaaagttctgtgaaagttatcggttctctctttaaatagggggctccagatatctcaaacgttaaaaatcagagcatattaaaaatatttttcaatagattctttatatatattaaaattgttatatatttgcaccgttaatctaaattaaattgaaaaacatagttctgaaggaactaag

SEQ ID NO: 3889 - DNA, 102019 bp, Unknown
  gut microbiota DNA sequence
gtatatttttaagatggttaagaatattatcaagtaatagcttatatttttctcacagggtgaggaaaagcgtttccttattctgtatttaataagaaaaaacatttcgtcggatagaaaaagatgtaagaaatatgattccgtttttgagatgtcaaaaatggaaagaggtgtcgtgtaattttgtaaattagttaaagtactgacagatgcaatattgtgcttgtgcttatgtgtttttctataattgaataaaatatagtggattaatacagatttataagctttttctttggatttatgaggaaatattccctactttgtgaaagtaatcatccattacttggtaagtaattcttcttttatttgaatggctgtcatatgatattcctcatgccacttccttttctccattatgtgctactaccgagattatcagttcgtcattggctatatctaccttttcgttttcaaatggtttcaagtaagtttctgtcaccttaatggaagagtgtcccaatgccttgcagataataccgatatttactcctgcatgaaatgctaatgtcgcccatgtatggcgcggcgtgtatgaactgagctttgcatcaggcagtaacaatgtcgctattttttctagcttcaagttgaagttgcgcagtactcggagatagttcatatatagctctttatctttttttatttttccatttttctgactctgttcctttgctgcgttttttttgtctagaatcggaaatagataaatggaatcataattcatattcttgaacttctctatcagttttattgcttctttaggaatgcgcactgttatctgtcgtcctgttttgtgacggctatatacaatatattttcctttcacatcttgttttcgtagatgggcaaggtcaatgaatggcattccccggaatagaaacattagtaagaaatatgccaatgcacattgcatctctttgggcaatttttctatatcggtgtgcagtagtgtattcatttgttttgtatccagtgctcgtttggtctgtgattctacctttgtgtatacattatcgaatagcttcgggttataaggcagtatttttttatcggcaagtcggttatatacagctttcagggttcgcatataggttgatatggtattcaaactcaggcctttcggtactccatgttttctatctgaccttttcttgtcggtctttctgtttcttgttccttccagtctcatccattcctcatactcttttaacctgccagatgtgaaagcttcatctattggcacaggtgttccttttcctccgtaaaactccgtaacggatttcagtgtataagtatatgtatgtactgctgaccattttttgtctatttccaactgtttgattactacttgcatgtaagatgccaagtctggtaattttatggcttttgccacttctgcatttttttctttgtcatccataatactttgattttaatttcgcatcgtgcataatttctgtaacagctgtgccgatgggaaagttttgggatgcgaaatttttattttgacctaatgaatttagaatatcactggttgaatatatcgaaagataagcatatattctccggaagttatctttctttttgattaaggtatagaagaatttctctaaatgtattattatgagatgaaataatcttcgaatcaaataaagaaagtctgaatctataataaaagtaggcttatttttttgattcccccacgagaagtatgcgtttttttattcgtttattccagtgaattaattacctttgcatttcattgaagttgaactgaggtaaatagattaggcattgaattacaaagatttatttaagcgagtaatatcgctgatttcatctccggcaaaagcatgggaggaaattggcaaggaagaggataggcgtaaagtgctgggagcatttgtttatcccatgataggtttatgcggattgtccgtttttataggtacattcattgggaatacggcaggggtcgctgctttccagatagcaatgacacgatgttgtgctatatttgtatccttgttcggaggatattttttggcggcatatgtcatagaccagttgggcaagaagctgttaggacgtgaagaccagtatgaactaaatcagcagtttgtaggttattctatggtagtgacttttgtgctcgatattgtcagtgggttgttctctatttccattctccattggatattgcaattttatactatattcgtggtgttcgagggtgcgcgtaccctgatgaaggtgaatgagacgaaactgacacgatacaccttgattgcttcagttattataattgtttgtccggcattgattgccgctgtgtttaatgagttatctgttattttaaattaatgaaaccgactcctattaatataaagaataagcgtgcatcgttcgattatgaatttatcgatacgtacacggcaggtatcgtgctcacgggaaccgagataaagtccatccgtttgggcaaagccagtctggtagatacctattgttattttgtgcaaggcgagttgtgggtgaagaatatgcacatagccgaatacttttacggctcatacaataaccattctgcccgtcgcgaacgtaaattgttgttaaataagaaagaactgcggaaattggaagaagccggaaagaaccccggttttacgattgtccctgtccgtctgtttattaatgagaaaggactggcgaagctggttgtcgcattggctaaaggtaagaaacaatatgataagcgcgagtcattgaaagagaaggacgaccgtcgcgaaatggaccgtatgtttaaaaggtaagtgaaatccgtgttatccgtaccccaaaaatagacttatggctacattaaaacaactaattgacgagagagttctcattcttgatggtgcaatgggaactatgatacaaaggtataatttgtctgaacaggatttccggggagagcgttttgctgagatgcccggacagatgaagggcaataatgacttgctttgtcttacccgccctgatgtgataaaggatatccaccataaatatctggaagcaggggctgatattattgaaacaaatacgttcaatgcccaacgggtttcgatggcagattatcatatgcaggatttgtgccgtgagattaatctggccgctgccggacttgctcgcgaaatggctgacgaatataccgcaaagacccctcataaacctagatttgtagcaggttcggtaggtcctaccaacaaaacttgttccatgagcccggatgtcaataatccggccttgcgtgctttgacatacgatgaactggccgctgcctatcaggaacaaatggaagccttgctggaaggaggagtggatgcgcttctgatagaaaccattttcgattccctgaatgccaaagcggccatttatgctgcggaaacggcaatgaagaagatagggcgtgaggttcctcttatgctttctgttactgtttcggatattgcaggacgtactctttcggggcaaacattggatgcttttctggcatccgtacagcatgcgcctattttttctatcggcctgaactgctcgttcggagcgaaacaattgaaaccttttctggaagggctggctgcacgggcaccttattatataagtgcctatcccaatgccggacttcctaacagtttgggacagtacgaccagactccggaggaaatggcttcagaagtgaaggaatatatcgatgaaggattagtaaacattatcggtggttgttgtggtacaacggaggaatatattgcaaaatatcaggaattgatcgtttccggttctgcctgggtatctcctcatatccctgccaccactcctgagaggctgtggctttccggattggagctgttggagcagactcccgaaatgaattttattaatgtaggcgaacggtgcaatgtggccggatcccgtaagttcctccgtttaatcaatgaaaagaaatatgaggaagcgctaagtatcgctcgcaagcaggtggaagacggtgctttggtgattgatgtaaatatggatgacggtttgctggatgctcgggaggagatgactactttcttgaatctggtcatgtccgaacccgacatagcccgtgtacctgtcatgattgactcttccaagtgggaagtcattgaggccggactgaaatgcctgcaaggaaagtccattgtcaattctatttctttgaaggaaggggaggagatgtttatagaacatgcccgtctgataaaaaaactgggagctgccgttgtagtgatggctttcgatgaaaaaggacaggcagatacttttgaacgtaagattgaagtctgtgcccgtgcttataaaatattgacagaacaggtggattttaatcctcatgatatcattttcgaccctaatgtactggctgtggctacgggtattgaggaacatgataattatgcggtggattttatcaaggctaccggatggatcaaaaagaatttgcccggtgcacacgtcagtggtggcgtgagtaacctgtcgttctccttccgtggaaataactatatccgtgaggcgatgcatgccgtgtttctttatcacgctatccgtcaaggtatggatatgggtattgtaaatcctgctgcttcggtgctctatacggatattcctgctgatgtgctggaacggatagaggatgtggtcttaaaccgtaggcccgatgctgccgaacgtttgatagagactgctgaggccttgaaaaatacggcgaccggaacagaagcggtgaaacaggatgtgtggcgtgaggaaccgatggtagagaaacggcttcagtatgccttgataaaaggcattggcgatcatttggaagaggatttggcagaagcggttaaactgtatcctaaagcagtggatattattgagggtccgttaatggaaggtatgaataaagtcggagaattgtttggagcagggaaaatgtttttaccgcaagttgtgaagactgcccgtaccatgaaaaaggcggtagcgattttgcagccgcttattgaggccgacaaacaggaaggtgtccgcagtgcaggaaaagtattgatggctaccgtaaaaggggatgtgcatgatattgggaagaatatcgtatcagtggtcatggcttgtaataactatgaaattatagaccttggcgtgatggttcctgccgaaatgatagtcaggaaggctatagaggaaaaggtggatataataggattaagcgggctgattactccatcattggaagaaatggcgcatgtggctgtagagttaaagcgtgcggggctggacattcccattatgattggaggagccactacttccaagctgcatactgccttgaaaatagcacctgtttatggaggtccggtcattcacatgaaagatgcttcacagaatgccttggtagccgcccgtttgctgaatccggaatcttcttctgagtttgtggaaaggctgaacaaagaatatgaggatcttcgtctgaaaaacagtgccaggcaggtaaaaacggtatctttggaagaagctcagaaaaataaattgaacctttggtcataaagaagtgccccccaaaaaagttagacacaaaacttttggggggcacttcataaaattacgactttttttatctgcccattttattcgaaagaataagaagctgtttgctagcaaacaaaacagtatcccgcctgaaataacccattattttaggcgggatactgttttatgttatggatatatttctaggactggttagaatttactgagaaactcttccgctttttccagattttcgggtttgccgatatcaagcaattgcaagtcatcttctacatagcactggatgtcgaccctgtgacatatggagagatagaaatcgataatggaatattttcctttgggaaggagatgtaaaattttaggggtggtcacttgtattccgctataggcgtattcctggtattccccttctctataccggaatcctgccggtttggtttccatggtgtccttattgacccagccacataacagattgtcgtcattaaacaacaggtaacgggaggtcttgcgtggactgactaaaagggtggcattgatgttaggactatgctggtgataatacatcagactttcaaaatcgcaattggaaaggatatctacgttgtggagcaagtagcattctttccgcataactcctaaggttttttcgattatctcttcctcatccatccctttgttcagattttcgaatatcagttcatacggggtttcgcctttttgggtaaacatattctcaggatggtataataaatggtatgctttttccaaaccgccgccggtatcaagcaggcagtctgtttcgtccgagatttgtatgttgactccaaagttctggttagcttccagaaaagcaagaatctgattggaaaagtggtgtacgttaatcactatttcatcaaatcctgctgctttcagctttaagatgatgtgctctaacatggtttttccacctaccgtaactaaagctttgggacgggtgtctgttataggtttaagtcggctgcctagtccggcggcaaaaatcattgctttcataatgttctttcaaatgtttgttctatattctgttcacggtgtatgagttctacttttacaccgaattttttattgatatgttctgccatgtgttgcgctgaataaacagaacggtgttgtccgcctgtacagccgaaacatacagacagattgctgaaacctcgttccatgtatctttttactgaagcatccactaaagaataggcagcatttaaaaatgggaatatttccccgtcttcttccaaaaaacgaataacaggctcgtctaacccggtgaaaggtttgtaacgttcatattttccgggattgtttacggcacggcagtcgaaaacatacccgccaccgttgcctgtggggtcgttgggtattccttttttgtaggcaaaactcataaccttcacagtgagttgccgtttttttaagtcatctttaaattgtttcagttcggtcaggtcttttagtacggaacacaggtaggaatattcggggtattcattatgaagcaattgtcgcaggttctcgatggcgtatggtacactttggatgaaatgtggcttcttttcgaaatagccacggaaaccgtaggctcccaatacctgcaaggtgcggaagagtacgaagtgacgcaactggctaaagaaataatcacggtctactggtttgtatttggagagggcgtctatatattcttccaacagttcgttgcgcagggtttcgggaaatttagctttagcctgccataagaaagaggctacgtcatagaaaaacggtcctttacgtcctccctggaaatcaatgaaccaaggtgccccatcctttatcatcacgtttctgctttggaaatcccgatacataaaggtggcggaagagctgcgtaacagtacatcactcattttttgaaagtcatcttccagcttgtcttcttgaaactccaggccggtagctttcaaaaagcagtatttaaaatagttcaagtcccaaaggatagaacgttggttgaattcggcttggggataacagtgtgaaaaatcaaagccgtctgctccggcaaattggatggaaggcagtaggcggatggtcttgcgcagcatttctttctcctcttcggagaagacgctggtcgcccgccctttttcaatagcgttgaacaacaggatatctcctaaatcttcttgcaaataacaattcttgtcttcagaacagatgtatacttctggaacaggaagacctttcttgcggaagtgtgctgccatataaagaaaggcttcgttttcttctttggaagtgccgtatacgccaatcagtttttgggttccggtcagccggaaataacgcctgttggaaccggatgagggtaattctacaatctcttcgggtacttctccgagataggtttgatataggttctgtaaatcctttgtaatcataatcatattttggaacaaagatatatattattctccctttcttggctgatttgcaaagaaagttaatgctttagttccaaattatgagaaaattacttgtttttactctttcatccgtatcagtgcatttgaaatgatggcagtcactccgcctgttgtaatgccggatgagaaaatattctttattgattccggaaattgacatagtatttcaggaaccatttctacacttaaacctaaagcgaaactaagtgcgatgactaatgttgctttccggttgatcttctgtgctgcgataatacgaatgcctgctgaagctactgttccgaacatcagtaaagtagcgcctcccaatacaggttcgggcattagggagaaaattaatcctacactgggaaataatcctgatagaataagaaaacctgcaatgtaatagcctacatatcggctggctactcctgtcagttgtatcataccgttattttgcgcgaaaacggagtttggaaaagagttgagaatacctgccagcatcgaattgaatccgtctgccaaaattcctcccgaagcacgtttgatgaatgtttttccttctacaggttctcctgatatcagtgagttggcagtaatgtctccataggcttctatggctgttatcaagaatactaaccccaaagctatgaatgcggaaaagtcgaaatccagtccgtatttaaatgggaggggaatattgaaaccaccaaaactttgtactgccgagaaatcaattctaccgagtccccaggcaactaaatatcctataatcagaccgataacgatggaactcatacgtaggtagcggttggaacttctattaaaaaggataatgaggataagtaccagcagagctagacctagattctcaaaacttccgaaagtgccgttgctttgggcggaaacacccccgccacaagctgtgatacctacttttatcaggctcattccaatcaaagtgactacaatgcccgataccagaggggtgattattttacgggtatattttaagatgcggctgatgaccatctctacagatgatgccacgatgcaagtgccgaaaatcagtggaagtccgcccagcatacctgccgagatgatgggaccgataaatgaaaaactggttccttggatacataagagaccggtgccgatgcctcctatccgtctgcattggataaaggtagaaatacctgaggcaaagagagacatggatactaggaaactggtggtctccaaatccagttttaatgctccagcgatgataagaggcggagtgatgatggctacaaaaatagcaagcaaatgctgtatggcagcaaaaatggcctctcgtacaggggggcggtcgttcaatccgtaaatcagtccggtattggattgggcggtttgagattcctgcatggggttatcttattttgatttcacaattgtccagactttcaatgatggccaatgattctacgcggatacctgcattacgcaaataatctccgccatgttggaatgctttttcgatgatgaatcccattccggacagttcggctccggctttttctaccaaatcgatgatacccttggctgcattgccgttggcgagaaagtcgtcaataaaaagaacacggtctcctttggacaggaaatctttgctgacacatacatcataagaacggtctttagtaaatgaatatacactggtggtgagcatattttccattgtgacgggtttctttttcttggcgaagacaacaggaagttccagtaagtagcctaccatgatggcgggagctataccactggcttcgatggtcataactttattgatattggtagaggcgaaacggcgtacaaattctacagcaatggatttcatgaggataggatccatttggtgattgatgaaattgtctactttcagtattcctccttcgaaacattttccgtcccgtaaaatgcgttcttttaatgctttcattcaaactgtattttataaatgagtcgcaaaagtacgtattttgctgcattatgccaaacgtttgtacaactatctctacagaagcctatttacttaatgatcaggaaagccggaataaataagcctgtggaagcataagctggtgtggattaaagaatgtttatttccacaaactttagtttatatatttggtgtgtacttcttttcttgataatttagttctcaatataattttcttagtttagtattcttacttggcgaagatattctaatgggaggaaatgactgaatatgatgtatatttttcttgtcttttatgatatctgtcggtaggtaaacatttaaatttaaccattatgaaaaagatatttttatcacttgtattcctttttggtgtaggaatttttgtcatggctgatgataccatgaaagtaaagaatgatacagttgccgttgaagacggatttaaaaacatagacctgaaagaggttcctcaatctgttaaagatgccatagccaaaaaatatcccgaatcaactcttaaaagtgcttctctttctctgaaagaagaaggggtgaaggcatatagaataatatatgtaaccaaggaaggggttgaaaatagtattcttattaatataaagacggctcctgctaaaacggctcctgctacaaagtagtttgacaggtagtatagaattgaatgttttattaatatattgaaagccaccttgctatggtggctttttttgatgggataagtttttttcctgtcggatttagattttatatgtatcaaagaacaggttgaatttgtaagaaataggctatatgcttatatttgaacatagtttaaaatcaagtttataatcaaatagaaaaagtatgaaaagacaattatttacagtgttagtgtgcatgacggtgtttgctgttacatcttgtggcgaaaagaaaggaaaggataaattcgaggagcgtatagaaaaagccaaagaatcggttgaagatgtggtggatgatgccaaagatcaaattgaggataaagccgatgaggttggggaaaccttggataaagctaaaagcaagatagaaaaagccaaaaagaaacttgataaggctaatagagattgagaaaaattgattatggatgaatggaaagagattgtcggctgatttatattaaaccagccgacttaatttatatttctagacctttgttcaccatttgttataatggatattttcggtcttgaatttgtctttagcttcttcccgatgttgcggataacctaccggaatcaaattgaaaggaatgatatggtctggtaaagacaagactgacctaacctttgcaatgcggtcgttctccggatagaccgcagtccataccgctcccaaccccattgattctgctgccagcaacagattttcggatgcggcagagcagtccagcatccagtacctatctgtttctccgttcagggctttgcttaaatcaccacaaaccacgatggctagcggagcctgtgccgtcattttggcataaggcagttcggcggccagtttatccaatactttacggtcatccactaccacgaaagcccagggctgcttgtttactgctgtcggtgcagccatggcagcttttactaataaatccactttttctttttctatcggttggcgtgtataggtccggacgctctttcgggcaaagatattttctatagccgtgttctttcctgtttcttctttttttgcttccatattgttacaacctcctgtaattagtaatgttattgaaagagtaacagttgtcagagttttaaagattgttgccgcattcatttttattattgattaataattgagatggaattctaccacagcttcaattcctttgcggaatatatccagagagaagttttcattgggcgaatggatggcgtcactttccaatccgaatcccatgagaacggtctttatacctaggatttgttcaaaatcgctgatgataggaatacttcctccacggcgtacggcaagtggtttttttccgaatgccttagcaaagcctttttcggcagcctggtaagcgggcaaggtgatggggcatacatatccttcgcctccgtgcatcggggttacttttacttgtacatattccggagcgatagactggatatagtccacaaacaattgggaaattacagcgtggttttgatgtggaaccagtcggcacgataccttggcatatgcttttgagggaagtactgtttttgaaccttcgcctgtatatccgccccagatgccacaaatgtcaaaagagggacggcagctgttacgttctaaagtagaatatcctttttcacctttcagtgcttttacaccgatggcttccatgtattttttttcgtcgaaaggaatttgtgcaatcatctcacgttcggctgccggtacttcctctacatcgtcatagaaatgggggatagtgatgtgtccgtcttcgccaatgacttgggctaacatactgcacagggtattgataggattggctaccgctccgccgaagtgtccggaatgaaggtcacggttcggaccggtcacttctatttcccaataagccagtcctcgtaaacctgtggtcagagagggaagatccgcgcctagcatactggtatccgaaacaagaattacatcggctttcagcaattccttatgttccttgatgaaggtattcagactgggagaacctatttcttcttcaccttcgaaaataaatttcacattgtgtttcagcagtccgttttttactacgtattcgaatgcttttacttggatcatggcttgtcctttatcatcgtcagctccacgtgcccaaatgtgtccgtcacgaatttcaggttcaaaaggctggcttttccacaggtccaacggctcggcaggcattacgtcatagtgggcataaatcaatagggtaggagcatcattgcttacatgcttttgtgcaaataccaatggattgccttgtgagggcattaccatggcttcgtctgctccggctgccaacaaaagttctttccaacgtaaggcacaggccagcatatcgtctttatgttcgggtaaagcactgatactgggaatacggatgaggctgaaaagttcctccatgaagcgcgcttcattttctttaatgtattgttttatttccataattgaatgattcttatagttgtgtagttctgtctatcagataataatccaaaatggtcatggcagccatggcttctacaatggggacggcacgcggcagtacgcaggcatcatgacgccctttggctttcatggtcgtgtctgtgccgttgatatttactgtatgttgctccatcagaattgtggcaactggcttgaatgccacacggaagtaaatgtcttgcccgttgctgatgcctccttgtattcctccggaataattactttttgtttctactcttccgttattattataaaatacatcattctgctcactgccttttagctccatggagtcaaaaccttgtccgtaagagaaaccttttacggcattgatacttaacatggcatttcctagtgcggcatgtaacttaccgaatacgggttgccctagtccgatagggcatcctttgatgacgcaactcactaccccgcctattgtatcgccttctcctttgattttccagataagttctgccatttccttggctttctccggatcgggacaacgcacatcgtttgtttctatcaagtcgaggttatagcttttgtaatctttatcaagtttgacaggtcctacctgtgaggtataagctgtgacactgattcctagttgtttcaatgccaatttggctaaagctcctgctactacacgtgaaatggtttctcgtgctgatgaacgtcccccgccacggtagtcacggattccgtatttttgcatataagtataatctgcgtgtgaagggcggaacagattcttgatattctcgtagtcgtttgaatgttggttcttgttccataccacaaatccgatggggcagccggtggacttgccttcgaatatacctgaaaggaattccactgtatcaggctccttgcggctggtggtaagtaatgactgtccgggacggcggcggttcagttcctgctgaacgaaatccatatcaatcttaataccggcagggaagccgtcaatgacgccgcctactcccggtccatgggattcaccgaaactggttaaccggaaaatattaccaaatgaattgaacatattgcttgtagttttaaaagtttctttccgtaaagataatgattttagggataatatacttgattgttgctgaaaaattagcagaatggataaaaatggggtacggattgtatgaattttacagtttggaataagaaaaactgtaaaattcatacaatccgtacccggaaactgtttcttaaggatggaaacaggtatcttttacgagttagaattctaccttaggtgctttatcggctccttcctcagattcaaaatatgggcgtttgtcaaatccgaacatgccagcaagcaagttacgggggaaagtacggatggctgtgttatatgcccgtgctgtgtcattgaatcttttgcgttctacactgatccggttttctgtaccttccaattgtgcttgcaactctttgaagttctcattggctttcaagtcgggataagcttcggtgatagcgagcaggcggctcaatgcactacctacttcgccttgtgccttttgataggcctgcattttttcgggagtcaggtcatcggcgctgatctgcatctgagtggctttgctacgggcgtctactacggcttgaaaagtttctttttcgtgtgaggcgtatccctttactgtatttaccaggttgggtattaaatcagaacggcgttggtactggttttctacattgctccacgctgtgctgacagattcatccatttttaccataccattataagaggttattccccaaatggcaattaatacaatgactactattacaataatcgttgactttttcatatgtatatactattaaaattatgaatattcttgttcttaaaaacggcttccggctcctccgcctccaaagcttccacctccgaaacttcctccgctaaatccgcctccacttccaccgtggccaccaaaaaatcctcctcccattccgcctatgaacggccctcctcctcgggggcctttgtaattttcatctctcgaccgttctttccgtctgaggatatgtccgcaatttctgcatttatatactacttcttcagtctttgttccgttacttcggtctataactttggaggaaagacgttgcagtttgtgttttttgcaatgggggcagcgtgttttacgccagtttgcatacaatccgatgccaataaatcctccgaaaatcacaaaaaagatgataatgaattccaagggatcatcttcgctttcgtcattgccgatattttccatggaaccgtccaggtagccgtttacagcccgtattcctgctaccattccggcgttccagttattgtccttgaaatagggcagcatatagcggttctgaatccgtttgcagatggcatccggcaatatcccttcaaggccatatccggtagcgaattgcacacaccgttcgtcggtggaaagcaagatgaccaatccattgtcacgttctttttgtcctacgcccgtttcctgtcccagccggtgggcaaaatcaaaacaatcacctccctctatgcctgttaccgctaccactaatgtctgtatacctgttttttgctctaaagcgtagaggatgctgtccatagtggtgacagcggtggatgaaaggataccgtcgggattgctgacgtagcgggtacggttttgcaaatgtaccatcggtatgtcttttatggcatattctttggcttgaagctggacggagcctagaagcatgaaaaaagtaagtaaaaatgtcaattttctcattggatgtatttgtctacaaatgcttttactttttgggtatattcttcagtattgaacagataggaatgtgcatggtctgcttccggaactatccataatgctttgggctgaggttttgcctcatacaatttgtacaccatccatgtgggtacgtagtcatctttatcaccatggataaagaacatgggcagatggcatcgggctacctgtttcaatgcggatgcttctttgaacccccatccatattccagctggcataaccagtcggcggtgtacattaacgggaattgaggcaagccgaattgttctttcagttctttggaaaattggtcccatacgctggtatatccgcagtcctcaacaaaacatttcacatagtcgggctgcggttcgcccgaaaccatcatagtggtggctgcacccatcgagattccatgtactaccatgctggtgctgtcaccgtaaattcgattggcaacctccatccattgtgttacatctttgcggtctaaccatcccatttgtatggcatttccaccgctcaggccagtgtcgcgtaaatctggtaggaggatgttgaaatccagttttttattgtatagataacctatcatcatcatgcggatggcattgtctgtatacccgtgtactataactgcggttttggctgtcgggcggctggaagccacatagtaagcatgcagttttacgtggtcgggagaatagataaaggtatccttcagtgcttggttctgtttcagactatctatccacggttttagataggggtaagtcttaaacatatattgccaggaactttccaaattctttcctctgttttcagggcgtaaggaatagttcagcatatattgactgcctccaagtaggactataataagcagaacgaatatactactcgttccaataatcattttttttcttttcataccttaactatttgttccatatatcccatgcaccaaaggcttgcaataagagcatttctaaaccgtttttggtaattgcccctttgtctgccccctttttcataaaaagagtagtgtcaggattatataacaaatcataaagcaaatggttgggtgtgagatattggtatggaatattggggtattcatcggcacggggatacatacctacaggagtacagttgacaactactttatactcatccatgatttcgggagtgagctgatcgtaagtcagcatttcttcacgcaggttccgtgatacgaatttgcattccaaacctaattttttcagtccgtaagcaatcgctttcgaggcacctcctgttcctaggatcagagcttttttgtgctggggttccagcaagggttcgatagattgagtgaagccaatcacatcggaattatagcctatcagcctggtcttacctttttggcggacaattttgattacattgacggctccgatggctgccgcatctttatccagttcgtccaaataagagatgacttgttctttataaggtatagtgacattgagccctactaaatcaggattagccaatagcacagaaggcagttctttgatggatgggatttcgaagtttacatattcggcatcaatgttttccgaatgaaacttttcattgaaaaagttctttgagaacgagtgtcctaacggataacctatcaaaccatattttttcataaaactctatactttaaattatttcgttgctaaataaagcgtacagatacctagtgtcaaccgcttgaaactcacctgattgaatccggctttacggataatgtctgtcattatttcgccttgtggaaaggctttgatggactgcggcaggtaagtgtaggcactacggtctttagagagtagcttgcccaaagtggggatgactattttagaatagacagcatatagctgtttcatggggaaccagtcgggttcggagagttccaaaatgactagttttccgttgtctttcagtacgcggtgcatttcgcggagtcctttgtcaaggtcttcgaaattgcgtacaccgaatgctacggtaatagcgtcaaagcgtttgtcgggaaaggtgagtgctgtacagtcttccttagcgaaagagatgcggctgtccagtccggcggcttttactttttcacgtcccacattcatcatgccttcggatatatcggtacctatcagctcttgggggtgaagtgtctgacaggcttgaatggcaaaatcgcccgttccggtggctacatccattatatgttgcgggtgaaaaggttccagccagttaatggctttgcggcgccagcttttgtcaatgttccatgaaagggcatgattcaactggtcgtaagcaggggcaatgttgtcgaacattttctctacttggacgcttttcttttcgtcagcgttgtagggcttgattttttcttgtgggtagttcatgtttaattaaaattgaaaattaaagattaaaaggagaggatggaggatagattcctgtacctgtcttttaatctttaatttttcatttttatttatttcaagtattcggttacgttcttttctatacgtgcggcgatattttcagtgtctgctttcacaaatttttcgccggtgatgtgttcgaacagttccatatagcgctcgctgatagaatttacgatttccggagtcatttcgggaacttgttgtccttctttgccttggaaaccattttccatcaaccattcgcgtacgaattctttagaaagttgtttttgaggttcgccttttgcaaagcgttcttcataaccttccaagtagaaataacggcttgaatccggagtgtggatctcatccatcagataaatagtgccgttgtgtttaccgaattcgtatttggtatctaccaggatcagtccgcgttctgcagcgatttcagtaccgcgtttgaacagagccaatgtatacttttccaatatttcgtattcttcgggagtggccagaccttgtttcagaatttcttccttagagatgtcttcgtcatgcaggcccatttcggctttagtggttggagtaatgattggttcgggaaatttctggttttctttcattccttcgggaagttttacaccacagatttcacgaacgccgtttttgtaagcacgccatgcgctaccgcacaggtaaccacggacaatcatttccacaggaaaaccttgacacataactcctacggtaaccataggatctggagtcgccattttccagttggggcagatgtcggtagttgcatccagaaatttggctgcaatctggttcagcatttgtcctttgtagggaataccttcaggcagaactacgtcgaatgcggagatacggtcggtagctaccattactaacttttcgtcattgatgttgtatacatcacgcactttgccgtggtacacacttttctgtcccggaaagttaaagtctgttcttgttaatgctttactcatgtctttatttataattaaaatcaataaattcgttttatgttttcagatttttcacttcgttcagaatgacatgaatgaaaggttttctgtttttcttcaaacttctcgtatgcttccacaatgcgggtaaccagtttgtgccgtacaatgtccttcttgttgagttcgatgaaactgattcctttcacgcctttcagaatttttagtgcctgtatcaaccccgaagtttgtgaagatggtaagtctatctgtgtcatgtcacctgttacaatcattttggtgttcatccccatacgggtgaggaacatcttaatttgctgggtggtggtattttgagcctcgtccaatatcactacagcatcattcaaggtgcgtccgcgcataaatgccaatggggctatttgaatcacattcaattccatatattcttttagcttggcggcgggaatcatatcttgtaatgcgtcatacagtggttgtagataagggtcaatcttatctttcatatcaccgggtaaaaatccgagtttttctcctgcctccacagccggacggctcaaaataatttttttgatttctttgtttttcagggaacggacagcaagggcgatagcagtgtatgtctttcctgaacctgcgggaccgatagcgaacagcatatcgttcttttcatattcttgtaccagcttcaactggttctcactacggggaacgatcggttttcctgttacactgaatacaatagtatcccctgtattctctatttggggtgaacgacctttcactatgtctaaaatcacttcttctttcagtgagttatactgggcgcaatgcttttccaatgccaatatattctcttcaaaagcacacatttcctcttcgtctcccaatactttgatgacatttccacgtgccacaatttttaatttgggatacaaagcttgtatcattttcatattgacgttgtttacgccataaaatatcacaggatcaatatcctctaaaactatatgtttttctatcatttaactagtttaggtactttatgtacttgtttatagggtgcaaatttaatgaaaggttttcattgttcttattttccgggcaatttatttgcataagctttttcagaaaaaggattttaatctatctttgcgaggaatttgaaaagatagttagattatgaattgtatgaaaggtgcatgttgcacgctattgtcactgttgttttccttgacagtttcttccggttgcaaggaaaaagatatgtccatgaagatgaacgagcctcataatataaaaggtgtaattagctataaacgtagtttcggtgatttgaatgatactcatctcagtgtggcgaagaaaataggaattcgtccgttggcttctcgttcggaagcagaggggctgggtggcaaattggttcagataaaaccctgtgagcgttatgccatggattcgctgactcactccattccttttctgattccgcaggctagtgcgttattggatacaataggagccaattttttggattcattgagttgcaaaggattgaatcctaatcaaatcattgttacttctgtacttcgtacggcagatgatgtgaaacgtcttcgtcgtcgcaatggaaatgcttctgccaattcagctcatgcttttgggacaactttcgatgtcagttaccgtcggttttgtaaagtggaagacccggatggacgtcctatgcaggatgttagtccggatacgctgaagttggtattggccgaggtactccgtgatcttcggaaatcggacaaatgctatattaaatatgagttgaaacagggatgttttcatataacagcccgctgatttattgaattttcacttggtcggaggctttacgatgcggtatttcatatatttggcttatgatggaacgaattatcacggttggcagattcagcccaatggtgacagtgtacaggaaacattaatgcgtgctctttctacttttctccgtcaagaaatagaggtagtgggagcgggacgtactgatgccggtgtgcatgcgcgtctcatgatcgcgcattttgattatgaccgggagttggattgtgttcagataacggagaaattgaatcgcttgcttcctcccgatatagcggtttacgctgtaaagcgggtgaaggatgatgcgcatgcccgttttgacgcgacttatcgtacttataagtattatgtgactacccggaaagatccgtttaaccgtcactatgcctggaggctttttaattcattggattttgagaaaatgaatgaggctgcccgtgtattgtttgattatactgattttaccagtttcagtaaattgcatactgatgtgaagacgaataattgccggattatgcatgctgaatggacgcaggtgagcgggacagaatgggtatttactattaaagctgaccgttttttacggaatatggtaagggctgtggtaggtacgttggtagaagtgggacgtggtaaaatgactgtggatgagttcaggaaagtgatagaggataaagatcgttgtagtgccgggagttctgttccgggacatgccttgtttttggtagatgtgggatatccggaagaactgtttattgtttctccgtcagatatttccaatatctgacaggcatatcttgccggtgttttctgagattccaacgttctttgatgcaaatggacttgaaatatgttttccaaagtttctgaaacaatttctcatcattgtccatcaatgtttcatttagcattcctgtgaccagatgtgcttggcgggggtcttcaaatgttacttcttccatctccgtcagattatagtaatatccatattgtcgcttcacatcataaatgagccaacgctggtcggcaaaccggtctttgaaatgatccacagccagtggcagtgcgttgaattgaggctctacggctgcaaagaaagttccgtccgcagctttttggaaacggacgaactgcatgaggtgtactcgttctccatctactcttttatagattttcgcaagctccagcacatcaggatcggcaaagttggtttcgatggaatgaggagagtttatggccttccggatatagcggaaaagcatttcgtccacctttggtaattctgataaccagcagcaggtcaggcagaacagggcatgcttggagatttttttctgtaatccgcgccacactcgtccggctttctcttcatcagtggctatgtgtatggcttcatcataaaataagggtagcggctcgccttccatcaagagcgagtctggaaaggttttgcggaagtaggcatcgaaaatgcaagtcagcaagccttcaaatgtatggtcatagataaacagaatcattcgttatcagtgaagtttagtattaattggcgttcgtccactttctttttgggtttgggtactaacagtctgcgtactcctgtcggggtcagttcattaacagttcgggtggggagttcgttgcaggttatgaagtattgcgcttttttcatcactacacctatttttttcagttcatagaatcccagtttggagaagcggcgtgatgcgatgatttgtcttgccgatttgattccgatgcccggtactctgagaatcatttcgtaatctgcctgatttatatctatcggaaatagttcgggatgccgtaatgcccaacctagtttgggatcgatttccaaatccaggtcgggataggagtcatctactatttcttctactttaaattgatagaaacgtaacagccagtcggcctgatacaaacggttctcccgtaccaatggcggctgtttcagtgccggaagtcgtttgtcgtatgtatttacggatatatatcctgagtagtaaacgcgcctcatggtggggtgttggtagagtgaagaagaaagataaaggatgtctttgtctgattcggttgtggcaccgacaatcatctgcgtgctttgtccggcaggaacgaagcgtggaacatggcggaattttttccggtcttccttattggtaagtactccctgctggatatagcgcatgggctggtacacacttttgtgatctttttcgggagccagtaatttcagattctcttctttgggaatttctatgtttacactgaggcggtcagcgtagagtccggcttcattaactagttcgcgactggctccggggatgcttttcaggtgaatatatccgttgaatttgtgtactaaccgcaggtctttggcaacacgtaccaacctttccatggtgtaatccggattgcgtacaacgccggagctgaggaaaagcccttctatatagttgcgccggtagaattcgatggtgaggtctaccagttcgcttaccgaaagtgtggcacggggaatgtcattgcttcttctattgatacaataggcacagtcatatatgcaataattggtcagcataattttcagcaaggatatgcaacgaccgtcctcggcgaagctgtggcatattccccagccgcctacggtgtttcccaatgtgcctgattggttacggcgcacagtcccactactggagcaggaaacatcatatttggcagattctgctagtactttcaatttggcaaggacattctcattcatttaatcagaatatttctgccaaaaatacagatagtctttggaatgggcaaacggtttggcattttctccgttaatttttaacttctttgttggattatgctgttccttttttctaattacaatataagcccgcttgctttaagcaggtgtgtattggtggtgactataattcttttaacttctttgtggagaatatatggggtattggaacgtggatgaactctgtatgaattccatcgctttttttatgttaagatgctacttaaacattagtttatgtaatataaattaaggcggtttgcaaattatttattaatttcgcacttcatttttaatgtttaatataaaaaatatttatggagtggtttaagaaaaaaatgagagtctttctttttgtctgtttgttattccctttttatagttatgcggcaaagatttctttgtctataagtggtaaaatagaagatcattcagcaatgctttattttcctgacgggagagaacttcctatttcaatagatgcttcaggaaagggagaattggtagtcgatgttacggagcctgtttatgtggcattaggttatcattatataagtcgtactttgttgcttacacctgatacagatatacaaatttcttttgaaaataaaaaatttggagaacgtgtagccattacaggcacaggttcacaagtaaatatctatttgaataacggacgtttgaaagcagcaaaaattgatgatatggcattaggagaaaaagcgttctttttgaaaatggatagtattttgaatgtaaatctgcaagagttggatcatgccggattatcagaggaaattaatgaaatggagaaaatacgtttgaaatattttacttgtgctacattgccttcttatccttatttccatatgcgtatagctaaggattctacttatgaagcttctttagaatattggagtaagttacaggagttgatggttatggatgcttctttgttgcgatatgacgaattccgttcatttttggttgaggcggtaagcagagtggcaagaaaacaatacccggaatcaaagtctttggatgcggtagtccgatatgtggaatcggaagtgaaggagcctggtattgcagagttcttaataaataagaatgtatatgcttatgtagagagatatggacttgattctgctgatgcttattgtgctgtgttcgatcggtatgtaaaatcaccgctattggtgaagaattttgagacattgtgcaatcgttggcgcaaattgtcggtaggagctctttctccaaattttaactgtacggatttgtctggtaaaaaagtttctctttctgattttaagggaaagtatgtatatatagatatttgggctacttggtgtggtccttgccaacgtgaaattccacatttgcaaaagttagaagaaaaataccatggaaaagatatttattttgttagtatctcatgtgataataacaaaaaagcatgggaaaatagagtgagggctggtttaaagggtattcagttgcattttgtaaatggagatacatttatgaatgactacatgataaaggggattccccgttttattcttttagataaggaaggaaaaattatatcggtggatatgagtcgtccttctgatcccaaaacaatagctaaattagatgaattacttaactgacttttatattgataaatttttttaattttatgagtgaagaatcagtaaactcaagaaggtgcaaagggggaaatctgtttttttcaagaattcttttttgtatttgtttgtgtggaccggtagcttatgcgttggcagaggaaagtactgtcgtttcagaaatacggcagaatgaaaaaaaatctatttcgggagtggttacagatactaatgatgaaccgttgattggagcgactgtattggtaaaaggaactcagaatggtaccgtaacagatgtggatggacgtttccatctgaaggtaaacagtggggaaacacttgtggtttcatatattggtatgaaatcaaaagaagtggcggttgtggatggaaagaaagagctttttattcggttggatgcggacactgaaatgttggatgaagtgttggttactggatatcagactttgtcgaaagaacgttctacgggtgcgttttctaaagtttctactgaaaagttagagttgaaacgtatggataacttgtcttctatgcttgagggacaagtggctggatatgtgaatggacagattcgtggtgtcacaaccatgaatgctgtcgcgaatccgatggtcgtgattgatggatttcctgtagaaaatacaacattagacagaatagggcagacaactgaaaatatgcctgatttaaatccggaagatattgaaagcgtaacagtgctgaaagatgctgctgctgcttctatctacggtgcgcgagctgctaatggcgtgattgtgattactacgaaaaaggctaaagaaggtaaagcggaagtaagtttttcttctacctttacagtgcacccttattcttattataaaaaaaatcggactaatgcggctgatgttattgctatggaacgtgaatgggcgactatggcattgagtacgcctgaggctgcggagatgcaggctgccgatttgcgtgaaaacggaccatatcctagtttgggagttaatactttgttagatatgtacactgggaaaatcagtatggctgagggagataaaactctgaatcagttggcttcctacggttatcaatattatgatcaggcagaaaaatatggtaagcgtaaccctttttaccagcagtataatttgagggtaggtaaaacaacagagcgtaattcttttaatttctctactacttattgggataatgattatgaggatataaatcatagtgattggaaattaggtatcaatattactaattcattacagctaaccaattggttgcattttgatacaggcgtttatctgaaatatggcaaagagaagaaccagtcatatgatttgtttgatccgggcttttctgtcatgccttatgatccgttggtcaatgcagatggaagttattttgtggcaccttcacaaagtgacaagtcacgtcgtgatttagtggatcaatatgggctgtattcagaagatctcgtgccgatggatgagttgaattatgctcttaatacaaccaaaacttttgaaacccgcgcttatgctaagttgaagtttgatttgacttcttggttgaattacaatgtgatgttccaatatgaaacaagtgattcggattatgaatcattgggtgagaaagagtcaaattttatgcgtaagcgtattaatgattttaccagcaaatcaccgaatggcagttctttggtatataatctgccgaatggagattcgtttcatacgttgaagaacagcaaacatagttataacttccgtcaacagttgagtcttgataaaacatttgatgaaaagcataatttagtatggatattaggacaggaagtgcgccattcattgattaattttgatgaaaatacggtatacggatatgatccggagcttaaaacatggcaaaattataatatgaaagatttggcttatttttcgggcttgttaggatctgctcagttagatcagaatagtattgcttcgtctcgtgaattgcttaatcgttttgtttccttctattcgaatgcatcgtatacgtatgatgataaatatgtactttctggaagtattcgttgggatcgttcgaacttgtggggaactaattcgaaataccagaataaacctttatggtcagtcgggggaagttggaatatctataaagagaaattctttcaagcggattttgtagacatgttgaaattacgcgcttcatacggtattggtggtaatattgggcgtaatacagctccctatctgatagcttcctattatgattccagccttgtggatggtatggcagggtctgtgaatactcctcccaataaggatatccgttgggaaaagacaacgactgtgaatgtaggtgtagattttgctttgttccgtcatcgtctgtcgggaacaatagagtattataataaatatagtgttgatctacttgctgctataaatggtagtcctacacaagggtttggctatacaacgttgatgacgaataatggaaaaatggtaaaccggggagtggaaatcactttgagcggagagattatccgtcagaaggactttagttggaacgcttcattgttatatgcatttaatcgtaataaagtaaaacacatcagtgtgcaaccaagtttgtgggatagccgtataagtatgcctaccagttatcctatggttggaaaaccattatatggtatttatgcgtataagtgggctggattgaatgagaatggtgatccacaggtatatgatgcggaaaataatgtcacttcaggtcctgcacgtgattatcatgcattggtttattgtggtacgactgttcctatacataatgcttcgttaaccaatgtattacgttataaaggttttgaattttcagcaatgctgatattggatgcaggtcacaagttgcggtcaagcaatattccaagcattaatatgtcgaacggacgtattacatctactgctaagggtatagtggaccgttggactcagcctggggatgtaacggacgtaccacgtctgcttttctctaatgatacggagaattttaatacacaccgtacggaattatatcgttattcggatttgtttgtgtatgatgcatcaaatattcgtttgagtaatatttcattggcgtacagagttccggcccattggtgcaagaaaatttctctttccggcgctcgtcttcagttcaatgtagagaatgtagcaacatttgcttttgatagtaaagcgaattacgatttaggcggtaaagtgaaaccgaattatgtatggggattgtatttgaatttttaaaggatgaataatatgaaaaaacaaatgataaagataagcagtctgctttttgttatggtggctatgatgctttccgcttgtgatgattatttggatgatgtgccgaaagggcagaagattccgaagacatgggaagactataatgcttttatccgaaataatttttcctaccattttcttgatcccgatcagcttgcggtattagcaggagatatatttaaacttccttctgccgtaactagtccgtcgttaacacgtgccaattattacgcagatgaatctgtaaatcgaatagacttaatgacaggcaatgataagaacccttattttaatgcttatgagggactttttgcgtggaatctaatcgtagaggatgtaccggatgcgacagaatgtacggaggttcagcgccgtcagttaatagctcagggacgtgttcttagagccatgcattatttttatttggctaatttttatgctgaccagtatgatgaggctactaaggataaactgtcagttcctttgataacttcggcttctgtggaggctccgtcgccgcaggtaactttgcaaacaatctatgagtttatgcttgatgatttgaataaggcggttgaagatctgcctgtacatagtgagtcgattcttcatcctaatcgggcacttggatatggtatgttggctcgagtgtatttgtctatgggggattatgacaatgctttgaagaacgcttcattggcattggagcaaaatgaccagctttttaactggatagatctttatgaggcggataaggagcgctatgatgatcccaagaattatacatcaggggtagccggtaatcctgaaacagataatgtagagaattatatttattgttatggatcttccacttcaggctggactggtttgaataacacaagctacgctatttctcctgaacgggcggctcgttttgaaaagggggatactcgtctgctgacccattggaaatccagagtgtcatcttccggtattccttattatgcgggtatctatgctttggaaatgaataaaggaggtatgcgttcacctgaaatgtattatataaaggccgaatgtttggctcgtaaagggggagaagctaatattagagaagcaatggaactggtgaataaggtgagaaaaacacgtattcttcctgagttttatcaagattggactgctgcaacaacgaaagaagcagtggaaaaaataataagagataaagagagtgaatatatccagactcaggttatatattgtgattatagacgtttgaataaggacccggagtatgcccgtacttttccacgtactattgaaggaaaagagtatattctaaagtctgattcgcatttatggattatgccttttccgcgtgaagccgtatctaatcctggaaatggaacgattacacagaatgtggaaaagtaataaagcgataattttgcgatagaatttatattatcgataggagtattctgaaaagattaagaaatatccggatatcctatagagagaaacaaaaagggcggaacaaaaaatccgcccttttctcgttttattatttttcaaattggattagtggcaatgtccgcatccacagttgttttcatcactacaaccatcaccgcatccacctccgcagtcaccacaaccacagccgcatccttctccactcatcatttttaccatttcctgaatttcttcattagtggctgtgcgggattctactacttcaccttcaaaagtgagatctttacctgcatgaggatggtttaaatctacagtaacagtgtcattggttacttcgcttacggtagcgtagaagtgatggccttcattgtcctgtaagggaatgacagcccccgggaagatacgttcttcatcaaaaacaccatcaatggtgaacatatctttagatacagtgcgcacaccttcgggcatatattctccgtaggcttctgcggtaggaatgacaaattcaaatttatcacccttcttcaaggctgttatttctgtttcaaagcgttccagtgtggttcctaagccggatatgaactggaaaggatgttctacagttgcttcttctaccaatgttttctggccgtcttgcattacataaagtttgtatgctacggtgatgtacttattttccatgttttcttattataataatgtaatataaactacttacgtaagttttccgttggcaaagatacgaattaattccccttaatcctttgttattacgtttatattacataaatttgttattatgatactataaatgcattttcggtggcgtttaatccttgatataaatcaattaactgctcgttttgatagatgtttgctttaattaacagatatatgacaacatgttataaagcatgttgttatatttgcaacgtaaagagaaagagataacgagattgtttttaaaaggtattatttagttcttaggtactaagtaaattgtttttaggtttaacaaattaaaattttaggtattatgaaacgtttagtattgttggttgtagtggcattaggaatgtcagctacaagttttgcaggagaaaaagtagaaggtaaagattggaaggtagatgttaacgtcgcaaagttgagcaaatatttgaatctggatgcacgtcagatggaggaggttgctaatatttctgattattttgctgacaaagtgcaaagcgcaagctacgcaaaagaagctaaacaaggtaaaaaattgcgtgaagccgtatatggaaacttcaaactgatgaaacgtacattgacaaatgagcagtacaagaagtatgtgcagttgttgaatgtcacattgaaaaacaaagggttggattcctatatggaagatgcggcgaataaataaatttataaagtgaaataaatgaatagaaaagagagtgcattggtttgtattctcttttttatttatccgtcggaagatatagtgtatatttgtgataaaatgattgtttaaagcccgatttagttacgaatgataatttataagaaaaaaaatcttcattttatttgtttgttacaaaaaacgctttacctttgcagtcgttaaagaaacaaagaaaacagatatatgaatattactactctaaataacctggcagtcctgcatattattcgcgtcgtggtggtcacactgggagcgtgagaaaggttgtgtatgtgtagttgtacatataaagaaataattgaaagcctttctcacatggtgaggaaggctttttcaataagtataggacgttatagatttagaataagatgaagaatcagttacgcagttcgtttagcacacagggtcgccgtatggcaggagcgagagctttatgggtagctaacggcatgaaaaaagaaatgatgggcaagcccattatagccatagtaaattcgtttacacagtttgttccgggacatacccatctgcatgaaataggtcagcaagtgaaagccgagatcgaaaaactgggatgttttgcagcagagttcaatacaattgccattgatgacggaatagctatgggacacgatggtatgctatattcactgcccagtcgtgatatcattgccgacagcgtggaatatatggtgaatgctcataaggcggatgcaatggtgtgtatcagtaattgtgacaaaatcactccgggtatgctgatggctgccatgcggctgaacataccgactgtttttgtatcgggtggtcctatggaggcaggagaatggaataaccagcatcttgatttgatagacgccatgattaaatctgctgatgcatcggtcagcgatgaggatgtggctcaaatagaagataatgcgtgtcccggctgtggatgctgttcaggtatgtttacggctaattccatgaattgtcttaatgaggctattggtctgggacttccgggtaatggcactattttggcaactcatgccaaccgtactcagttgtttaaagatgcggctgctctgatagtgaagaatgcttataaatactatgaggaaggagatgacagcgtgttgccacgcagcattgctactcgtgatgcttttctgaatgccatgacattggatattgcaatgggtggttccaccaatactgtgctccatcttttagctatcgcccacgaggcggaagtagatttcaagatggatgatattgatatgctttcacgccatgtgccttgtttgtgtaaagtagctccgaacacacagaaatatcatatccaggatgtgaaccgtgccggcggtatccttaatatattgggagaattatccaagggtggtttgctgaaaaccgatgtgaaacgagtggacggtctgacattggcgggagctgtcgaaaaatataatatatgtaagaaggaagtggatactgaagcaaaacgtatctattcaagtgctccgggaaacaaattcaatataaagctgggttctcagaatgctgtttataaagaactggatacagatcgtgccaatggttgtatccgtgatttgcaacatgcttatagtaaggacggaggtttggccgttttgaaagggaacattgcacaggatggttgcgtagtgaaaacagccggagtggatgaaagtatttggaaattctcgggacctgccaaggtgttcgattcgcaggatgctgcttgtgaaggtattctaggaggaaaggtagtcagcggagatgttgttgttatcactcatgaaggtccgaaaggtggtcccggtatgcaggaaatgctttatcctacttcttatatcaaatccaagcatttaggaaaagaatgtgctctgattaccgacggacgttttagtggaggaacctcgggattaagcatcgggcatatttctcccgaagctgcagcgggtggtaatatcggaaaaatagtggatggtgatataattgaaatcgatattccgaaccgcagtatcaatgtgaaactgagcgacgaagaattggccgcccgaccgatggcaccggtgacccgcgaccgtaaagttcctaaaagcttgaaggcatacgctagtatggtaagttctgcagataaaggaggagtgagaatcattgactaaattagaaattaaaaattgagaataaaaaacagtttcgttgtcatcggccagttgtccggcatcgtatttttttgaatctcaattctcaactaaacaattatggcaaaagaaaagataacaggagcagaggcgatgatgcgttctttggagtatcaaggagtaaaaactcttttcggatatcccggaggttctatcatgcctacttttgatgctttatatcatcataaagatacattgaaccatatattggtccgtcatgaacagggagctgcccatgcagcacagggatttgcccgcgtatccggggaggttggtgtctgtttggtgactagcggacccggtgcgacaaataccatcaccggcattgccgatgctatgattgacagcacgcctattgtggtgattgccgggcaggtaggagcttcttttttgggtacggatgcttttcaggaagtagatctggtgggcatcactcagcctattaccaaatggagttaccaaattcgccgtgcggaagatgtagcttgggctgtagcccgtgctttctatatagccaaaagcggacgtcccggtcctgttgttctggactttgccaagaatgcacaagtggagatggtggattatgaaccgatgaagcttgattttatccgtagttatgatccggaacctaatcctgataaggaatctcttcaggaggctgccgaattgataaacaatgcccaaaggccattagtgttggtaggacagggggtagagttgggtaatgcgcaagatgagttacgtgcattcatagaaaaagccgatatgccttgtggctgtactttgctgggactttcggctataccgacttcgcatcctttaaataaaggaatgttaggtatgcatggaaatctggggcccaatgtcaagactaatgaatgtgatgtgttgattgccgtaggtatgcgctttgacgaccgtgtaaccggaaaattagatacatatgctaaacaggcaaaggtgattcatttggatattgaccattctgaaatagacaagaatgtaaaagtggatgtacccgtattaggtaattgtaaacatacgctagctatgctgacacaacttatccgggagaataaacattccgaatggattgatagctttgctgaatatgaaaagacggaatatgaacatgttatcagtaaagaaattcatcctgttgacggggcgttgaatatgggtgaagtggtgcgtgcggtgagtgaggcttcgaataatgaggccgtactggtgacagatgtgggacagaaccaaatgatggctgctcgttattttaaatacagtaagaaccgcagcatcgtaacttcaggtggattgggaacaatgggattcggtcttcccgctgctataggcgctactttcggttgcccggatcgtactgtatgcgtatttatgggtgatggcggtttgcagatgaatattcaagaattgggaactatcatggagcaaaaagcgccggtaaagattattttgttgaacaataactatttgggtaatgttcgtcagtggcaagctatgtttttcggtcatcgttattcatttactccgatgttgaatccggattacatgaagattgccgaggcatacgagattcctgcccgtcgtgtcatgaagcgcgaggaattgcaggatgctatccatgaaatgctggctaatgacgggccgttcctgttggaggcttgtgtgatagaagagggaaatgtattgccgatgacacctccgggaagctcggtgaatcagatgttactggaatgctaatttaataattatggataagacattatatacattaatcgttcattcagaaaatatcgccggtttgctgaaccagattacggctgtgtttactcgtcgccaaatcaatatcgaaagtcttaatgtttctgcgtcttccatcaagggagtgcataaatatactattactgtctggactactcaggatgtgatagaaaaggtggtgaagcagattgagaagaaaatagatgttttgcaggcacattattttactgatagtgagatttatcagcatgagattgctttgtacaaggtttctactcctgaatttcaggagaatcctatggcatctaaagttatccgccgttatagtgcccgcattgtagaagtaaatccggttttctctattgttgaaaagaatggaatgagtgaggaaattactgctctttatgaggagttgcgcggattgggatgtgtgttgcagtttgtacgttcgggacgtgtggcgattactaccagttgtttcgagcgtgtgaacgaatatctgacccaacgcgaggaaaagtatcgccagcaaaaaacggaataatgatgagtgagaataaagtaggaacatacagatttgtggcagaaccctttcactgtgatttcagtggaaagttgactatgagtgtgctgggtaaccatttgctgaattgtgccggctttcatgctgccgaccggggatttggaattgctacactcaatgagaatcattatacatgggtactttctcgtttagctgtagagttagagaatatgccttgtcaatatgagggattcagtattcagacatgggtggagaacgtgtatcgcctttttacagaccgtaattttgcaattttggataaggaaggaaaagctgtcggatacgcccgttccgtatgggcgatgatcagtatggaaactcgcaaacctgctgacttgcttacgcttcacggaggtagtatcactgattatgtatgcgataaggaatgtcctataagcaagcccggtcgtattaaggtgacagagaaaactccggtttctgaataccagaccaaatatagcgatattgatatcaatggtcatgtgaacagtattaagtatatagaacatattctcgacctgtttcctatggaattttttaaggagaaacggattaaacgttttgagatggcttatgtagctgaaagttattatggtgatatattgagtttctaccgcgaggaagtgggggagaaagaatatgatatagaggtgaagaagaatggcacagatgttgtcgttcgcagtaaggtgatatttatttagaatctaatttttaatttttaatttataatttaaaatggcacaattgaattttggcggcgttacagaaactgtagttatccgcgatgaatttcctttggaaaaagcacgtgaagtattgaaagatgaaacaatcgctgtgatcgggtatggtgtgcagggaccggggcagtctttgaatctccgggacaatggtttcaatgtaatcgttggtcagcgtccgggaaaaacatatgaaaaagcagttgctgacggatgggttccgggtgaaactctgtttggtattgaagaggcttgtcagaaagcgactatcgtaatgtgtctgttatctgatgcagctgttatgtctgtatggccgactatcaaaccttgcttgactcaaggcaaggcactttatttctctcatggctttgctattacttggagtgaccgcacaggggtagttcctcctgctgatattgatgtgatcatggtagctcctaaagggtcgggtacttcactgcgtaccatgttcttggaaggtcgtggtttgaactcttcatacgctatctatcaggatgtaaccggcaaggcttatgaacgtactattgcattgggtattggtatcggttcaggctatttgttcgaaacgactttccagcgtgaagcaacttctgacttgactggtgaacgcggttctttaatgggggctatccagggattgttgttggctcagtatgaagtattgcgtgaaaacggacatagcccttctgaagcgtttaatgaaactgtagaagaattaacccagtcattgatgcctttgtttgctaagaatggtatggactggatgtatgctaactgctctactactgctcagcgcggtgcattggattggatgactccgtttcatgatgctatcaaacctgtagttgaaaagttatatcacagtgtgaagactggcaacgaggctcagatttctatcgattctaactctaaacccgattatcgtgaaaaattggaagaagaattgaaagcattgcgtgaaagcgaaatgtggcagacggctgtaaccgtacgtaaacttcgtcctgaaaataattaatagttagtatttagtatagaaagcgggggtgcgatgaggcatctccgctttcttttatatatattaatgttagtggtattgtttatatcatgtgtagtcgctaattttgtgaaaacttgacttagacatgaataatagattatcacttttattaatagggtgcatatttccctttctatctttttatgcacaaaagaatatgaatcttccaccatattatcccacagtaaaaggtattacggattatgctgtgtggcagcttgtatatccggattctttattaaaggcggatattgcaggtgaagcagtgtgtacactccgcattgatagtttgggtattgtccgtaataaatatattgaagccactcatcctttgtttgccaaggcggccgaagatgtgattgaggggatgcgtgaatggcagcctgcaaagaaagcgggtagagatatagatagtactgtagtctttcatattccttttaatcctgatatttacagtgaccgcatttggcggcagcagcaggttctggaatcttgcaggggacaatttgtcgattccatgcctgtctttccagatgatattcgtagtcttgttatgggaaatatgggttggcctgatgataaagtggataaagccgttgctatttgccgttttacggtgaatgaaaacggggagattatgaatatccgtgtgataaaaggcactcatccggcttttgataaagaggctatacgtattctttctaattttccccggctgattcctgccatgaaaaacagcaaacctgtgccatatgattattttttgactatgcgtttttggaaagaggatctggaacattatttattgtatagggaatgtgcacaggaagatttggaaaagaccacttgggagccttatagatactcttcttatcccggtggtactgttgctttgacgcaatttataaattctcatctgaaaattactcccgaaatgaaggctacgggaaagcagggacgggtgatttatagtttcaatgtggatatagatggttcaatgaaagattttcagctggtgagaggacttgatccattaatggatgccgaagcattgcgggtacttcaattagtgaatgaaaaatggagtacggggtattatttcaattcaaagaaatggtatcgggagttttatgtgaatcaattcaccattcccattatttttagttggtagcttatacatattgctactttggacttgagattttgatgttttgacagtttttggagtccacctgtaacattaaggaggattaccgttcttgaaggatcattttgttcttcggtcaactttcggaagtatctctggcctgtcagtttttcgatgcaggaacttcgagcatgtatgccctcatgccctcattgtgcgtataacaggctaattataaattacttatgtattgatggtaaaaatacttgctctcacttatactctcatgccctcactatgttttgaagtttctttttacataacatgcttgttatcagttatgtatattttttacaggctgtttgtgtttgatgcaaagtaggacattttcaggcttttctatcgtaagaagtatgcatgagaagggtttctacgaaatgaggcttacgatggaatttccggcagcggtaaaaaagatcaagacgtttttaaaaaagctcttgttcttttttaaaaaggcggttatctttttttaaaagctcttgatcttttaaaaaaacgtcctgtcaccaacggcaggaagaatataaaaacaggctgtaccaatcatttgatacagcctgtttttatatttataggattatatactacagattagaagtacagataacggtcatctttcacttcagcttttttgtagaggtcattgatgaaactgctagcataacgtcctgccatattagacaagttgttttcttcgtttttagcatcaaattcttctgcacttttttctttgttataaacctgaatcatgtaaacacctgcattacccttgataggaccagttaacttgtttacttcagctttgcttgcataagcacctaaagctggttcgctggcgcgagttactgaaacatatgccggagcagagaaagtgatatgttttacagaatcgctaactgcatttgccatatttttcacttggtcaatgctgtttgcacctttcatttcagctatcagtttttcagcttttttatctttgatgatttctgctttcagcatgtcggcaaccaagttgatattacgatatccggcaggattaatcttttcaagagcaactaccatcaggtgatcgttctcaccacattcatacaatggagacacttcaccttctttggctgcaaaaatccatttcaacgcttcacgggttccttttacaccacccacacggtgttctgcgctacggaaatcagcacgttctaacaagcggtatccgctttcttctgcattggcaacaatcttatccattgtagtgttctgcgctacgaattggctgaaatcattgtatgccttgttgtatgtttctttgctgaattcaaccggacgtttaatcactgcaactttatatttatctttcatggcttttttatccaacacttgaagaataacgttagcttgtccgatctgaagattgcttaattctttaacattagagttaatcaatgtgttgatgtatttagcattgtcagcatctaatgcagcaccttcatagttgcgtgcagtcaaccaggttgcttcacctgtctgaccatatttttttgcgatatcagcaaagtcagctccatctttcagtgcattgaaaatactatcggctaaagttgcggttttagcagcatcttcagcatatacctgaatttgacgatattggattgaatcgggagcagtctgcttggcaataattttaaaagcattatatgaatcatctgcctgattatagtaaggaccatatacttcgttgatagttacagagtccaaacgagcaactacatcattaggatatacagtcttgttgattgcaatttcagaaaaaggaacaacagagccggtggaacggatgaatgtgttcatgtcggcagcggtacctagctggttggcatattcggttacttcatttaatacttctttgcgatcttcttcagatggagttaccaatacatcaatgtatttgatattacgagtttcaaccggctgttcgaaagaactttttttcttgttatacagatctttgatttcgctgtttgaaaccgtgatagttgaatcgctgatagaagaataaggaattgcagccagtaaaacgtctgattgttcagtgcgtgatgtaaacgcatcttcagctgcaaccggatttgagatcaatgattttgcaatcaggttctgatatttttcagctaaagtagattggatcaaagtcttttcaataaaattccaaaaagctcccattttttgatagtattctacatattgtgcaggcattttgcttgcatccaggtgagcgtaatctaccaggaattttttcagcatatctttgtcgaaagcaccggtttgcggattgcggaacggagtttgcattaataaggggttagtaccctcctcaatgattgcttgaacttcagctttgctgacagtcagtcccaattttgcagcttctgctgcgattaattggttatttacgtaagattgccatacttggtctttcacttgagtcagttggtcgtcatttaatgcagaaacaccttgtgtcaatttaatgacttctgtgtattcgtctaccattttttgatactcttgtgctgtaagtgtttttccattcacttcacctacgtcttgtttaccctgatgtggttggagaaccttccatgcgtctccggcaatgaatgcgaagagggcaagtccgattacaacgaccaacagagggcctttacttctgattgtttgtaatgttgccatttaattttactatttttgtttattgtttttttatacttcatagatttagcgcacgaagatacaaaaaatgcagcttacaagctattttattgtgaaaaaaatctattattcggttactttcaactttactaattcaattttggttgctgttactttaattattttgaaatggaatttatcgaaagtgatctcttcatgcattttggggaagctttggtattggtgcaggatgagtccaccgatagtttggtaatcatcattttccggtaggtcaagtgagaacaattcattggctttttctatttccagacgtccggaaaggatgtattcattgtcaccgacagatttggctatgtaagaagtcgtgtcatgctcgtcttctatttcaccgaaaatttcttccactaaatcttctagcgccacgatgccggatgtacctccgaattcatcgactactacagctaaggatttcttttgctgcatgaatagtttcatcagcttatgcgctcccatcgtttcgggagcaataggtagttggcgtacactcttagtccagtctgtctgttcacgaaacatttcagaagaatggatataacctataatattatcaatgttttctttatagacaatgattttactgattccgctttcaatgaagcgggcttttagttcttctatgggagttccatattctatggcaacaatttcggttctaggtaccatacaatccctaattctgatattcgaaaaatctagtgcattttggaatatcttgacttcggtgtctatgtcttgttcattttgaacatcttgtatactgctttgaataaagtaatctagatcgactttggtaaaagctttttcattggcttctttatttgttttaatgcctataatgtaaagtaatatattggatattcccgaagcaaacttgctgatgggatagagcaagacatagcaaatgtaagtgggaactgcaaaaatattcagagtgaaattgggattaatcttaaataaggttttaggcaggaactctcctgtgaccaagatgattaatgtggaaataattgtttggatcagtactaataaaaagtggttgtctatcaatcctgccagcaagttttgttcaatgacttgtgccatcaatataccgtaaatgaccaaagcgatgttgttccctaccaacatggtagagataaaattgttcggattatgaaagaagatggaaagtatacgtgaatttatgctttggctgttacgatccatttcaaaacgtaatttattggatgaaacaaaggctatttccatgccggagaaaaaagcggaaaaagccattgtgataagaatttgtataataatacccataatagtgagtgaattagcgtatcgaatcagttctggtgctatttgcaacagcttttgtactgtctgctggtgctgtatcttctacagtgaaaatacctgtgttattataaatttgatattctgtcatttgctggttggattcaaatccataaccggtaatgattttgtcttcttgttcaatgcggataaatttgtcagaatagaccctttcctgtttttcatcccaaaagagcaggtctgtgtcaaatttgtcgcctctttggctgcggatatgcacattgcttctcaattcccaaagtttctttttctcgtagtaataggctgtatcggcttttatgctggcatcaatatggaatagggaatcaaacttttccagataaactcctttttcaaaagcccaataaggagggttctttttatcataaatttcccattcttctgtgataattttgtagcgggtaataccggaatcggatataagggtagtaacccccaatgttttcatgctaggcaatgaatctctttctgtaatggcttccgccagatttttttcgcctcctgagcatgctgggaataaaacaaacataacagttgcccaaatggcaactgttatgtttagaaatataaagtgtgattcttgttttttttcagacgacataattatctgatagttgttgtttcaccaatccatccaccgattgtaacagagtcacctttcttcaagctgaggaagaacaagtctgcgtctttaggagtatgggctgcataagtaccaattagtttatttgcttcttcagcaacactaggatctacactttttgctttctgtaatttgtcgataacagcaaaataagtacacttgttcaatgcggcttcatcactccagttagggcttgatgcatacatattagcaattaaaatgtaaggcttaccattgtttccatccaatgagattgacttcagcgcatattgttttgccttgctcaactgttttttgctgaataaaatagcagcggttttgtatgcatagtcggctttctttaatgggtcttgttctaagttgatagcctgatcaaaatagtcgatacatttgtccatatcacctttcttgtaatacatgtatccgcaacctacagcagtttcggcagtcggttcgatggcatgtgcggcttcagatgcagcaaagtaagcttcctgttctgtacagtttagcatctgcattacagaaataacttgcttcagataatccaaattagttttgttttgttcaactttcggagcatagatagcttgtaggttgtcgcaagtcgctacaccactgttaatgaaaaatgcatcgatattgtcttttgccactttcaataattttttgtcattttcctttgtagcagcttttaaagctccatcagcaactcctgatgcaaacaagtaatcctgaatgaattgttctttgtatgcttcatcactcttcattttacgggcagcagcatccatgaattcttgtaatacaaaatagtcggaattttctttttcaagttcaatggcttctttgaacatgttgtatgcttcattcatgtcctgtccacccattgtgaagtagtcatgtgccttcattccgataattgaaccctttgtagcatctcttttaaccaacttgttcaaatcgtccagatattggatacgctggtcgtgaactttcatcagttcattgaagtattgtttttgcttagctgcatctttttcaccggctattaaagcacgaagaatttttgcaccattagtataagtacttacttgagctttgggggcttctgtaaatacgctcatccaaggagtataggcgtccttgaaattgttagttttgacatactcagtgtaaatactgatatttttcaagcatcggatactgtcttcaccatgtccgaatcttgatccgtctgacgctccggtctgagcgaaagaagctgttgtacctaaggaaagaacgaacagcgctgttaccatcttcattttcatcgtatataaatttagttgttgttatttatttgcttctctccatttatcaatccactttccatttcatgaaccaacgttcattgaaagtgagcccgatattgattctcaaatagttctcttccattaatcctttaaatttaggactgactttaatgtattgtccggaaatgttcagcatagatttactttggaacatgggaagtccgaaacctacactgacgccatattcgcgtgcaccgtcttgaaaactggttgctcctgtgtccggatcagtatagcttaccttattataaggagttgaataataagctcccatacggtaacggatacgcttcagatagttgtggctgatataacttggtacgaattccgcaccaaaagctatttttgtgcggttattcatttccacactttctttgttgaacttgctccaagtcagatcggctgtattccatttttgtaaagtatagtcaatcccaatcgtcaggcggttgtcatatacataagtaagacctgcaccaaatgtatgtggcattttaaacgggttgggaatagtatcgccagtttgtgactgtacataaatggaaccattactttccgtacctgtctgatgatatttatatgcatctccgtgcaaggtatgtcccagtgtataaacggcacctacatttattgtgtttttcttgtttaacttataagtatactgtaaaccaaaatccaatttataatcactgatggaaaatttgtctaatttgatactacgtgtatctgtcgctccaatagctgtcatggattgatgggtaatgtctccataaagatatgaaaaatttgcaccaacagacaaattattaaatactttataacctaatcctacaaaaacctgatgaaagcctccgtcgccattataagattcggcccactttccgttattgtctacatcctcaaaatcatgtgttttggaaatgttgtaacctactgtagaaaatggaagaaaaccaactgtcattcccattttttgccatagacggaattgcatggccaaatagtcaaaacttgagtttttagcattggtttttacattaccatccttgaagttcgcattttgaagagtcattcctgcatcgaacaagaatgtcaatgaatcgatagctgtataagatgccggattagatgcgttgatttggtagccgtttcgcaaaccgtatgctattcctcccattgctttactgttaccaaaattttgatcagctaactgaccaaagccgtagcgtgtatagggagaatttgtgcttgtttgggctacggccagccctgtgactgtgagtaatattgacgcactaatcagtcttttataatttatcattatagcttaatattctgtttaaacctttcaatactaaaaatctatctgcaaagatgatactttttaattttgtatcaaaagaaaattcatctccgcccgttaaaaaaaccaaaagctccggataattcttttgaagatgggtgatataaccgctcatttcaaattccattccgcgaatgactcctgcccggatagccgtttctgtagattgtccatacatcggaacttctcctttagcgcttactttgggaagtttgtcggtgaatatgttcaatgccttgaaacgcatacgcattcctggagaaatattgcctccatgataggctccgtcagcgtcaataaaatcgtatgtgacacaggttcctgcgtcaataaccagcacatcgtgtccaggcttcagccagtttgctgcgaccacagctgctaaacggtccatgcccagtgtttgaggcgttttatataaattagtgacgggaacaggggtttcatgacttaattcgatgatgttaaaaggcaatctttccagttggtgccggatcgtattgcttagtgttatgacagaagctatgatacctcgtttcaacgggtatcgggagcaaagcatcgggaggcaatctaaagaatgattggagccacgaaatacttcaactaactcgcctttgtcgaatatagccaatttggctactgagtttcctatgtcgattattaaattcacaactttgctttttcggctgcaaagtaacgcaaaaaataaataggaatagcaataaaaaatggtatttgtgaggaattaattaatatttaggtgtacttttgcatcggtaaacagagaatggaatttatgaataaattaattatagcattgatattgttattctttttcttgggtcaatcggttagaggtcaggaagataacataaaggtaagtctgatgacttgtgctcccggtacggaaatatatgctttgttcgggcatacggcattgcgctatgaggataaggcacgtggagaggactgggtgtttaattatggtatgttcagctttaatactccccattttatctatcgttttgtcaaaggagaaactgattatgaattgggcgtaacccgttatccttattttgaaggcagttatgctatgcgtggttcctctgtttatcagcagacattgaatttgactatttcggaaaaacaggagctcagaagattgctggaagagaattatctgccggagaatagggtttaccgttataactttttctatgataattgcactacccgtgcgcgtgatgtaatagaaaggtgtattgaagggaaggttgtttattctgaaggaaaggagggactctcttttcgggatattgtccatcaatatactaaaggacacaaatgggatgagctgggcattgatatgtgtttgggcagtgaagctgataagcctattgatgcgcgtaagcagatgttcgcccctttttatttgctggaagcggcaaaaaaagcgactatagtagtaggtgacagcgtgcgtcctttgattctgcatgaaaaaaaggtggtggatgcagaaccggagaatgttggtgacggttttccattgtcacccctggcgtgtgtctttattttaataggaattacttgttttgtaggatggttgcagtttaaaaccaggaaaataatctggatttgggatttgcttctttttggtgtacaagggttagcggggtgtgtcattactttcctggtctttttttctactcatcctacggtagggtccaattggcttatccttttattgaatcctatccctttaatttaccttccggtcatggtttgtcgagctataaaaggtaaaaaagacctctatcatacaataaatgtagtgtatttaacactttttataatgataatgccgtttgtacagcaaaaattcaatgtaacggtattacctttggcactgtgtttgttgatatgttctgcaaaccacgttttattatattacagacaaaacaataaatgaaaggacgcatcttaacttctcttttgactgttatcgcattaacagggttgcaggcacagaacattcctgcggttcccaggttggtggtcggattgactattgaccagttgcggactgattatatagaggctttttcggctttatacggtgaacgtggtttcaagcggttgtggagagaaggacggatttatcggaatgccgaatatgactttattaatgtggataagtcatcagctgtagcggccatttattctggcactacaccttataccaacggaatcgtgggggataactggatggaccgcagtactctgcgagtccttaattgtgtggacgatgctgattttatgggtatttacacttcagagtccacttctccgcagaaaatgaaggtgtcgactttgacagatgagttggtaatagccacacaaggaatagctgaagtttattctatcgctcctacacgtgaaatggcggtgttggctgccggtcatgcttcgaaaggtgcattctggttgaatgatgaaacaggaaaatggagtggcagtacatattatggtacatttcctgcatgggtgactacttataatgaccgtgaaggattggatttccgtatcggcaatatgtcgtgggagccttatttgcctgtgactgtctataaatatttgactagcgagaacaaacaagttacgttcaagcataatttcgatgacgagcggaaaaataaataccgtaaattgaagacaagcccttatgctaatgatgaggtaaaccgtttggttaatgcttgttttagtaatacttccattggaaaggatgctgttccggactttttgtcactggcatattatgccgggaattatgatcataaggctcctgcagaactcccgatggaaatgcaggatacctatgtacgtctggacaacagtattgctgaattattggaattgatagaccggaaagttggtttgaacaatactttattctttataacctctacaggatatgctgacgctgatcctgttgatcctcctcaatataaaataccgggtggagaattccatattgaacgttgttctgctctgttgaacctttatttggctgctatttacggtgaaggacaatgggtggaggcgcattttgaacagcaaatatacttgaatcataagctgatagagcagaaacaactgaatatatccgagatattaaatcgtgcggcagaatttttggtacagttcagcggagtgaaagatgtgtattcttcacaacgtttgcaattgggagcgtggactcctaccattgataaaataaagaattactataacccgatatgttccggagacttatggatagaagtcttaccaggctggactgtattccgtgaacattcgcttgatacgcaggtgcaacgctattcatatgcgtcggctccattgattttcattgggaacggaatgaaaccggaaataatccatgcgcctataaaaataggcaatatagcacccaccgtagcccattacatgcgtattcgtgctcctaatgcagccgttctggcaccaatgacagacatcagaaaataatattaaggagagaagtgcaaataaatcagcattttattgtaactttgcactttcaaaagtaatcaaattagaaaataataaaaacaaaaaatacaatgggatttaatgaatttattggcaaattgtttggaaataaggccactcgtgacatgaaagaaatcaagccatgggttgataaaataaaggctgtttatccggaaattgccaaattgagcaatgacgagcttcgtgcaaaaacagtagaattaaagaagtacatttctgattcggctgctgaggaacaaaagaagatagaagaattgaaaggtactatcgaaactacagaactggaagatcgtgagggcatcttcgcgcagatagacaaactggaaaaagaagtgctggaaaaatatgaaaaagcactggatgatgtacttccgcaggcttttgccattgtaaaagacactgcacgccgtttctctgaaaatccggaattggttgtaaccgctaccgattttgaccgtgaattggctgctcaaggaaaagattttgtgcgtattgaggacgataaggcgatttggcagaaccattggattgctggtggtaatgacatggtatggagcatggtgcattacgatgtgcagttattcggtggtgtagtgttacataaaggcaagattgccgaaatggctactggtgaaggtaagacgttggtagccactttgcctgtatttttgaatgcactgaccggtaatggcgtacatgtagttactgttaatgattacttgtcaaaacgtgactcggaatggatggggccattgtatcagttccatggattgagtgtggactgtattgataaacaccagcccaattctgatgcacgccgcagagcttatatggccgatatcactttcggtacgaataatgaattcggtttcgattacttgcgtgacaatatggctgtcagtccaaaagacttggtgcagcgtaaacataattatgctattgtcgatgaggtggactctgtattgattgacgatgctcgtactccgttgattatttccggtcctgttcctaaaggtgaggatcagttgtttgagcaactccgtcctttggtagagcgtctgtttgaagctcagaaaaagttggctacccaatatttggccgatgccaaacgcttgattgcatcggatgacaagaaagatcaggaagagggatttttggcattgttccgtagtcataaggcactgcccaaaaataagccgttaatcaagttcctaagtgaacaaggtattaaggctggtatgctgaagaccgaggaaatttatatggaacagaataacaagcgtatgcctgaagccactgatccattgtatttcgtaattgatgaaaagcaaaacagcgtagatttgaccgacaaaggtattgacctgattacaggaaatgcggcagatcctactttattcgttttgcctgatattacttcccaattgtctgctttggaaaatgagacagatttgacagaagaagaaaaactggccaagaaagatgaactgatgacaaattacgctatcaagtctgaacgcgtacacactatcaaccagttgctgaaggcttatgccatgttcgaaaaggatgacgaatatgttgtaatcgacggacaggttaagattgttgacgaacagacaggacgtattatggaaggccgtcgttattctgacggtttgcatcaggctattgaggccaaagaaggcgtgaaggtggaagctgctacccagacctttgctaccatcactttacagaactatttccgtatgtatcataaattgtcgggtatgaccggtacagcggaaacggaagcgggagaactttgggatatttataaattggatgtcgttgttattccgacgaatcgtcctattgcccgtaaagatatgaatgatcgcgtttataagacaaaacgtgagaagtataaagctgtcatcgaagagattgaagaaatggtaaaagaaggacgtcctgttctggtaggtaccacttcggtggaaatctctgaaatgttgagcaaaatgcttgcaatgcgcaagattgagcataatgtgttgaatgcgaaactgcatcaaagagaggcggatattgtggcacaggcaggtcagaagagtatcgtgactattgctaccaacatggcaggtcgtggtaccgacattaagctgagtccggaagtgaaagctgcgggcggtttggctattatcggtacggaacgtcatgaaagtcgccgcgtggaccgtcagttgcgtggtcgtgccggtcgtcaaggggatccgggttcatctgtgttctttgtatcattggaagatgatttgatgcgtttgttctcttcagatcgtattgccagtgtaatggataaacttggcttcaaagaaggtgagatgattgagcacaagatgatttcaaattccattgaacgtgctcagaagaaagtggaagaaaataactttggtattcgtaaacgcttgctggaatatgatgatgtgatgaacaaacagcgtgtggctgtttataccaaacgtcgtcatgccttgatgggtgagcgtatcggtatggatatcgtgaatatgatttgggatcgttgcgcttatgctgtagaattgggcgactttgataatgtgaagatggaaatattgcagacattggcaatggaagtaccattcacagaagaggagtacaacaagatgagaaaagaagatcttgctgagaaaacctttgaagcggcaatgaacaacttcaagcgcaagacagaccgtatggcccagattgccaatcccgttatcaaacaggtatatgagatgcaaggacatatgtacgaaaacatcatgattcctattacggatggcaaacgcttgtataatatctctgtcaacttgaaggcggcttatgaaacagaaggaaaggagattgtgaagtcatttgagaaggcgattctgcttcatactattgatgatgcatggaaagaaaacctgcgtgaactggatgaactgaaacattctgtacagaatgctagctatgagcagaaagatccgctgctgatctttaagttggaatctgtcaatttgtttgacaacatggtaaataagatcaataacaataccatttctgtattgatgcgtggacaaatcccggttcaagaaccggaacaagttcgtgaagctgctcccgaaccgcaggctcctcgtcaacagtatagagaggaaaagcaggatttaagtgatcctcaccagcaagctgctgccgaacatgacacccgcgaggtaaagcgtgagccggttcgtgcggaaaagacagtgggtcgtaacgatccttgtccttgcggaagcggtaagaaatataagaactgtcacgggcaaaatgcgtgataaataacgattattatagaaacgttcgggtagaatttactacccggacgttttttttattccttttaacttacttcttacataaataagcgtatttttgttccctaagaaaaaatgataatatgaaaagatccgcctcattaataattctagttgccgggacactttttgcttcctgcagcagtttgcagaccatatcttttgaccagttacaggcagccgatgtcagttttccggatgctgtgagaaaagtggctgtgataaacaatatgcctgtactgaaaactaaagataatcatgaaatactgagcagtgagttggaaggcgatggtaaagtggcatccgaagctttggcagagaatattgccaatgtgaattatttcgatcaggtcattatctgtgattctgtattccgggcacaggataaagtgccacgggttaatgtcattctgactaaagaggaagtacggaaactgagcgaggacttgggagtggatatgatattgtcttttgatcgtattcatattcagactaagcccggcgtactgttctatccggattttcctatgcctatagatgctgtagatggaattatatctccgattgttagagtatatattcccaatcgtgataaacctttgtttgtagttgccaagcaagataccatttcctgggaaatagaaccagctctttctgaccggaagatagtaaaagaagcttcggaatatgccgcttctattccagtagaacatctgttgccacattgggatgaggtggctcgtttttattacgatggcgggaatattgaaatgcgcgatgccggtgtatatcttcgtgagaacaattgggatgaagcgtatagtcagtggaagatagcctatgagaagagaaaaggccagcaaaagatgaaagcggcttttaatattgcactatattatgaaataaaggataatgtagaacaggccaaggaatggttgggtaaagcgaagaaattggtgaaatcaggcagcagggatgaacaattgatagccttttattcattggagttagagaaaagagagagtaagctatcccaattgagaatacaaatgaaacgttttgatgataatttttagagaataagtgttgagagaaagattttttttgtacttttggatataaataatatataaaattgattttggtatgaaactcagtgcacagtcacatgcttctattgcgtcttcgcttcgggaagcggttgataaatatatagtggatggagagagaacggtagtcaccgatatccatttgcaacctaagcaggacagtggtgaattagttatttttaatgatgatgacgaagaattgtcacgtaccataattgaagagtgggtggattatagtgaagatgatttttatacaatagtagagcgtatacttcgtggggagatcaacgcattgaaagatacgggagttttggataagttagctataatgaagccttattcttttgttttggttgatgaggatagggaaactgtaaccgaacttttattgatagatgatgaagacactttattgctgaatgatgaacttttaaaggggttggatgaagaattggatgcatttttaaaagacttgcttgaaaaatagataaaataatagaagcatcgggatggtaaagttcccgatgcttttttatatcataggtgaggaaaatgtttttttcaagagtggcgtttaaaatattgttttctcatccatcggtcaaaaaccatgaataagggtatagttatgatgaatagcagataaatgagaggaatttgtatttttaaaacatgactgccagcaagaaatgcatgatacatagtttccttaatatgctttccaaaataaatatacagaccgatgctgccgcttattattaagaatagagaagcagcaatagtagctagtaacatctttctctcctgtttcctttcacgtaagagtatagcttcctctactttctgcatggtgcggaaagtaaaattggaggtcagccggaattggggctgttcttttacagccttcattaatcctttatctttttgtttctcgttcattctgcttctgttatgagtatatataatttttttcttattcgatgcaattttacttttgcattgctttccgtcagtcccaggataagagcgatttcaccgatagttttctcttcattataaaatagggaaatcaaggcacgttcttctgcatccagtttcttgatggccttattgagttttcctacccgctcctcgctttcatcattcagggcatcgtctatttgctggtcggatatattcattaacatggcactgtccataacaattaactcttgttttctttttctggttgccgatatggcggtgttatatgcaatgcggtatatccatgtagagaaactactctctgctttaaacgacgaaagatgttcaaaggctttcaagaacgtatcctgggtcaactcttccgcatcctcctgattctccacgatgcgtataatcaggataaatacttgctgactgtatttatccaaaaagtactcgtagagagaagtttccccttttaatatcctatgaataatatgtgtttcgtcgtttcccattttatctattagacgcagggctgggagagaggttacaataaaaagagaaaatatttttttctttctgaaaagtgtaacctctttggctacgtagcgtctaaatgggtacaaaggaacaaaattaataacttaaatacgaataaattatgagttacattaccggttggattgttgtaggtatcattacattaggaatctacaaattatttgaactttttgttggtaaaaaggagcgtcttactatgatagaaaaattgggagacaagttagatccttctatgttggggaacaggcttagtctgcctcttcctgtaggaactcctttcatgtcatcttttccgatttctttctcggctttgaaatttggctgtttgttgttgggaatgggactagggctgttgacaggttatatgatttgtgtaaccacggttcccgattatttcacagagcgtaattggcacatgagcgagttaacttcattgatttacggtgcaaatgtcttgctttttggtggtttgggcttggtagttgcttttatagtagaattgaaaatttctcagaaaaacaggaaagatcatacccgttgaataatgaaagacaattagaaaaaataaagagatgtgtcaaaatttgaagtaattatcaaaactatccgagttttgcagcaagacaatagcagaattacttttgacacatctctttattaaaaaagaagtgatgaccgctttacatagaatgttgcaatctctgtaaagcggtatatttttttattttttcaaagcagcaatactttctttcaaagaagctattttgctttctgcatcagcctgtttcttacgttccatatcaataacgttggctggtgctttgctgacaaatttttcattgcttaattttttcaatacactttgcaaaaagccttcctgatatttcaaatcagcctccagttttgccaattcttcttctgtgttgattaaattgcccaatggtatggcatattcggttgtacctaccataaatgagccggatccgtcggctttattctctacggcttcgatagaagagaggttgcacaatttggtaataacaggattgaatgcagctaccggattttcacctactacttgcaactccaaagtttctttctgtgcaatgtttttctgtaaacgaatggtacggataccaccgattacttctttcactgcttcaaattctttgacgataatctcattgcaggcagtcggaatgttcaattgctggaccatcaggctttcgccttctttgcggtcatagatatgctgccataactcttcggtaatgaaaggcatgaacggatgcagcaacttcagcaagttatcaaagaagcctaaagttttttcataggtcgctttgtcaatgggttgtccgtatgccggcttgatcatttctagataccagcttgagaattcgtcccagaataatttgtatacagccatcagtgcttcgctcaaacgatatttgccgaataagtcagctacttctgcagctgtttttgccaacatggattcaaaccattcagtggccagtcttgcatattcgggctgtgcaatatcggcaacttcccaacctttcaccaagcggaatgcattccatattttgttattgaagttacgtccttgttcacataacgcatcatcaaataaaatatcgtttcctgcgggagcggcaagcatcatacccattcgcacgccatcggcaccatacttgtcaattagttccaacgggtcgggtgaattacccaaagactttgacatcttacgtcccagtttgtcgcgtacgataccagtgaaataaacgtttttgaacggcatatcacctttatattcatatcctgccataatcattcgtgccacccagaagaaaatgatatccggtcctgtaaccaagtcactagtaggataatagtagtttatttcttcattattaggattattgataccgttaaataaagaaatgggccacagccatgaagagaaccaagtgtccagacagtcatcgtcttgacgtaaatcttccattttcagattggtattaccggttttttcttgtgccaacttcaaagcttcttccgctgtttcggctactacataaccgccttcgggcagaaagtatgccggaatgcgatgtccccaccaaagctggcggctgatacaccagtctttgatattttccagccagtttttgtaggtgttcttgtatttggcaggatagaatttcagttcatcattcattacaggaggcaatgccatgtctgcaaaatgttgcatcttcaagaaccactgcatggacagtttcggttcgatggctacattggtacgttccgagaaacctaccttattagtataagcttctaccttttccagcaatccggcagcttgcaagtcttgttcaatctgtttacgtacatcaaaacggtccatacctacatacagtccggcagcttcgctcagtgttccgttatcattgaagatatcaatgctgggcaagttatatttttcgccaagcatatagtcattcacatcatgggcgggtgttactttcagacatcctgtaccaaattcaatgtctacgtagtcgtcttcgataaccggaatgatacggtttaccagtggtacaattacctttttacctttcagccattggtttttcgggtcattgggattgatacacatggcagtatctcccataattgtttcgggacgagtggtagcaactaccgcatagcgtccttcagcatcaccttctactttgtaacggagataatacagtttgctgtgttcttccttataaataacttcttcatcactgagagctgtcagtgcttttgggtcccagtttaccatgcgtacaccgcgatagatcaaacctttgttgtaaaggtctacgaatactttgatgacactttcgctacgttcttcgtccatggtgaatgctgtacggtcccaatcgcaggatgcacctagtttgcgcagctgtttcaggataatacctccatgttcttctgtccacgcccaggcatgtttcaggaattcgtcacggctaaggtcagttttctttataccttgtccggccagtttgttcaccactttggcttctgtggcaatggaagcatggtcggttcccggcacccagcaggcattcttgccttccatgcgggcacggcgtactaatatatcctgaatggtattgtttagcatgtgtcccatatggagtactccggttacgttgggtggtggaatgacgactgtgtaaggttcacgtccgtcgggttttgaactaaagagtttgttgtccagccaatactgataccattttccttccacgtcagcgggattgtacttacttgctaattccattttatattttatttatttaattgattatcgcataattgagtgcaaaattaataaaagtcgttggattattatgtacttttgcactacaaaatgatattaataaactgattatgcatacaagaaaagaacaaatggaagcatttggccgcttcctcgatattttagacgagttgcgagagaagtgtccttgggatcggaaacagacgaatgaaagtctgcgtcctaatacgattgaagaaacttacgaactttgtgatgctttgatgaaggatgacaagaaggatatctgtaaagagttgggtgatgtgttgttgcatgtggccttttatgcaaagataggtagtgaaacaggagattttgatatcaaggatgtgtgtgactgtctttgtgagaagctgattttccgtcatcctcatgtttttggcgaagtgaaagccgagactgccgagaaggtgactgaaaattgggaacagttgaagatgaaggaaaaggatggtaacaaaatggttttgagtggagtaccttctgctttgccttcgctaatcaaggcataccgcattcaggacaaggcccgcaacgtgggatttgattgggaggagcgttcgcaggtttggactaaagtaaaagaggagatcggcgagtttgaagctgaggtggagaacatggataaggagaaggcggaagcggaattcggtgatgtaatgttcagtcttataaacgcggcccgcctttacaggattaatccggataatgcattggaactcactaaccagaagtttatccgtcgtttcaattacttagaggaacacaccatcaaacagggaaagaacttgaaggatatgactttggaagaaatggatgctatatggaatgaggctaaaaaggaagaaaaatagtagggttggaattgttttttatgatgtgtgctatttttgtcttgcttgtttttctgttttaatcaataaagggtattgtatttattctaggtaatttaatgtatggtgatatcaaattgtgttctataagaatgaggggctgtcttttttatgacagctccccattctttatgaaataagttttatatgaattttattctacccattctttgatggcttgtgaaggatcaggatttaaaacagcacctttgttgaatacattttcataaagactgataaagatattcatccagggcgcacagtagccttctattgaattaaatcgatatccgataggagcattagtacccggataaccacgaacaacttgtaactctaaccgtttgtaatcccaaaagatgatcccttcaccccagaattcaatacgtttctgttcaacaaccttcttttgaaactcttttagatcatttactttacatgtatagctacccacagaagtattataacgaaatgtgtttacgaaatcttctaatttagaaataccggctgctaatccttggctcattcctattgcttcggcttcgattaaatacatttcctctatacgcattaacggatagtcaacggcagctccgattgtataatcgttcatttctccatttttaggtcggaatttgatacctgtatatggaggcatatcagcgaaatcatcatcggtcaacaaagttctatatttagttccgggagctttgtgtgcatcttcaggagcaatccaagttgtttttcgccagtctgcatttggtatttgatcgaacaattttctgccgataagcttgtatccttgccattttcggttaccgtaaccgaaagtttgttcaggacacatgcttccggcaaagttgagccaatagctatgtacatcctcggtagtcatgatggatccccatacccatgaattggttagtacactgttgaagccggtagtatagctgtctccaccaaaccattccttttcggtcagaggcattgctccgctttcgttaatgactttgcgtgcgtattcggctgctttagtgaaacaagtttcttttgatgcaatgtttaaatctgtattgttgtttagggtgttgagatcttcagggtaaagttcgaaacgagatcccatttccagccacatacgtgccatcagaccatggacaactggggtacagggcaagtttttggttgggcgttgataatcactcaaaagctcctcagctgaggctaggtcatctaatatgaatttgtatacggcatagaagggagcacgtggattattacgcccttcttcttctgtggtttcagcggtaataataggtacggttatgccatataaatttttactggctgcttctgcatctaatttctctactcctgtttttttatattcatacattcggactaagtccatgtatatcatggctctataagataggcatatacctttataatacttgttttcgggtgcatcatctgctttttctaaagcactcagtgcattatttacattattcagaaacttgtagttataataccaaatggtattgacaacatcggcatcacccaaatcattacatactccataagtatcaaaaaagtcaaatttgggttcgtggcagaagaagtcttcgcatgcactttctctgattaaattatatccactatatccaaaatcatgataaaattgtggaccgtaacttctaaatgcattaataaatgcgactactgaatttaccattgcgctgatagcttggtcagattttcctatttggtctatggtagctgtgctactttctggaaatacctcttcgatacaactgtttaagcttaatgctgatgacagacatacagcaatcattagtttggtaatatatttctttttcatattcttgattgtttatgtgttgattagaattgtaaacttagaccggcggagaatgcgcgtacggctgaatattctccggatgaatctttatttccgttccatgttacgcgtgaatcgaaaccttttctttttgaccaataataaacattgtcacaggccacataaatgcgcagattagttagatatagacttctaagtgtttttttgctgaaagtatatcctaattgaatgttttgaatacttatggaagatgcattagttagaaacctgtcggatgtttttacactgtacaggtcattgaattgccattgtggaatatcactttgagtattctccgggctccatgctttataaatatctttgtgaacattgtatcctaaatgagttgaagtaggaggtgacattaatgcttggtaaccatagtcgtatgcctgacctcctatactgtagtttatttgtgcagagaaatcaaaaccataaaatgaaagagaggtattgataccaccgtataggtctggaacagcgtcaccacataagtatagatcagcttgagaataggttgttgttgttttcatttcaccggtttgcttatctgtataataccattgtggtttgccttcttcggacacacctgcatatttttgaacatagttagtatacattggaagtccttctccgtaataatacagaccgtttacataaccggcatgtccatctataatgtctgtttttttactttctgcaagacggctgatcttatttctataatgtgttgcattaaagccaatattccatgttacgtttctagtcttgactggtatatattttaaatcaatttcaacacctttgttattcatgtcaccaatattgtcataatagcctgagtaccctaatgataaaggtacagaaaaacggttaagcatatcagttgttctgcgattgaaatattctatgctgccacttaatctgccttttaatagttcgaattctatacctaaatttatatttgtattggtttcccaggtaatatttttatttccttttctggaaaaacctaatgataactcattattgctgttattgatattgtaagtatctacatataagaaatcgtctattctgtcattaccctgttgacctacagaaaactttagttttaataaatcgagccatttaatgtcatccaaccatttttctttggtaagaatccaagcagttcccacagagtagaaattaccccagcgattatccgggtgaaagcgggaagaggcatcgcgccggtaagaaagttggaaaaaatatttgccgtcatagtcgtacatacctcggaataaatatccttcagtattgtatttactcttataggatgactcatcgttggtaccactgatggcaccgtttaattcttgattctgaaaaaaagagaacatactgtttttggctgcgtataattcttcataaacgttattaaagctttcatgacctgccatcaatgaaacgttatgtaatccgaagctatgattataatttaatatttgttgtaggttgagggttgttcgacgccaatgctggacattgatgcttccattcaaagaatttgctgttccataaaaaggatttaaagcatttttgtaccggctgtcacgtatcgaagtgcctgcattgaatgtgaatttgaagtctttcaggaaattaacatctataaatgcgtctccattcaaagtatttgcagaggtgttatatgtatcgagctgacttaattttattccgttagagttcgggttgataggacggtttagaggaccttggttggatactccgaaatcgtacatgtcaccatttttatcctgcatgatcttaccatttgtatcacgtaggtaaagtggatatatgggagctgtattgaaagcttggctaaaaccgccagcggctgaattctgtattgaatgtgtataactgatgttggcgccaaatctcatccacggtttagcctgatatgtggttttcaaacgaccggtgatacggctataatcagacccttctgctataccgtcttcatctaaatatccaaaagaagcatagatttgtgctttatcacttccgcctgaaatattgacgttgtattcttggcgtaatgctgtatgatatacagcatcgacccaattgtcgggagtgagataataaccgtttactatccgtcctaattttgcattaggattaagaagaccgtttttaccaatcggatattctccttcaggatatgaatatacgttgtaggataaaccaccggtttgactgttggttcctatcatattagtatttgcgctgacatatgcttggtcaggagtttgtccttgggcatttaaataataattgtataatgctttatagtgtgcttgataatattctcctggatcttttatgtagtcatattctatttcaccacgggtattggcactccatttagcgtctactgtgatttttgcatcgcctgctttggctgattttgttgttataattatgacaccgttagcacctcgagcaccataaagagctgtggatgctgcatcttttagtacagaaatagattctacatctgctggattgatgttattccatcctccttcgtatggcataccgtctaatacgatgaggggatctgtttttgcgctcattgaactgatgccacgtatcagaatgcttggagtttctccaggctgcccatttgtcattgtcatttgtaggcctgccacttgtccagataaactttctatgacattagtaaccggacgtttagttatttgttctgtatgaatcattttggcagatcctgtaaaagctgatttttttgcagtaccataagcaactaccaaaacttcttccatcacttctgttgttgaagtcataacaattttcatttccggcttgatggttacttcttgggtttccattccaatgaaagaaacaataattgttttgttggtaggtgagatgtttgtaagtgtaaacttaccattgatgtcggtgattgttccattggttgttccttttaccaatacagaagctccgattaccggttcgttgttttcgcttgagataacggttcctttcactgttacctgtgcttgtgcatggcttattcctacgaataagcatacgaatagtagtaatagtgtctttttcataatgtttgtaatagatttgtgagtttatggtttgtacaaacctaggaataaaatctaataaatcaaaatattttcgatggtaaatgtttaaaaataaaagtatattctaatcaatgtaataaaaacttaaacaagcaagaaaattaacttgtttttataaaagaaacatcttaatcattttgtcgttccgctgaactttttaaatacaaaaatccccaaatctaagttgattgatagatttggggaaaagttggaaatatctcttgttgcttttattttttttgagattggtgcataatttttaagatatcacggtggaatttaatctctgcacgttgtaacttatatattttcttgggagataagatttttttaaagcgctgtagatattccaaatccaatttatcggcttcaatccttgctttgacaataccttctataatttgttcgtattcggcatcggttgttttaggatttttgcctttgcgtgcttgctcccatgctttatcatttactgtttttttacggtcttgtaattcgaagtagatagggaagaatttagtggcctcttcttgcgttatttctgctttttgcgtgagatatgcttcttgtctagctctgaattcttctttggtgaaaccaggtttctttttgtcttgcgcctgtagcgaaatgcttatatataaagtgataagcaaggttgccagtctttgtatcatgtggttattatttaattatacatatctgaatttgcatctgtcaagtattgatagagcgtataatcatccatcatggaatgatctaaaatcgtttcaatatattcgtctgagaattgttcagtttccgctgctgtaaaaataggagtgtcttgtttagggggacctacaacaactctgacgctgaacatcaatccacaaaacatagctgccatatatatccaaggcttgatacgttgccaagtagttattgtttcttgcggagcagaagtttgttccttctccggcaatttattcatcaactcttttgagaagttgtcgaaataaccttcgggtaccatgaatggattttttgtcccgcatttttttaatagttcatcttcttccttcatagtgattctcctttctttgttagatacatttcttttaaaaaggtttaaaggcattcttttaaaaagttctctatttttttcactgcatggtggtaggaggctttcagtgcccctatacttgttcctaatatttcagacatgtcttcatatttcatttcttgaaagtattttaaattgaatactatacgctgcttttcagggagcgtcagtaatgctttttgaaataatatttgagtttcatctccattaaaatatgtatcactttccagtttgttcaccatatctgcatcagcgtcgtctatggataattggttggtggcacgttgtttatttaaaaaggttaagcattcattcaaagctatgcggtaaagccaggtcgacattttggcttcggcacgaaaatactctagattagtccatgctttgataaatgtattctgtaacagatcattggcatcttcatgagaaagtaccatccggcgtatctgccaatatagctgttcgctgtattcgttgacaatacattcgaaggcttctttttgtcgtgccgggtcctgtaataacgctattatttctttctcattataagtgttcatgttcctatttttaaattagatatccggtttatgttatggtttaatggattctattgaaatttttaatgtttcccgtgcaagtagagtgttaggaaaaatatccgatgcttcctgtaacaatatgctttcatcttcgtagcgggctgaaaaatgtcctataagaagttgttttacttttgcggtacgggcgatttctccagcttgcgaagcagttgtgtgaaaggtttctttcgcacgggcttgttcgctttgtgcaaaggtggcttcatgaaataacaggtccactccgtatatttgttctatgatatgtggcaaataaatagtatctgaacaataggcatatcggcggggaagggcagaagggatagtcaatttgttgtttggtactatttttccgtccggtaatgtgtaatcggcgccattctttatccggttgagttcgtatacggggatttcataaaagtcaatcatgtcgcgacgaatatgggcggggatctgtttctctgaaaagaggaatccgcatgttggtatccgatgacgtaagggaattgtttctatggttagcgaacggtcatcataaattatttcagctttgcccggatcaaaagtttggaaaacgactttgtaactcatacctttgcaaaaaaagtcgagttgtggagtaagaagacgttctaattctgcgtgacagtgaatatagagtgtggctgtccttcccagcataccgaaagttgatatcagtcccattagtccgaaacaatgatcaccgtgcaaatgtgaaatgaatatatggtttagccgggtgaatttcagttttgatttgcgtaattgcatctgtgctccttcaccacagtctatcataaatagtttttcacggatatttacgacttgtgatgttgcaaaatgccgtgtggtcggcaatgctgacccgcatcctaatatatgtacttcaaatttctccatcgttacaaagatactatcttttttgaatggaaaataaaaaatgccgtaaaaacggcattataggattgaactatttcttaagttttattttcacagcattcatgccacgtgaccctttttctagttcaaaagtcacgatgttattttctatgatattgtctatcagtccactaatatgaaagaagtatttctctgcattcttcaaatcttttacaaatccatatcctttggatacattgaagtgttctattcttccttcatgtactagttctatcggttcttcagttctacgaggagttgaaacttcaatggtggacatatccacttcttgtggtttattattaggagtgggaggagtatcggttatcataccgttctcgtctacataggcaatcatatcttcaaaggaagatgtgccgttactttttctttcttcttttttttgctgttttgctaaacgcttttcttgttttttcttttctagatctcgtttggtaaatgaaataggtttcgccatttgattctttttaaattagtaatatacagttcggcctgctacggggaagtgtatggaattaatagtgaggtaataagaaaacgggggagaagtcgttatgaaatactaactcgaaattttattactctataaagatacggttttattacggatatcccatagaatattttcctttttaagaaataatggcataaaaaaaggatgcattttaataaatgcatccttttggcttatcttaaagtaaactgattacttctttttgttttccaactgttctttcaaagcagccaaagcatcgatatcgcctaaagtggtagaggctgcctgattttggatagcaggagcttcttctctcttagttgttttctttgcattagaagctgctttcttttcagctctttcttctgccttggcagcatcttcgaaaatgcggctgtgagacaggatgattctcttggcatccttgttgaattcaattactttgaatgacagtttttcatccaattgggcttgagagccatcttcttttaccaagtgtttcggagttgcaaaaccttctacaccataaggaagagctacaacagcacccttatccaacatttcgatgatagtaccttcgtgtacagaacctacagtaaatacagtttcgaatacatcccaaggattttcttccaactgtttgtgaccaaggctcaagcgacggttttctttgtcgatttccaatacttgaacttcgatatctgcaccgatctgagtgaattcagaaggatgttttactttcttagtccaagacaggtcagagatgtggatcaatccgtctacaccttcttcgatttctacgaatacaccgaagttagtgaagttacgaacttttgcagtgtgcttggaacctacaggatacttttcttcgatagtttcccatggatcttgtttcagctgtttgatacccaaagacatcttacgttcgtcacggtcaagtgtcaggataacagcttctacttcgtcacctaccttcatgaagtcctgagcagaacgcaagtgctgtgaccaagacatttcagatacgtggatcaaaccttctacgcccggagcgatttcgatgaatgcaccgtagtcagccataacgactactttacctttcaccttgtcacctacctgcaggttagcatccaaagcatcccatgggtgcggagtcagttgtttcaaaccaagagcgatacgtttcttttcgtcatcgaagtcaaggataacaacgttcaacttctggtcgagttctacaacttctttcggatcgcttacacggccccaagacaggtcagtgatgtgaatcaaaccgtctacgccaccaaggtcgatgaatacaccgtatgatgtgatatttttaacagtaccttccagtacttgtcctttttcaagtttaccgatgatttctttcttctgctgttcaagttcagcttcgataagagctttgtgagaaacaacaacgtttttgaattcctggttgattttaaccactttgaattccattgtcttacctacaaatacatcgtagtcgcggataggtttcacatcaatttgagaacccggcaagaatgcttcgataccgaatacgtccacaatcataccacccttagtgcggcacttgatgtaacccttaataatttcttcattttcaagagcagcgtttacgcggtcccaagaacgagtagcacgtgcttttttgtgtgacagaattaactgtccttttttgtcttcctgattttcaatgtatacttctacagtatcacctattttcaaatctggattgtaacggaattcatttaaaggaatgataccgtctgatttgtagccgatattgacaactacttcgcgtttgttcattgcaataacagtaccgtctacaacctcgcggtcgtttactttgttcagcgtaccgtcataagctttttcaagatcttcgtggctcatgctggttacagcttcgccattttcataagcatcccagttgaaatcttcaacaggagtgatgttttttaaattttccattaataaaattgttaaaattctcagttaattacgttagacattatattgtttatctaatttcgggcgcaaagatacaacaaaatactgaaacacaaacaagtttactgaaatttcttgctgattaaaatttaaatgggatataatcgttgtttttaatttatgtttgtacatttgtagaaatttaacctattaaaatatggtagcgttcattttagtttgtttggttctacttttaggtcttttatggggatgggaaacaagaaagaggaaaagttgggaacaggagttcgttaagaagaaaaatggggtgtgttttgtgaaaaaaaattcggataccatattgtataatgtgggtgcatatataatttgggttgatcggaattttttggttgaaaagaccaattactataatttgaataatacttctgaaagataagcggaaagtaatgtccagaggctttaacggttatttgtccaagcctctgaacaaagagctttgtttgatatgctccgccaaatgggaatttaatcttccaaagagtaatcaatggtggttacaacgcggatgcgtttgatgtaaggagtgttggcgtcacgatcctcaatgctgaattgtccctgataggctctttttatcttaccaagttcgctgtccgagtccttggcgaatttaacggctgccgcccgtgcgtttttagttgcttcctctatcatttgaggcttgatgtcgtttaaaccggtgtagtcatattgcacattgtaacgataatctccacccgtaatagcgataccttgctttaagagttcgctttgttcgctgatcatctttctcaccagatctactttagttgaagtaaccgtgatgacagaggtcacattatagcggaagggaactgaattattattataacgttcggcttgcatgtctataatttccggtgcattgatactgatttcgttttcagtgattcctttctgtttcaaaaaaccgacaattgcttggttggttgcatttatcttgttatataaggtcgggaggtcatttcccaggtctttatacatcaaaggccaagttactttattagccggcacctccatttctgccagacctttcacattcactactctgtctttaccagagaaagtatccaatccctgtttgataaaataccccatcaccaacatgcctatagcaaggatgacggcttccagtttccaacttttcatacttcagttgtttttagtgatacaattatttgttttgtaagcgtccaatgcctttttaacagaaccctgttcttgcagtaattgttttgcttctgctttattaatatgtaattcgtcaatcagcatttgcactcctcggtctattagttttcgattgctgagttgcatgtttaccatccggtttccttttactctgcccagttttatcatgacggtggtacttatcatattcagtatcattttttgccctgtgccgctcttcatgcgcgagctgcctgtgataaattccggacctactatcatttcgatgggtatatctgccacactcgagagtggagagcccggattgctgctgatgcttgctgttaatattccgtgttctcttgctttttgcagtgctcctattacataaggagttgttcccgatgccgctatgcctatcagaatgtctttatttgtgatgtgatggtcttgcagttccatccagcctttttgactatcatcttcagcattttctacgggacgtctcaaagcctgttcgccaccggctataatacctatgacacaggtatcaggcataccgaaagtgggtggaatttcagaagcgtccaatactcctaggcgtccactggttccggctcccaaatagaatatgcgtcctccttgatgcatacgttctactatttcatttactagtttttcaatttgtggtatgcaggcatgaacggctgaggctactttccggtcttcttcgttgataccttccagtaactctctgacggatttttgttccaaatcctcatatatggacggttgttcggttatttttataaaattcatacttcgaaatgataatcctttaatccttccagtggactttttaaaacttttccgatggacacattcagtcttagagctgcttcttttacttcttcttgaaagaaaaatgcaatagaacctgtgaaatgtacaagaatatcatgatattcgtattgcataacattacgggtgaagaaatcagtgaagcaggaaattaatagattccgtatctctggtctgtgcttgtgggcgaaaagaaaaggagtcagacccgccagaaagcggttggctaaaggctgtcggtatactttatctaaaatcagtgccggggtcaaatcgtattctttaaggaaatcttggcaaaggtcatcgggaagttggtgtttcagtaaatcacctaccagacgtttccctaatacggctccgctaccttcatctcctaaaatataccctaacggagaaatattagctgttattttttccccgtcataaaagcaagagttggatccggttcctaaaatacatgcaattcctgccgttttaccacatagggcgtgggcggcacctaacaagtcactttcgacaaggatattcgctttggggaagttctgcgccaaagctgttttcactatattcgtcttttcgggaatacatcctgcaccatagaaataaatagttgtaaattcagtggtgtctcccaactggggaattagtgtggaggcaatcacttcttttatttcatcaactgattggtggaaggggttgatacctcctgttcgaactgtcctgctgtttgtcttggtgttacccagacaccagtctgttttggtggaaccactgtctgctattactatcatatcggataataagatgattgttagtcttacaaaaatagtataaatttatccgatatccattgttttccgtatttatttgtcgggctcttatattattttagtaactctgttcctattacttataagttagtgctttttcatataaacagacttttttaataattgagccacagcttcattgcagctatcttttctctgcttacagtaattttatctttaaatggcggttttacctgtactattatttttcctaaaaaatagttttctattttctgtatggcatgtacactgaccaatgtttgccggttggtgcggaaaaaaatatcggggtttagttgttcggacagtttgtcgagcgataaatctatgatatgctcttttccttcttttgtgacggcaaaggtaattttgttttcagaatagaaataagctatatcttctacttgcaaggtatacagcttttcgtctcctgatatcaggaagcgggtacggtattttttttccggattacttatatttttcagtaggttcagtaattcattggatgggttcgatagggtggtattgccatatctggcagttaatctttcaaacttttcgatggcttcggccaatctttctctgtttattggtttcagcagatagtctatgctgtttacagtaaaagcacgtatggcatattcgtcgtaagcggtggtaaaaataatcatactttcgggttgggcctgttctatgaaagcgaaagaaatgccatcggtcagttggatatccagaaagattatatccgggtgtggatgctcctgaaaccattttacagatccctctatgctgccgggcaatacaactatatcccagtctggccttaatcctgacaacattttatgtagcaggcgtcctgcaggaatttcatcttctataatagcggcttttatcttattcattcagtaaaggtatttttacggtgaaatattcagaatcgtcaataattgtgatatgcaagttgcaaatcagcagatagcgggcagataagttcttcagtcccattcctgattttgcaacatccttttttaatttgatcttgtttcttacggaaagagtttgatctttgtcagaataatccaaatggatgaccattggattttccatattgatgatgttatgttttatcacgttttcgataagtaactgtagggttaatgaagggattttcttgttcaataacgtgggggtcattttgttttccagttgaatgcattttcccagacgcacttgatgcagatagatatatgaatccagaaattccagttcatcacgtaaagtgacaagtccttgttcctgactttttaggatataacggtaaacatctgatagcttttgtgtaaaaactactgcgttttccggattatattctatttcggatattaaagtattcaaactattgaacaggaaatgtggatttaattgattttgtaaagccgtgtattgcgctttgatggaactttcttccagcttggttgttttttcatgcagaataaccagctgcctgtaaaaagcgctcgtgatacttaaactcacaatcacaatttctaccaaccatataatcatgatcaagcgcagacccggactgctcagtacaaatgggaaaggcagttccagcaatactttacagatggtcagagtagcgtaattcatgaagaaaagaatagctgcaatcaaaatgcagttgataatcagcttgtttctcttcttgataaagaatagagagctttttttcagccaccggttgatgactatcagactgaagcctaccagattgaatatgaacaccacagaaataaatcccagagaggagattaatattttctgatgttgaggcgtaaggtcggtatatagtaccagcgaaaggtatgagaaacatgccagccctgaaaacaggaaaaagttgaagaattgattgtatttattttgcatagccattccgctgttgaaaatgatttgggttattttacaaaaatatgaaaaaaagaggaaattcagaaaagaatagaatactttccaaatctcttcttttatgagcaaacgcttagtatggattaaaaacaaactcctacacgtacacccatgctattccttccatcttcagaataagtcaggatatcggttttattggttgcgtagctataatatacggctacatgaaatcccagacgttgataaggcaccggatgaatatccattcccagttcgggtgaaacatagaatccccacgggcgttcataccattgtaccagattgttgtaaatggagttttgggaatacatggcacccgatttgactccgaagtaaggttttacatacctgttatccggtaacttgtaggatacagatattccgaagggtagttggaacgctgattgttgctggtctgttgtcaatgaagccgttggggtgagggggatggtccggcggtccacatatcggtgattggtatgaaaattaaggaaagctcctatagaccaatagggcgtcagatcatattttccttcaaagttcattccccacccgctgaatttatcggcaaagttgctgttcaacggcacattcatctgccagtctacgttaaaatgtacattttcctaggtctgtgctttacttgtgaaacaaaagagaactagtaacattccgatgaggatacgtttgggaactctgtgttttaatattttcgttttcatgattttccggttttattgtttgtttgacagataaggagattgtgcaaatgcctgattgacggcatttaatgtcaactgcatattgaaatgggagtttccgtatagcagtcctgacgcataggcatgccagatgacaggcagtttgttctggttggacttatcggcaggttgtcttaaatcaaccatctccataatcagggttcctgtgtcatagctgtaagttaccggataaggataataccatcctcctccccagtagggcccccagaatccggcatcccaccagccgccataccatcctcctgtggtcatttgtattctttgttgggcgtatgacaactgaatgcctacattggctttttctttatcttccgtccgtacatagcctttctgttccatttcatgggccactgcactgataatgttttgggcattttcatctttccaataattggctttcaggctgttgtccggaaccagaatgctatctggcaggtaataggtggaaaactcattgaaatgtacactgttgtcataatcagtgtaaacgctgtagtcactatccagtttattcatatccggatctttctcgcacgaagtaactatcatggcaagcatgaatagtggaaatagtagcttcttcatattcctataattttagttaagtagtttatagtgagcgtcctttaaacacattggctttctttaatggcaatatttgaccggataaagtcatgtggctggaattaaagttcggaagaatatctacagtcgcattgttgcttccataaggtatgtcaatgtttacttgggctgagattccgattcccatcacgttcatactgacatgaatattaccttttttgtcggtttttactttatagttcgaagcattaccgtctacggtaatacctcctagtccgttcggaccgctgaaaggtacattgaatgctacttgcaccacggccttgtcaccgtccagtcctacaaagttggtgttggatgaaacgaaagcggaggttccgtatttaaagtaaactctgtccgcttccagtacaaaggtttggttgtctattgcctctttggcttcctgaaataacattttgtccaaagcttcctgagccgcttttttttcctgacgtgtcatttccttttctgttgtttgtgcctgtgagtattctacgcaggtaaacaaggttactaatgttaatattacaacttttctcataatacctacttttttattttatgttgttttcctattgaaatccggtataaacataataagctttgtcataaacaggtagtaatttgttactgaaacggaaaaaccggttgctgaagtgtgttttggaggagctgaaattaaaggtgtgaagaggaatgaatgagaaatgaacagccctggaaatctgctttaacaaaatttccggggcttattttctatgaactataaagtgattagaaagaccttcctttaaatatatttgacttgtcaagcggtagtatttcaccggataaagtcagacggttggaattgaagttggggcgtatatctacggtggcattgttgcttccataaggtaatgttatacttacctgagcagatatacctacacccattacgctcattgtcagatatatgcttcctttcttgtcggttttgatcttgtaaccggaaacattgccgtctacagtgacacctcctaatccgttaggaccgctggcaggaatgttgaatgctacctgcacggatgatttatcaccgtctaccattacaaaattggtattagaagaaacaaaggcatttcttcctcttttaaatataacccggtcagcttccagtgtgaacgctttattttctatagcttgtctggcttcttcgaacaaggcttgttccatagctttttgcgcctctttcttttcctgacgagtcattttttttgttgtttgtgcttgtgagtagcctacgcagcaaaacaaggtgacgaatactaataaaataatctttttcatatatgtatcttttatgttattgtttggatatgaaacaaatataataattattttgttgaaaggactttatcttattttttaattaaaagcttctatgactttatattttgtacaatgtgtcaaaaagggggaggacagtatggcgaatcctggcgcaaaaaacaatggaacttgatgcaagattgggtaaaccttgtaacaagatattgcggaatttgatacacgtacataagtacgtgttggcttatgcttgcgtatatgtagcccgatgccaacgtatgttgcaagcttacgttactgatgttgttgaatatgtctttatgtttttagaaaacatcagcacctttttaaaaaaagataaccgccttttaaaaaaagacaagggcgttttaaaaaaaggtcagcatgtttcagcgtatatgcctatcatgttcagcgtacattactccatcactaagccgatattcttccttctccatttatcctttcatcttattaaaaacacacagtcaatcaagcggttaaaactggaaccgcttcccctcactcccgtttcaacggtaagcgtcttcgcgattctatcttgtcgctcttttttcattcttatatttttgccatgtataaaaatgaatcattatggatttagcagaaaaggaggatgaaaggacaatgacgggatgttccttcattaccggaacacccaccggcagggcgttttgacggtaaatgaaaggaggagggaaaaacgaattaaaacaaatgctgaagtgcggagcctataatttcagaatttctaacggaacccttcccaactgtgccgctatatttgagaatgaactctgaaaagaaccatagattttttgtgtgcgggccagcgtgtacatatctgcgacaccctccctgattccttccagagagccataatccgcctgtctttccgaggacaggctgaaataaaggtcggatcaacctttcttcttgccgaactccggatcaatttttagcagagccgttactccgaaggtgataacgcagcatatcataatccagataaagaaatggttgtatcccatctgctcctgaagccagccggcagccattcccggaatcatcatgcctaatgccataaatgcggtacaaatggcataatgtgctgttttatgttctccatctgcaaaataaataaggtagagcatataggctgtgaaaccgaatccgtaaccgaattgctctataaagatgcaaatattgatgagatataaagaatcaggctggatatagctgagataaacatagactaaatcgggtaaggaaatggcccataccatcggccagagccattgtttcaaaccgttacgggctacggctattcctcctaaaatacctcctagggtaagtccgatgataccgacagtaccttgtacgaaacctatttcttcggttgtcagccccaaaccacctttttcaacggggtctataaggaaaggaatgcacatttttgccagttgagcttcgggcaaacggtagagtaacatgaaaagaatggcaatgcctgcctgctttttttgaaagaaactggcaaaagtaccaaagaactttttgagcagattggaagcggaaacttctttggaggtatgatctgaatccggacagggaagaacaaacttatgataaatccatattccaaggaaaagtccggccaatacaaaaaaggtgatggaccaagcgtatggtatattatctgtcattatttccagtcttcctgcaagcatgataagtaatccttgtcccgcaatggttgcaatacggtagaaggtactgcggattcctacaaacagggcttgccgatgcgagtccagtgccagcatgtaaaagccgtcggcagcaatgtcgtgtgtggcggagctgaatgccagtaaccagaaaacggccaaagtgagttggaaaaaatgctctgtggggatggtgaaggctatgcccgccagtcctgcgccgattaaaagttgcatggtgataatccaccagcgtttcgtcttgataagatcaatgaaagggctccatagaggcttgataacccaaggcaggttgagccagccggtataaaaagctaactcggtattgctgatgcctaatcttttatacattatgaccgaaatggtcattactgccacatagggcagcccttgtgcaaagtatagagtgggtatccatgcccatggcgaggtatgcttgtttttcatgattcctttcattttaaagagtccgaatggaatccccgcccatgtgggcggggcctgttaataaaaacggcggatgtccgcacctttatagtaatgtaatagaatttcatcgtaggtatatccccgttctcccattacggcagccccgatttggcagagccctactccatgtccccagccggcgccggtcagcagaaaccattcgggaacgccgtttttcagttctcccttatctattacaaaggctgagctgaacaggtgggaagaagatagagtgcggcgtatttccagttcctttccgatagtcaatgtttttagcgaacctacaattttcagtttgcagatacgtccggatttgccgcgttggataggaatcaggtcgatgatgtccccataatccgattttgtattttgacggatcagttcggataattctgcctgggaataacgtactttccaacgatagaaatctgtagtttcctgatcgtagttgttcagaatttgtgaaatgacttttttatcgtgggtgtcacagaacgaaacaggagaagtacgtatccaacgctctgcctcttcttctttggtcagatcgggtaacgggcggttttcttcttcttccgcatcacggattgtagacaagtagggataattcttgtcttcccagcagtatccgaattcctcgcttgctcctccgcagcatttggagaaacgggcatcgcaaatgccgcgttcatacatcagcaattgtccgcgggtggctcttactgcttcggtcacggcggcactggatgctttggttattccttggtagcgttggcaatggtcatcggcgcaaacatcgaatatggtatgatcttcgcggtcgtaccagcggatgtattcggtatcggttttgataaaggagaaaaagccttcgtttttgtcactcaaggccttgcgtttctctatttgggcaaacagccagctgcgtgataccacggcatgggctttcagaaactccaaagaggaagtggcgttcatctccgaggagatgacgcttatcagatagtcttcggcgggaagaatattgatagcggtgattttgccttcgtccaccactagtttcagtgttcccataaaactttgggtttcttgccgttcccagtggaaattaattccgatggttacgtcatataatgaaaacgaggcatgttcgtcttgtggagtgaaggtcagttcgcggtaaagattaccattccacagaatacctccttcgctgaaggctacttgttgttcaccacagactgtttctcctttagcgaaaaaattgccgttcagtgaaaaatgaatttcttgtgcatttactattcctacgcttatttcgggttctttcattgttattcgtcttgtttttgggcttgctgtaattccttcatctcttcgtgttctctctatctttttgctttctcgtcaaaataacgtccgggtatcttctcggcttcttctactgttattcccacttcttttatgatggatgccactttttcttctgttattttgtcgaaatcttcctgacgggtggtgacgattacgccagccatgtccaaagctcccggactgatgagcatctgttcgctgccttctgcaaagtagcagtcgggacggtgcttgctgcggggaaaaaccaccgtatagtatagatggccttccttccataacagcaggttgaacttcgcttcttgtccgtcttcatccggtgggaaagcggcgagggcactgtataacagggagtcgtcataatgcgtgttgcttgagaggattaccaaaggacagggatagtccttggtgttgaggtaaattcggctacattctagtggataatcttcctcttcttctaggtagggaaaatacatgctgcgtatatcgattgtctgtgcgtgggttatcagctgttgtacgttcgggatgatgggaacatcagtttttctgactccttgaagatggagatggtccggtgcagaggctccgcaatgtgctccattatagaatagggcgtagtccggatatttctgtacgaatgcacggacgtcatcgtaactgaaaatattctcatccatgagttgggggatgtgatctttatgggcgatagtgaggtgatccggcaatatgggataagggttaacgcatattctgtttgcagtgatggtttccagtgctttctgctccttaggctggttttccttgcacaggaaacaggggcgtgcttggatgctgtccttatccactttggcggtagtcgaaaccgcacgctgtgcattgcactgtaccacaaacgtgtagccgtttatggacagttccttggtctgtatagtctgtaatgcctcgtggttgtggtgtgccagtggccagcacgccagttggctgtctataaatcgcttgatttcattccggttcttcagctcttctgtatattttttgcggattcccagttcacgggtgcgcaggctgtctttgtagtgattgttggcattggtctgctctatgctcagggcggcatccgagttcccttcccagcggcggcacagatagagtacatcatagattcttcctatcttatattggcgcgagaaaatgagtcccagggcataatcttctccgtagctgacattgggcacgcctgtttcgcgcaggataggtgtgaagaatgcgcgcggagcccccagaccgttgatgcgcaatgcgttattgtgtccgttctctttcgtccactcgctatggtctatcactcccggagcgatggtgttcagccggaagtccgtcatgcggtaagttcctattaccatggcgcattgctctttgtagaacgtgtctacgatggtttgcagggtatgggtgtcgctgtacaggtcatcgctgtcaagctgtatggcgaagcgtccgcaccgggggtggttgattgcgaggtcccagcatccccctatgcccagatcggtacgttggggctgaaggtggattaccgctttgttgtccttgtattgaccgatgatttctgtggttccgtctgtcgagtgattgtccacgatgatgatgttgaatggaaagcgtgtttcttgtgcgagtgccgaccggatggcatcgtcaatggtacgggcgcgattgcgcacggggatgatgacggaggcttcatactcgaaatttcctttctttacatccgtttccacacatatgggttcaaggagggcattgatagatttcaagtatcgtgtgaatgcttcttccatttctatctgtacctctctgttacggggatttacgtagtcgaactgcttttcgccggacaggcggttgtcgctttctgtttccgtataaagatattcgttgatatgtaccagatgagaatggagggtaaggagcaggcgcagttcataaagggcggcatactctctttcctctgtcatttggaggctggcgaggatgaattccgttctgttgaatatcagtagcggaccgaaatcgaaatcatcacgcatactgccgggttggtagtcgttgacgggatgtttcttcttttctccgtttttccattcatgatggtcggcatagaccatgccgcattctctgtcctgcaggaagtccgtcatgcgttccagtgccttgtaagccagttccaaagcagaagtcttggtgtagagcaatatataaggtgtgtctgctttttcagcaatcatcttcattgtcttagaactggttagtgaatcaacaggtaatatttcgcatccttcgggggtggataatgtcttgttgggttcgatgttcagcagatagattttgttgactatgctactttcttttagagcatggattgtctgttctgccgctgtgctttccctataaggaataaagcaattaattgtttttctcattgttaaaaagtatttctcacggcaaagataggtaatatatcttattttttctctacctttgtacgctaattgtcttttaaatataaatggaaactccgaaaacagcattacttggcaggacattggatgagattcaacagattgtgaggaatctgggaatgcctaaatttgccgcaaagcagattacgtcttggttgtatgataaaaaggtggaaacgatagacgaaatgaccaatttgtcattaaagcatcgcgaagcattgaaagaagggtatgaggtgggagcatctgctccggtggaagaaatgcgttcggtagacggtacggtgaaatatcttttccgtacaccggctcataattttattgaagcggtttatatacccgatgaggaccgggctactctttgcgtttcctcgcaagtgggatgcaagatgaattgtaagttctgtatgaccgggaagcaaggttttacagctaatctgagtgcccatcaaatattaaaccagatctattctattcctgaaagggaaaagctgactaatcttgttttcatgggtatgggagagcctttcgacaatctggatgaggtgttgaaagtgcttgagattctgacttcagaatatggttacggttggagcccgaaacgcatcactgtttcttctgtgggtttaaagaaaggactggagcgctttctgaatgaaagtgattgtcatctggctatcagtatgcatactccgattccttcgcaacgaagggatttaatgcctgccgagaaagctttttccattacggaaattattgatatattgcataattatgattttagcaaacagcggcgtctgtcttttgagtatatcgtattcaaaggggtgaacgattcacttatttacgctaaagagattgtgaaacttttgcgcggcattgaatgtcgtgtcaatttgatccggtttcatgccattcctaatgtggatttggaaggggtagatatggaaacaatggttgccttccgtgattacttgacgcagcatggcgtatttgctacgatccgtgcttcaagaggagaagatatttttgctgcttgtggaatgttgtcaacggctaaacaacagaaggagaaaggtgttacattacagtaaataacaacaataataccatataattatgaaacgaatagcattttatttaagtttggtgctggtggttctggtactggcttcttgtaagaagggacaaaagaacttgtttacccccacgtccagcggtaggccttacgaagtattggtcgtagtaaataaacctgtatgggatcgtcctgcaggacgtgcattgtttgatgtattggataccaatgtgcccggactgccccaggcggaacgttcgtttcgtatatcaaatgtggacactcagcattttgaccgtgtgctgaaaatattccgtaatatcatcattgtggatattcaagatatttatactcagcccaaactcaagttttcccgtgatgtttatgcgtctccgcagatgattatgacaattcaggctcctaatgaagacgaatttgaggaatttgtagcaaagaacagtaaagtgattatagatttctttgtgaaagctgagatgaatcgtcagataactttgttgaaacaaaaacatagcgatgtgatttccactaaggtaggaagtatttttgattgtgatatctgggtgccggtagaactggctaactataaagaaggcaaagattttttgtgggcttctactaatcgtgctacagcggatatgaattttgtaatgtactcttatccttatacggacaaggatacctttactaaagattatttcattcataaacgtgattctgtaatgaaagcaaatattccgggtgaacgcgaaggaatgtatatggcaacagactctatgtttgtagatgtggaagatattgttgtaaaaggagagtatgcgcaagaagcccgcggattatgggaaatggaaggtgacatgatgggaggtccgtttgtgtctcatgcacgggtggatcgtgctaacggccgtgtcattgtggttgaggcctttatctattcaccggataaattgaaacgtaatctgatgcgtcagatggaagcttcactttatacattgagattgcccaatgaaagcttgattgacgaaattgtaattagtggtaatattccggaagaaaaaatagatacaacaagccgggtaaagtaagaagagacatataatatataatatagatggaagataactacaagatacgagttggtattactcatggggatatcaacggagtaggatatgaagtaattctcaaaactttttcggatcctaccatgctggaactttgtacacccattatttatggatcgcctaaagtggctgcttatcatcgtaaagcaatggatattcaaacaaatttcagtattgtcaattctgcagatgatgctcagccggataaactgagcatcgtgaattgtacggaagacgaattgaaggtggagctctctaaaccgacactggaggctggtaaagcagctttggatgcgttggagagagctttgcaggattatcgggagggaatgattgatgttttggtaactgctcctatcaataagcataccattcagtcggaaagttttcatttccccggtcatacggaatatattgaagagcgtgtgggggaaggacagaaggcgttaatgattttgctgaagaatgatttccgggtagctttggtgactggtcatgttcctgtacgcgagatagcacaagatattaccaaggaacttattatggaaaaattggctgttttccatcgttctttaaaagaggattttggcatcgacagtccgcgtatagctgtgttttcattaaatcctcatgcgggtgatgagggattgattggtacggaagagagtgacattataattccggcaatgaaggaaatggttgccaaaggcattcagtgtttcggaccttatccggccgatggctttatgggatctggcaactatactcattttgatggaattctagctatgtatcatgatcagggattggctcctttcaaagctttggcaatggatgaaggagtgaattacactgcgggacttcccattgtacgtacttctccggcacatggtactgcgtatgatattgccgggcaaggggttgccttggaagattcttttcgccaggctatttatgtggctatggatgttttccgtaaccgtgttgtcgagaaagagattcatgcacatccgctgcgtaaacaatattatgaaaaacgggatgatagcgataaattgaaattggacaccattgatgatgaagattaatggacgatcggtttaaaatataatttcaagaaaaagtagaaatgaaatttgcaattatatcagcgggtgaaggttcccggctttcgcaagaaggggttgctttgcccaaacctttggtgcaactgaacggagttgccatgattgatcgcttgatacagatttttgtacgtaacggagctgataaggtggttgtcattattaataatgaaagtccattgacaaaagagcatttggcaaaactacaggcagaagcagagatcccattggaagtagttgtgaaaactacccccagttccatgcacagtttttatgaactgagcccttatttgcaggatgataaattctgcttgactactgtggatactatattccgtgaagaagagttttcgacttttattgaaacgttcaaacaatcggaaacagatgggtatatggcggtaacggattttatagatgatgaaaaaccgctttatatatctacggacagtgctttggatataacaggtttccatgatgaggcgactcccgaatgccgttatatatctggaggcatttattgtctgaccccggcagccgttaagacgttgcatgggtgtatggagaaaggtatgtcacgtatgcgtaactttcaacgacagttggtagccgacggcttgaaattaaaggcttatccttttacaaaaattttggatgtagatcatgctggtgatatcgtgaaagctgaaaattttctagccggtaaagaggagtaacttaaacacaacagaaggaatggatgtaatttcaataataggggtaagccgtggaaatgaatattcccccaatcatgtagacaatgatgccgccatattttataaggtgacggaggaattgcggcggttgggctgtgaggtgaaagtttatgcggagaaagatttcgtggaacagggtgtcaagggagatattatttttgatatggcccgtgataaggtaacgatagctcgtttgaggtctttggaggatgaaggtgcattggtgataaactctgcctacggtatagataactgtgtgcgtaagccaatgacagaattacttataaagaacggggttcctcatccgcaaagttttataatttctacggcagatgagtatttggaaaattgttatccttgttgggtgaaacgaggtgactctcacgctatggtgaaagaagatgttgcctacgccacctgtaaggaagaggtagaaaatatattggctgatttccgtaaacgcggtattcctgttgcagtcataaacgaacacttgcaaggtgacttggtaaaattctacggagtgcatggaactgattttttttattggttttatccctctccttgttcgcacagcaagtttggtctggagaaaataaatgggatagctaaaggaattccttttagcgtagaggaattgaaaatacaaagtgataaagctgccgaggcgctgaatgtgcccatttacggaggtgattgtgtgatttcagctgatggcacactgcgaataatcgattttaacgactggcccagctttgcccgttgccgtgaggaagcgggaggtaaaattgcagagtgcatttataaacgggctaaaaagcaaatgaaataaaaaagacatgagtacagaaagtgagaagaaaggaatagaggcttctttcaaatccatggacacagaggagttcctggatatttatttcaaccgtcccataggttatgcatgggcattattttttaaaaaactaaaggtacaccctaatgtggtaaccattttttctatcattttaggtataggtgctggtgtgatgttttattatcctgatatgaaacatactcttttgggtatacttttgttgatgtgggcgaatcattatgacagtgcggatggacaattggcgcgtctgacaggacagaaaacccagtgggggcgtatgttggatggatttgccggtgatatttggttctttaccatttatgcggcaatttgtctcagactgatgaaccaacccatgccgtttcatattggtgacggcatgcattggggtatttttatttggatattggctattgtttcgggtactgtttgtcatagcaaacaatgtacattggcggattattatcgtaatattcatttatactttttaaaagggaaaagcggaagcgaattggataatttcaaacaacagcgtgaaatcttctacagtctgccgtggaagggaaacttctggtggaaagctttcttgtatttctatggtaattatacacgtcagcaggaaagaatgactcctaatttccaacagttttatgcattggtgaaggaaaagtatggagacaatattccacaggaattacgggatgaatttcgtgcggctagcaaacctttgatgaaatataccaatatcttgacttttaatacacgtgccattgctctatatatcagtttgttgattggcgaaccatggttgtattttgtgttcgaggttgttgtgatgacctctttgtttgtatatatgcgtcattgccatgaggcgatttgcgcacgattgtatcataaatacataacgaagtgaaaagtaagtatagaaatatattcctgatgtttggaattgcagccatcgtagtgatgctttgttcttttgatatggagtatgatgaactactggctaatttgcgccgggcgggaatgtggttgccggctgtggtagggttatggattattatttatctgttcaataccctttcttggtatattatcatccgggatggaaaaaagggaacacctattccattttggaaagtttataaactgacagtttccggatttgcactgaattatgccaccccggtgggattgatgggaggagagccttaccgcattatggagctgactccttatgttggggccagtaaggcaacttcatcagtaattctttatgtgatgatgcatattttctcgcatttttgtttttggtttttttctatctttttgtatctggctctacgtccggtagatattgccatgggaactatattggctgttgtgggggcggtttctcttttagccatttatttttttatgaaaggttacaagaatggtatggctgtccgtactttaaaattgcttcagcatattccttttatcaaagaatgggctaaacgtttttcggaaaataaacgcgaggctttggaacgtgtggacagtcagatagccgaactgcataaacagcgtagatctacgttttatgcctcgttaagtctggaattcatggctcggattataggatgtctggaagtgtatttcatattgaatattctgacaacggatgtcagttttccagcttgtattttaattatggcatttacttctttgtttgccaatttgttctttttctcgcctatgcaattgggcgcacgtgaaggaggctttgctttggcggtaggagggttggctattccgggagcttttggggtttataccggattgataacccgtgtacgtgaattgatttggattgtaattggtgtgttgttgatgaaagtcggcaatggtacacctgctaataagtaagataatggatacattgaaaaatattcagggagttatatttgattatggcggtacaatagatacgaacagctgtcattgggcggaagtgttgtggactaagtatatggaacatcaggtgccggtggataaggaaagtttccgtgaggcatacgtttttggagaaagggcgttggctaaatatccttttgtccagccttggcataattttcatgatgtgctttctatcaagactaaacttcaggtggaatggttggcggaacagagaaagttgcctatggatgagttgcaactgcaatcttatgcagtgaaagtggcagacagctgttatgggtatgtgttggatatattgcaggttacacgcccggtagtgaaggagttggctaagaagtataggttggtgttggtttctaatttttatggcaatatacagactattttaaaggatttcggacttttggatttctttgatgagataattgaatcctctgtagtgggtgttcgtaagccggatcctgctatctatagacttggagtagatgctatgggatttgcggcagagaatgtgctggtggtcggagattctttcttaaaagatgttgttccggccaaagctgtaggttgtcgcgttgcctggttgaaaggagaaggttggggaggagaagttatagacgaatctgttcctgatgtaattattacggacttggctcaattgcttgcattattgtaataggatatggaaatacaaagacacgcattggtgaaaagggactatttagttccttttgttttagtaacctctttgttctttttatggggattcgcacatgctattcttgatgtattgaacaaacattttcaagaggtgatggatattacccgtactcattcggcaatggtacaggtgatgttttatctaggctatttcataatggctattccggcaggattgtttataaccaaatatggatatcgtaagggagttgttttcggattgttgctttatggaatcgggtccttgatgtttattcccggcgagtattggatgtcatttgaatttttcctgttctctttgtttgtcattgcttgcggtttggtctttttggaaacagctgcaaatccttatatgacagaactgggggatagggaaacagctgccagtcggttgaacctggcccagtcttttaatgggctaggatgtatttgtggtcctttagtaggaggactgttattgttctcggggaagggagaagcaaatatctcgtatccttatatgttgatgggagtggttgtactggcagtgggatttattttttcccgtatcaaacttccggagattgttcatgttgacgatttggctgacggagaaacggttaagagaagtttatggtcgcataaattattcttattcggaatagtggcactattcagttatgagatagcggagatttctattaatagtttttttatcaattatgtggtggatgacgggtggatgaatgctcgggatgcggcggtagtactttctttcggtggacttggattgtttatgtgcggacgttttgccggtagttggatcatgcagcgaatccgtgcggagagagttctgctatgctgtgctttggggacggtaatggctacttttcttatcgtttgtaatttaggaaagatctcattaatagccttgtttttggtatacgtgttcgaagccatcatgtttcccactatttttgccatatctttgaagggattgggtggaaagaccaaacgggcttcttccttccttatgatgtctcccgtaggaggggctgttggtcctgtgctgatgggttatgtggcagataatagtaccatgtccttatcattcatcataccgtttgtttctttttgtattgtgttattctattcgtggtatgctgacgtggaaagaaactgaaatgaataatcccggatacagttgttaggctttatcgggattgtccatttcttcttaaattttttcagcttttaaagaactggttcggatgatattccatacatcctcttcggttttgctgaaaggaccggatgcctctagtttcagtgtcgacatagctgctgcaaaacaaccggcttcttcataggaagcccctttattacgcatatataaatatccggtagcataagtatctccacagccagtggcatctactatgtctttaggaggataggcagggattttatgaaatgtaccttccgcataaattatagaccctaagcttcccaatgtaatcaatacctcttttactccccattctgcaagttgtagggcagcttgttttatgtctgtctgaccggtaagcacttccatttcatgttcatttacctttagaatgtcaatatattttagtgcttctactttgtctgtccaatctatcggataaactttttcccctcggacttcacgtaagtacccttgtgcatctacagctaatatacctttggtagaaagatatttcacaacgtccaaagagaaatcatctgctaaaagacttcccaaatgaaaaatatgagcatttatgttctctagttgttctacggtgaagggatcggctttagccaatacccgctggctgcggttgtcttgattctcaccgtatgtattctcaaaatacactgtccggtgactaggaataacagtgactttgatgccttttgcacgaatatcttcaacagctttaaattcacttggagctagtgccgtgaccagctgataatgctttgtatcctttaagtgactgattccgtgtgagaaataataagaagtcccgccgggcatataagtcgtttttctgggtgttactattttatctaatgtaatgtgacctatgcaacaaatatcattcatacctatttatattaaacggtcgcaaagctacaaaaaaaactagaaaaagcatggaagttttcaaaagaaggtgtaactttggcacaaattatcttaatctctgctatgagatgcaattttaacaaagaaattagaatggaaaaaatgaatgtgaaaccggcaaccggtaaattaggcgttctttgtgttggattgggcgctgttacttcaacttttatgacaggtgtgctgatggctcgtaagggattggcaaaacctgtcggatctatgactcaatatgataaaatgcgtgttggccgtggagagaataaaaagtatttgcattatggtgaaattgttccattggcaaacttaaatgacattgtgtttggtgcatgggatgtttatccggctaatgcttatgaatcagcggtcaatgctgaggttttaaaagagaaagatattaatcctgtaaaggatgaattggagaaaatagttccaatgaaagctgctttcgaccacaactatgctagtcgtctggatggtgataatgtgaaagattgcaagaatcgttgggatatgatggaacagttgcgtgaagatatccgcaattttaaagtggctaacaattgtgaccgtattgttgttctttgggctgcttctacagagatttatgttcctgttgatgaaaaaatacacggaacattggcagcattggaacaggctatgaaagatgatgataaggctcatatcgctccgtctatgtgctatgcttatgctgcactgtcggaaggatgtcctttcattatgggagcacctaatacaactgttgatattcctgctatgtgggagttggctgaaaagactaaaatgcctattgccggcaaggatttcaagacgggtcaaacgttggttaaatcaggtttcgcaccgattattggaacccgttgtttaggcttggacggttggttctctacaaacattttaggtaatcgtgatggtttggtgttagatgagccggctaacttccacacgaaggaggtcagcaaattatctacactggaatctattcttgttccggaagatcagccggacttgtatacagactactatcataaagtacgtatcaattactatccgcctcgtaatgataataaagaaggttgggataatattgatatcttcggatggatggggtatccaatgcagattaagattaatttcctttgccgtgattcgattcttgctgctcctctgtgcttggaccttgtattgttgagtgacctggctgcacgtgcaggacgttttggtatccaacgtttcttgagtttcttcttgaagagtccgatgcatgattatactgaaaacgaaattcctgtcaatcatctcttccagcagtatgctattttgaaaaatgctattcgtgaaatgggtggttatgaggccgatcaagaaatcgactaatttataacaggattttttattcgggcgtggattgcgcgggttttcacggtttttctttaaaagaccgtatctatccgtgaaatccacgtcttattttttatttttctgccataatttcttgttgtctgcctgagaatttgtaattttgtcatataatagagtgaatatggttaggtcagaaatacaaaatgtaaagctcagatttggtattattggtaatgccgaagggttgaaccgtgccatagacgtggctatccaggtggcacccactgatttgtcagtgttgatcaccggtgaaagtggggtgggaaaggaaaatttcccacagattattcatcagttcagtcgccgtaaacatggacagtatatagcggtgaactgtggggctattcctgaaggtactatagattcagagcttttcggacatgaaaaaggtgcttttacgggcgctatcagtgaccgtaatggctattttgccgaagccaatggtggaaccatttttctggatgaagtaggagagttgcctcttgctactcaggcacgtctgttgcgtgtacttgaaagtggtgaattcattaaggtaggttcatctaaagtgcagaaaacggatgtgcgtattgttgccgctaccaatgtgaatctgacggaagccattgctgaaggtcgttttcgtgaggatttgtattatcgtttgaacactgtacctattaaaatacctcctttgcgtgagcgtggagatgatataactttacttttccgtaaatttgcatcagattttgctgagaaatatcgtatgccggctatccagttgacagaagatgcgaaagttttgttgctggcttattcgtggcccggtaatgtgcgccagttgaaaaacatcactgaacagatatctattattgaaactaaccgggatataacggcagagattttgagaaattatttaccagagcaacatgtgaattctggtttgcctgctttgtttggagtgaaagcaaatacagggaaggcttttgaaagtgagcgtgagattttgtatcaggtgttgtttgatatgcggcgtgatgtgactgacttgaagaagttagtcaatacactgatggcggaacgtggcgcgcaatctgttccgacggcaccagctactacggcagtttcttattatcaggaaccgcaacggaatctagttgctacagtggtgcctgctacgcctaccataatttctgccgccaaaccggctcatcctgtagtagatgatattcaggatacggaggaggttgtagaagaagccactttgtcattggacgaagtggagaaagaaatgatacgtaaggcgctcgaccgtcatcatggaaagcgtaagaatgcagcaaaagatttgaatatttcagaacgaacactttatagaaaaataaaagaatatggtttggattaaacaattgaaagtagttggtgtgttgatggtactggcggggatcgtaactgcttgttctatttcatataaatttaacggatcgtctatagattatacaaaggtaaagactatttcgtttgagaatttcccaaaccgttcagctggctttgtttggggaccgatggagaatatgttcaatacggcattacaggatatttatatgcaacaaactcgtttaaagcaagtcaagcgcagtggtgacctgcaattgtctggtgagataacgaattatgaggcatttaataaaggaattggatccgatggctattctagtatggtagaattgcgtatgacggtgagagtgaattttgtcaatagttccaatcctacggaaaatatgaacggacagcaattttcggctagtcgtgaatataattccaatcagcagttaagtgctgtgcaggatgagttggtaaaccaaatgattaaagaaattgtagagcaaatattcaatgctacagtggcaaactggtagtgagtgattttccgtcatgatacaacaacaattatatgaatggataacgcatcctgaacgattgaatcgggatactttgtacgagttgcggacgctgcttgcgcgttatccatattttcagacggtgagactgctttatctgaagaatctgtttttattgcatgacataacatttggtgaggaactacgtaaggctgcattgtatgtagctgaccgcaagattcttttttatctgatagagggggagcgctttactgtatcttcctttgaaaaacaagacctacctaaggaagaggctggtttggatcgtactctttcattgatcgatacttttctctcttctttgcctgaagaggccgccgctatggaattaccaatggatgtaacaacagattatacttcttttttattgcatgaggaagaacatgtgtctgatgatatacctcagatgaaaggacagaatttgatagacaacttcattgaaaagtcggcagaggaacctttgttacctcaattaggaataaaagaggcggcaccggtgaagaataaagtttctgaagaagaggagtcggaagataatgaagaggatatggaggatgaaagctatttcactgaaacattggctaaaatatacgttaaacagcaaagatattctaaggctcttgaaattattaaaaaattaaatttgaaatatccaaaaaaaaacgcttactttgcagaccaaataagatttttggagaaattgattattaacactaaatcaaaataaagaaaatgtatttattacttattggattaattgtgcttgcagctcttttgatgtgctttgtcgtactgattcagaactcaaaaggtggaggcttggcttctagttttgcttcttcaaatcaaataatgggtgttcgcaagactacagattttattgagaaattaacatgggggttagctgcttttatggtggcatgtagtgtgcttactgcttattttgttcctgccgctcatacagattcttctgtaatcatggaagaggcagtgaaagaaggagctactaatccgctgaatgcaccttcaggtttcgctgctccgcaaacaaatgacgctgcaacagaaactcctgctcccagtgattcggcacagtaattatagagaaaacattttccttaattaataaggataagcgtcctgtttcgtttacgaaaataggacgcttttttgttttaagtttttttgctttgataagtatgcttttgtacttacttttgttctggaatgtttttaatctacaaataataaaagaatcatgttgaaattcatatcatggaatgtaaatggcttgcgagcctgttatgataaaggttttgttgatgttttccatcgtttagaggcagactttttctgcctgcaggaaacaaagatgcaggaagggcaactggatgccaagtttgaaggttatcactcctattggaattatgctgaaaagaaagggtattcaggcacagctatcttttctaaagtcaaaccgttatctgtgacatacggtttaggcatagaagagcatgatcacgaaggacgggtaatcactcttgaattggaatcgttttatttgattactgtgtatactcccaattcgcaggaagaattgcgacggttggattatagaatgaaatgggaagatgatttccgtgcctatctgaaaaaactggaagaaaagaaacctgtcattgtgtgtggtgacctgaacgtggcgcataaggaaatagacttgaagaatcctaagacaaaccgtaaaaatgcaggtttcactgatgaggaacgtgccaagtttaccactttgcttgagtccggttttacggatacgttccgctatttttatccagagcaggaaggaatctattcatggtggtcttatcgttttaaagcccgtgaaaagaattcaggttggcgtattgattattttctcacttccgattcactgaaagataggttgaaaggtgcacatatttatacggatatctttggctcagatcattgtccggtagaattgacaatagaactctaagaaacactctgaaaaagcttttgtttcaacacgaatctcagattatctataattaaaagataatctgaggtttgcgtcgttgaaagactctctctctgttttacttccgtaaattattgattcttgtttatctttactttgaaaaaacaaactataatgaaaagtacagatagagttaggtataattattattctattgattttgcttgcgtgtcaattgagtttattacaaaaagccagtgtatggatggaaagtggattgcgttcggccattcagaaggaagttcttatttttatagtagaggatatctcaagtatttgatggtggaataccgtttgttccctgtttttattataaagattagaatatgtgtacagattgtcaataccggaatctttgctaaactaaaagataagggatatttgaacacagctccggctgtcttataattgggagagggaataatctgtttattattgtatataccttcaaaaattaattgtattaggactttcgtttgaagaaagagttggtctgctagatgtgtaattttgttctgtagaccgtgtggcgtataaaatttgtagaaaaatggggttaagataaggacgtaaagaggtatttgtggcgcaaatttcccgtttggatgattgcgccatgaataatatggtttacatagctacttcaatagccagtatctgtgtttcggaagtggtttcgatagtgacactttcaatgtcccatataccgataccgtcacggcgtgaaaggttttcgcctgctacattaatctctccttctataacaaaaatgtaaacacctgtgcgaggtttgtgcatacggtatattacactatgtccggcatcaaatgtacctattgaaaaccaggtatcctgcaacagatgtgccggtgtgtttccggaaggagaaatgaaagttgccagttcgttacgtttcaataacgggcggatattataattatggtactcaggtttggtttcctctacattagggatcacccagatttgcaggaatttcagatcttcggttttactggcattgtattcactgtgatagatacctgttcctgtactcattacttgaatttctccgggggtgatggtactttcattttgtacattatctccgtgtcttaaatatccttgtaaaggaatggatactacttccatatttttatgcgggtgcatgccgaaaccttctccgggagccactgtatcgtcattcaatacgcgcaaagcaccgaagtgtatacgtctgggattataataatttggggtcagcggattttcctggttggtaagctttcttttaag

SEQ ID NO: 3890 - DNA, 130983 bp, Unknown
  gut microbiota DNA sequence
agggaaaaaaaacacgcacgaggccgaatgcttactttgaaaagaagcccgccattgacgtaaagtttgtcaatgacggacaacttgctattttttgattttatttcgaactcacgttaaatagatacaggacacaccaagaaggaaaatctatgagccttcagaaacaatggtaaaaagacacatacataccggttaaggggaattacggaaccttttacaccacaaacctttgaagataaatggtttgtggtgatggaaacaaaaaagaacagatgtctttttaatacgctatcttatccaatatcccgttcaagtgtgcaatagccactccataattagtcatgggaatctgttgcttacgggcattatcaatccggtttagtacatatttgcgattgaacatgcaggctccgcaatgaatgattaagtgatagggtgtcaaatcctccggaaagtctgtacctgcaacgatatctatttgcaactcttcacctatctttttacgcaacatacgtggaagctttactctgcctatgtcctcggtggcaggggcatgagtgcaggcttctgctatcaatacccgtgattgtggggtgaggcggtctatggctgaggctccttccatataatagagtatatcccctttatatcctgccatcagaacggaaaaagaggtgagaaggctttctgccggtttttgctcataaacggcatgaaaaacttgggagtcggttatgattagtttcggaggataggacagagcctgcaaagtggcggctattttatcggttgtacagctcattaccagacattttttgtccaataattcgcgcatcgtctgtacttgtggaagaataagtcggcctttgggagcctgtatgtcttgtggcatgactaagagcactaaatctccttctttaaccagatctccggtaatggtctgttgtccgaaatctgccggtaacttttctagaatagcttgaagtattttctctatgcccgtctgttcttttgcgctgataatgagaggttcttgaccgcattctttttctatacggtccctcgtggatgctatgtcttttcggatatcagctttgttcagtatcaggataaccggaatattccttttatttaactgctccatccattgtttttcatcctcgcaattgccgtcttcacaaagaagtaaggcaatatctgtccgttcgatggctttcaacgtacgggttatgcgcatttctcccaattccccttcatcatcaaatccgggagtatcgataaagagacaaggaccgatatgttgaatttccatcgctttgctgacagcatctgttgttgtaccgggaatatccgatacaagggcggtgtcttgtccggtcaaggcattgattagagaggacttgccgctattgcgttttccgaacaggacgatatgtagccggttggcagcgggagtgttgtttagactcatattttattgggcttgaattaggttcattatctgtattgaaaaggttgcttgacgcatgagcggttagaatctgaaatctcgtttcccttcttctatctctttcagattacgaattgctatttcttttattttcggattgggaatatgttccaactctttttttatcagttggattcctttggctcgtgtatccggtgccgcataatcttccagatactcttttagtgtcatcaatgcattgggggcgcagcagttggcgatttgtcccgatttgactaatgacataaaacggtcgcctgtacgccctgcccgataacatgctgtacagaaactggggatatgccccaagtcgagcagccagttcactacctcgtccaaggtacgggtgtcactgatgtcgaattgtgctgagttttcttccggtgtttccggaatggcataaccgcctacgctggtccgggagcctccgctgatttgtgagattcccaggtttaagactttgcgtcgggttgcagccgattcccttgtagagataatcatacctgtataaggaacagcgatacggattaccgccacaattttacaaaatatatcatctgaaatggcatccgggaaatcttgcgtggagatatcatctgccggacagatgcgaggaacactgatggtatgtggtcccactccgaaggtagcttccagatgttcggcatgcatcaataatcctgtaaagtcatagcggtaggtattcagcccgaataaaacacctagtcctacatcgtcaattcccgcttccatggcacggtccatcgcttcggtatgataagcatatttgcttttcggaccggtgggatgcagggattcgtaattttctttatgataagtttcctggaacaggatataagtgccgatacctgcgtctttcagcttgcggtagttttccacggtagtggcggcaatgttgacattgacccggcggatagccccatttttatgtttgatgctataaatggtttggatagattccagtatgtactcaataggattccgcaacggatcttctcctgcttccagtgccaggcgtttgtgtcccatgtcttgcaaggcaattacctccttacgtatctcttcttgtgtcagctttttgcgtgctatggtcttgttcttcaaatgataagggcagtagacgcatccgttcacacaataattggaaagatatagaggggcgaacattacaatacggttgccgtaaaacttatgtttgatttcctgtgccagccggaaaatgcgttctgttagatccggttggtcgcattccagcagtaatgctgcctcacgatgggacagtcctttgaattgagcagctttgtcaatcagttgctctatcagggcacgattgcttttgttgttgtgagcatactccaaggtatccagtatctcttgatggtctatgaattcttctgctattttagaatctgctttatacatgtttgttaggggttagtgatagtcacctctatctgtcgatatccggtaaccgattgtttccagttgttgtgccaaagctcgtaaaccttcggctgcttcggcaccgaaggcggctttgttatcatacaaggtgtatttttctctttgctccctgggggagagattgggcatcactacattagctcctgccaatattcctttttcccgtccgtccggtgacaaggtggcaagggcggtggtcgatggaatcagggcggacgggtgcattaaccggaaaagggataatagcttgagggtcattcctacacttccggccggctctgttccgaatggtgtgtcatgatgggggataaatggaccgataccgatcatttggggctggaattgctctatgaataacagatcttccaccagatgtgtcagggtttgtcccggagtgcctaccatgattcctgttccggtttgatatccaatttcttttagccattgcaggcattggagccgatgctttagtgacatctcctcaggatgtaatttcctatagtgttcttcgttgtgtgtttcgtgtcggagcagataacggttggctccggcacggaagaaacgttcgtatgcttcccgtgatttttctcctaatgaaagggtgatggcacaatcggggaattcacagtggatggcggcaacggttttttctatccattcatctgttaaggcaggggcttcaccgccttgcatcacgaaggtgcggaatccgagtgcatatccttcacggcaacattccaaaatggtttcacgctttaatgcgtaacgggtaatggcggtatttccttttcttattccgcaataatgacagttgttacgacatcggttgctcacctcgataagtccgcggataaatatcccattcccgaaatgtgccaaagtgactttcctggcctgttgctgtaaatacagtaaagtgccggtatcctgacaggagaggaggttggcatattcctcacctgtcaggctatggtagtgacgtaatttgtcaatcagtcgcttcatgcatacctttaatatgtttttttctgttttgccagttcctgtaccaattggcgttttccattgttgctgccgctgtgcgtactgggtcctgtgatacaaccaccctcgcaggccatcacttcgatgaattgtccgggagctttgcccgatttagcgtaggcgcgtaatgttccgatattcttcttgtttaaatcagatacctgtatggcattgattttgtccgcttccattttcaggaatgcctttacggctcccatcacgccgccggcttgtgcgaatccatgcgcttcgcgaacggaagagaattccatagcgtatggctgtacaatctccaggttaatctcgaaagcatcgaaaatagaggaaatctcttcgaatgtcatcacaaaatccacagcctcgtcacgttgagcttctttacgtttggctacacatggtccaacaaatacgatttttgcatcaggatacttctctttggctatacgtgcggcataatacataggcgagcctgtgccggaaacgtattttttcatatcggggatgtatttgttcaccagctcgatataggacgggcagcatgaggtagtcatgaatttctgtccttcttccagtttttctatcagttcatgcgcttcatgttctacggtggacatggctccttgtgctacttcaattatatcggtgaaaccgatttgtctgaatgcaccatatacttgttcgatagttgtgctgaattgtcccaaaatagatggcgcgacaatggctaccacttgttctcctttacggatgcgttgcaacacatcgaatgtctgggatatttcaaaaatggccccgaaaggacaggcattcatgcatttaccgcaataaatacatttattctcatcaatatgctctataccgtgttcatctttgctgatcgctttgacaggacaagattcctcgcagggaacgggaatatagacgattgcgtgataagggcagcttttgtggcagatgccgcaactgatgcaggtatcatggtcgatccatgccttgccggtgtcggcatgtacatgtacggctcctttgggacaattgtactggcaactgcgggcggtacatccccggcataagtcggtgatttcataattgatctgtacgcaggccgagcatgcttcgtctataacacacataatgttgtctttgggctttccattgtttgcacgttctatagcacgtgcggcatattcggatagtggagtgagctcatcggtttcatcatccatatccaaccccagtagaggaagggatttgtatttccatacagcgcgttctttgtgtacgcagcaacgccctgcatgttttgaacgtcgggggctgagttctaatggcagacggtctattttgtctgttgtcagttctccgtttttccacaattttacaagttctgtcagcaatctgtggcggacaatcataatgttgttcgtaaatgccatatagttaaaggggttaattattaggttttgcaaagatagtgatagtttgtgtcctatggaaatattaaaaaaagaaaaatcacatttttctctttttatattcagattcgttctgtcgctgtggaatgtagccgactggtttatatatgaatctttgtaggtgaaaataataaatttcgtaaaagcaactgataatggcaggggaagaggaaaccattttagtgaaagatatgttatagctgtgccaatttggcagaataaaactgtcaatttctcctttttcatgtttggcacgtttttcgcaagatgttttgcgtcactgcttaaagatgacggataattgatataattaaaagtataacatataaaaattaagaactatgaacattaaaccattagcagacagagtattgattcttcctgctcctgcagaagaaaaaacaatcggtggtattattattcctgatacagcaaaggaaaaaccattgcaaggtgaagttgtcgcaataggtaacggaacaaaagatgaggagatggtgttgcatgtaggtgatcaggtattgtatggcaaatactcgggcactgaactggaacatgacggtaagaaataccttatcatgcgtcagagcgatgttctcgctgttttgggataattaaatagtacattgtaaatcattaaattgtaaatagaattatggctaaagatattaaattcaacattgatgcccgtgacgaattgaagaagggtgtagacgaattggctaacgcagtgaaagtaaccctgggtccgaaaggtcgtaatgtaattatcgaaaagaaattcggtgctcctcatatcactaaggatggcgtgactgtagctaaagaagtggaattggctgatgcatttcagaataccggtgcacagttggtgaaatctgttgcttcaaagacaggtgacgatgcaggtgacggtactactactgctactgtgctggctcaatcaatcgtaggggtaggtttgaagaatgttactgccggagcaaatccgatggatttgaaacgtggtatcgataaagctgttgccaaagtggttgaatctatcaagtctcaggccgaaatggtaggtgacaactatgacaagattgaacaagtggctgctgtttctgccaataacgatcctactatcggtaagttgattgcagacgctatgcgtaaagtttctaaagatggtgtgattactatcgaagaggctaaaggaacggatactaccatcggtgtggtagaaggtatgcagttcgaccgtggttacttgtctgcttactttgtaactgatacagaaaagatggaatgtgtgatggaacatccgtacatcctgatttatgataagaagatttctaacttgaaggatttcttgcctatcctggaaccggctgtacagagcggacgtcctttgttggttatcgcagaagatgtagacagtgaagcattgactacgttggttgtaaaccgtctgcgttctcagttgaagatttgtgctgtgaaagctccgggcttcggcgaccgtcgtaaggctatgttggaagatattgccgtattgacaggtggtatcgttatcagcgaggaaaaaggtttgaagttggaacaagctactcttgaaatgttgggtacttgcgataaggtaactgtttctaaagataatactactatcgtaaacggtgcaggcgcaaaagaaaacattcaggaacgtatcaatcagattaaagctgaaataaagaatactacttcagattatgataaggaaaagttgcaggaacgtttggctaagttgtcaggtggtgtagctgttctttatgtaggtgccgcttctgaagttgaaatgaaggaaaagaaagaccgtgtggatgatgcattgtgtgctactcgtgcagctatcgaagaaggtatcgttccgggcggtggcgtagcttacatccgtgcttctgaagcattggaaggcctgaagggcgataatgaagacgaaacaaccggtatcgagattatcaagcgtgccatcgaggaaccgcttcgtcagattgttgccaatgcaggtaaggaaggtgcagtagtagtacagaaagtacgcgaaggtaaaggtgacttcggttacaatgcccgtactgatgtttacgaaaacttgcacgctgccggtgtggtagatcctgctaaggtaactcgtgtagctttggaaaatgccgcttctattgcaggtatgttcctgactacagaatgtgtaattgtggaaaagaaagaagataaaccagaaatgccgatgggtgctcccggaatgggtggcatgggcggcatgatgtaatctttgccccataaatgattaacggactccctgttggcgaaatgttgacagggagttttttatagaccatagtggattatcttctcaagttttatttactctctaaatttcggctcatccgagaaattatgttatgtgaggagactgtggatcactcttaaaagattagtggggtttatttcaaattgaactgtcctataaaaaaggaagtgtttctgaacgttcagaaacacttccttttttagtgagcctcttgtcggattcgaaccaacgaccccgagattacaaatcacgtgctctggccaactgagctaaagaggcattgctttttgtttagcgggtgcaaaggtaagaatatcttttaaaagaacaaattttttcataggaaaaaatagttggaaattaccaaatggtaatttttactccgaaataacgctctatctttgcatccgctaaacaaaaaagtgaagtttatgaaggatagtattgattttggtagtatggaaatttcgaaattgtttcggaaattgctgatacctactgtgctggggatggtattttcggctgtgtttgtgataacagatggtatttttgtaggtcaagggataggtagtgacgcattggcggcagtgaatattactgctcctttgtttttgataagtacgggtatcggactgatgtttggtgttggcgcatcggtggtggcatctattcatttatctcagggaaagttgaaaactgctcgtatcaatgtgacgcaggctgttgtggtttcttctttgtttttggctgtgctgtggggagtggtatgtttgtttgctccacaagtagccgtgtggttgggaagttcggaacgtctgttgcctttggcggtggaatatatgtattggttcttgccttttctggtatttagtgctttgctaagttcagggatgttctttgtccgtctggatggttctcctaattatgccatgttgtgtaatgctattccggcagtggtgaatatcctattggattatgtgttcatttttattctcaaatggggaatgatgggtgcggcgctggctaccagtctggggtatattttgggggccggaatgattgtagtctatttaagtcgcagaagaaatgtgattcatttttgccgggtgaaacttagcaagaagagtatgcggctcacttggcgcaatgtgaaatatatgtgccacttaggagtttccacctttttgtgcgaggcagccatagcctgtatgatgtttgcaggcaattatgtgtttatccattatttaggcgaagatggagtggctgctttcagtattgcctgttatttctttcccattatatttatggtatataatgccataggacaatcggctcaacccattttaagctataactttggagcgggtgataccatgcgggtacgttccgctttccgtctggcactgggaacggccgtgacctgcggacttgtgttttttgcgttaacagctttgttcaatcatcagattgtggctatgtttattgatcgttcctatccggcatacgatattgctgtggcgggactgcctttgtttgcgtctggttttattttttttgctgtaaacattgtttccattggctattttcaaagtgtagagcgggcacgtccggctatgatggttacagttttgcgtgggtttgtttttatggtactttgtttattgggcttgccgttgctattgaaggtgccagggatatggctggcggttcctttggcggaaatacttacttttttagtaataatggtaatttattatcgtaaacatcaatgggttcgcagatgattttttacttttgtagtaattaatcgggtggatatatggatgcattcatacagaagttttgtgaaaaatatagtttgccgatagctttgagcttgcagttgttggataatatggagaagttcacttttcataaaggggattttcttgtacaggaaggtgggcggaactcaaacttctatattgtaagtaaaggaatctggcgggggcattaccttaatgacggggtagatgtttccgtctggtttgcttctgaaggagaggccatcttctcgtcatggggatatgtggaaaatacagtttcgttggtttctatcgaagcgatgtgtgacagtgaactttatggtatttcgaaggcaaaactcgaagtattatatgccggatctgttgaactggctaattttggaagacgactgttcgagcagcagtttttagggcttgaaagttggatgataacgggaggaagcccccgggccaaggagcgttatcttactttgttggaagagaatccggaactgttgcagtatgtacctctgaagcatatcgcttcttatttatggattactccacagtcgttaagccgtatccgtgccgaactggggagaaggaaaaaagaccaatgacaattttagcatttacggggttggttctttcgtatggaaactcattgttctctttgctttttcttgtatggttcatctttgccttgatggatggtagaaaagttggcatccgataaatatttatcttaaaagtgtcatcgtattttatttttgtgtaagtttgtagtgaatcctaaaaaaacttatggcaatgatagatgatattttagagttcaacaagaaatttgttgagagcaagggatatgagaaatatattaccaacaaatatcctgataaaaaaatagctattctttcttgtatggatacccggttgacggaattgttacctgctgctttgggtatcaggaacggtgatgtaaaaattatcaagaatgcaggtggggttatctcgcatccgtttggtagtgtaatccgtagtctgatggtggctatttatgagttaggtgtaaaggaagttatggttgttgctcattctgattgtggagcctgtcacatgaatagtaatgagatgatagaacacatgaaagcacgtggcatcaagcaggaaaccattgatatgattcgtttctgtggtgtagattttggagcatggctggatggttttgaggatacggagaaatcggtgaaagggactgtacgggctattatggagcatccattaatacctgaagatattatagtgaggggatttataattgattcggtgacgggtgaactgacaaaagtataaaatgtgagttttttatacacaataatgttcatgtgattttgtgtattataagaaagggaggtatttctgcctgatgcagaatgtacctctctttttattgaagtctgtatttgtttcagttttttattgagcgaaagcatgatgataaccatccactttgttccaattgccacgggtaaagtcgggtacggcaacaggtgcatttccgttttctatagaaagacgggtcaagtcggccatacagcaccattctgctaaatcataaacgtccatgtccaaaggaagtccgttgcgcaagcaatataccaggcgataatccataatgaagtccatccctccatgtccacctattttctttgctgtttcttctaattcttggtggataggatgtttgtattggctcatcaaagcttcttttactttttcgggaacagccgagtgcatactcaggttttcgtgatcgggtatgctggtgctgtcaatctgatccggacggaaacaatattgctcgatgggatatttgttggcaaaacctttggtaccggtcagctgatacatacggctatagggacgtggattcattacatcatgctgtatgtggatggtttttccgttttctgtacggataaaagtcatggtatggtcgccgttttggaaatcgggtgcttcttctttctgatattgttttactagttcgggaccggttacagctttggtgtccatggctaccagtgtcttcatgcggtctccgcgatgaatgttgagcaattggcaggcagggcctaggccgtgtgtggcataaacgtctccacggaactcccggttgtaatccaaacgccagttgttccagtaataaggccagaattcttccagattatggatgtatgaaccttctacatggagcacttcgccgaaaagacctttttgtgccatattcaatgtcgtcagttcgaagaagtcgtaaacacaattttcaagttgcatacagtgtttacgggtcttttcggaagtattgataagtgcccagatttcatccagcgacatggcggcaggtacctcgatggctgcatgttttccatgttccatggcatagatacccatttcagtatggtgtttccagtctgttgcaatgtataccaagtcgatatcgtttcgctcgcacagttgtttccatgcatcttcgctgccggaatagagggcaggggcttccataccggcgttagttacaattttttgtgctttttccgcattttcaggcaataagtcgcaaagagccacaattttagttcccggtatgtgcgtccaacgttctaccgcactgggaccacgcatgcccaaaccgatgaaacctacacgcacagtgtcaagtttaggagttgttagttcgattacatcctgttgtcccgcaggacgttcgggaactggaacttcaagaggcgcatactcttttgttgcagttgtttctttggggattggggtacagccggcgaggcatgataacgctataccgacgaagaaggtagataggtttttaatcatggttctgtttaattgaaatttataggttaatagtagattgttgcaaaaatagggaatatttttaatattagtgtattgcttgtcggataaattgatttcacttatactgtatttataataaaaaagcagtcttgaaaagtcaagactgcttttttattataatggtaattcaattccctcaatcaaaaagtacggtttttatttaggtctataaccatacattaatgcggcattaatttcaatagccctcatatatcctttgaaaaaactttttactcttttcatcctgttacctttttttaaaaacgttaaaaactaatcctttgtatcttttactttgtatcgtacccccaagcacggagggcgtcatttcccatatctttgagacctgctttgatgatctccttcaacttcttcataatgttatcctttctttgattaaataatagggttgttttcttacttaatccctataccccaagcttttacttcgttttcacccatcatagcaagggctttcttaaaaatactttttacctttttcataatctcgttatcctttctttttatgttttacaacacaaaattatgctgttttgttctagattgtactctgataaagataaaatgtatgcaaaagtggcaaattcttgacttgtatcaagaatttgccacttttcattaaaaaactatttcagaagcccagcttctgaaattcattctcaaaattaggtgtaaatatttcttttccaatattgcttctgatctcttctagtgaccaaaaacggccgccatccagttcctcgctgggaataatgggaccgtcataagtggttttatgtgagaataccaattctttttcccgggtggattcgaatacatagctagtcagtaattcgggagtaaagtcggtgatgcccagttcttcttttacttcacgtttcaaggctgtttccacattttcacctaaatctatgtgtccgcctacggctgtgtcccatttgcctggttggatatctttccagtcaggacgcttttgcaaatagagttcgcctttactgttgaatacatgtaagtggactaccggatgtagcaatttacttccattatgacattctccacgggttgcagctcctgttatgtttccttgttcatctactataggaaacatttcttctttattatcgtaattcatcttcgctatttttttgttactgcaaagatatgaattcgggctcggattatatggatcttatagtctttaatagtaaaaagggatgtgagacctttataatccgagtccgaaatgccgtttaataatttacttgatgccgttttaaaaaagctacagttttatgtatttccttatacatcacaatatcttcttttataaaaggtacctcgttgcggtaggtggcgagaaacttttcaataaacggtgaactgcggagcgggcggcggaaatccagtccttgtgcagcgttcatcaattcgatggcaagtatatgttccaggttgtccatcactttgtagagcttggtggcggcgttggctcccatacttacatggtcttcctgtccgttgctggatactatggagtcgctgctggcggcataacagtacattttattctggcttaccatgctggcagccgcatattggggaatcatgaaaccagaattaagtcccggattggcaaccagaaattcgggcaatccgcgaagtcccataatgagttgtgccacacgccgttcggatatgtttcccagttcggccatagcaatggcaagataatcatataccagtgccaggggctgtccgtggaagttgccacctgaaatgataaggtcttcatcggggaagatagtggggttatcggtaactgaatttatctcggtcaacagtactgaagctacgtggttgatggcatctttggtagcaccatgaacttgtgggatgcaacggaacgaataggggtcttgtacgtgttgtttgggctgtgcgatgatttcactgccttccagtattcttcggaatgcggctccggtttctatctggcctttatgcggacgcatttgttggatacagtccatgaacggatcgatgcggccgtcaaaggcttccagggagatggcggcaatgaggtcggctttcttggaaagacggaaggctttgagtatggcatacactccgttggcactcataaactgggtaccattgagcaaggccagtccttctttgcttttcaatttgactggttcccaaccaaactcatcaagcacgctgatagcttcgcagcgtttgcctttataatacacgtcgcctacgccgatcaacggaaggaagagattggcgagcggggcaagatctcctgaggctcccaatgaaccgcggtcgtagacaatgggcattacatcgttattgaaaaagtcgataatgcgctgtacagtaatgacttgtacgccactgtgtcccaaagaaagagcatgagcttttaataaaaacatcagcttcacaatgacatggggcatttctgcgcctacactgcaagcatggcttttcaccaggttctcttgcaaagtactcagttcatcggaagaaatattacggttgcacaggctgccaaatcctgtcgtgatgccatagagagggacatcggattccttgatctttttgtctaggtaatcccggcatttctgaatccggtctttagcttcaggagccagttccaatttcagattttcattgataatacgttcgatgatgtcaaaagtgaggtcacccgaacctatttgatatacattcttcatggtctgattctttttttaaccgcggaggttgggattaaaaaatggttttcacatagtccagtattttctgttcttcggcaatggtcgtctgttctatcatatcggcttcttcactcatctctttgacgaatttttcgtctttgatagaagtgaggttgatacgtacattcagcaaggctcccagaatggcagtccgggcacacatcatggatacacaggcatcggttacagcgttgctgttcccttttctggctaccacatcaatcatgggcagaatggaatggacggtacgtgccacctccataggcacttgggcggcatatttggtttccttctgtatggcttcactgcggatagccttttcttcatccgtttctttcggaagtttgaatgcagagaaaacacggtcgtatgcttccgaatcacggtctacatcggttatcagctggcgggtgagctcttcgaaacgcacagaaagatcttccattatttcgttcacttctacatatttcttgcggcctatggtaagattggctaccatagctgccagtgaggtggcaagggctccattgagtgccgagacactgccgccaccggggacaggatcattactgagtactttattgataaattctttgatggtaagttctgttaacatggctattagtatttaattggttaatttgaatgtagaatacgtccccctttgatggtcagcttcactgcgttcatacctgtataataaggtaatatatgggggttgtcggttcccagtaaaacaaagtctccctgttttccggcttctatgcttccgatgcggtcggcgcgtccgagggctgccgcaccgttcagtgtgatggctgtgatagcttcggcaacggtcagtttcatatagatgcaggccagagcaaaagtcagcgggatggatccggagaaacagctgcctggatttagatcggtggcaagggctacggcacagccgctgtctatcattttcctgccacgggcgtagggctcttttagtgtaaaggcagttagtggcaacagagtgcctactacattattttgtgccagggcttttatgccttcatcggatgcttgcaacagatggtcggcgctgaggaccttcaattctcctgccagttctgctcctccaaagctgacaatttcatcagcgtgtagcttggcgccgaagcctagagcttgcgcagctttcaatagctttcgagactgttccacagtgaatactcctttttcacagaaaatatcgcaattttcggccaattgtttctgatggatcatgggcaacatttcgttaatcagaaaatcaatatatgcgtcacttcgccctttgtattcttcgggtaaggcgtgagcacctaaaaaagtggtggcgatatctactttccggtcgggacattcattgatagcttgcatgacactgagttgtttcagttctgtatcacgatccagaccatatccgctttttccttccactgtggtgacccccatccggctcatggtatccagaaaccattcggctttatgtttcagttcttcaaaggaggcttcccgggtggcacgtacagtattgataatgcctccgccacgttccatgatgctcatataactgtcgccgttgagccgccagatgaattcgtcggggcgaaatcctccgaaaaccaaatgggtatgagagtcaacgaatcccggcaacaatacattccctctggcgtcaagcactttatagccgggcttttcatggcttatacggttttcgccaacataggtaataatgccgtcggttactcttaccgttccgcaaggaatgttgagaagttcgttcatggcttctcctttccgggcggttctgccttgcggagtaacgatgtgggcattgatgataatcaagttgttgctcatagttgttagttttaatggaacgcaaatgacgcaaatgacacaaatatcaatggtgactgaatatttttcttttaaattcaggatgctttccgaagtttaatagatagcctatctctatgtttgtggctttcagatagtttatcagttgaaattcatgttcgggacgtaaagcatcagccgttttcagttctaatatgatggagttgttgatcaccatgtcggcataatattcacccactttatgatttttataaaatacattgatttgcttttgcacttcacatttaaaaccttgctctatcaattcaaagtagagggcattttgataaaccctttccaagaatccatatcctaatgtgttgtacactagataaaatgcttttaatattttatctacatcttcttgacttgctatttgcgtcatttgtgtcatttgcgttctattctatattattccataatctgcgcttccagcacttgttgcatggagaagttttccaatcccaggtagtaagaggcagtgtctatcaaggcctccataggaacaagtcctacgatttcgctgccgatgatgcttactccgtagcgtttggcttcaaaacgtaccatttcgaatgcccggtagatagcggttttgctatagtcggtaagattcatggatacctgggtgataccccggtccttcagttctacgcccatggccttgcaatagcgcagtccgccaccgataaaacggattttcttggcaatgtcatgcgctatttccaggctgggagtattgagatttatattgtaggccactaagggcatacgggctccgatggctacagttccggcagtggggtgacgttccgcaggaccaaaatcgggataccattcgggttggtgaatcttttccttcattccctcgaattctcctttacggatggcagcgagattttcacgatgtggtgcactagctgatttttcatacaagaatacagggagattatattgagaggccacccgttgccccacttctttggacaccgctatggcatcttccatggtacatcctttgatgggaatgaatggaactacatctacagctcccatacgggggtgctgtccttggtgatggttcaggtcaatcagttctactgctataccgatagcttctatcacggcttctttcaaggcgtccggttctccaacaacggtaactaccagccggttgtggtcttcatcgttactataatccaataattttacgcctgccttggcacgaaacggagatacaatctcgtctattttctgtaagtcacgtccctcgctgaagttggggacgcattccataatttttgtccagctcatactctttagaatttggtttatagggaacatccatggatgcggatgaatgaaacagttgcatccatggtgttccggtttttggttagttgattcctttatttttcaataccttattaataaggtcatcttccgctatatgcggcagggtgatgtgataaccatcggcatggctctcgttgaattccgccgaagtttccatggcatgcgggttgcgtgcccacgagcggcgtgccactcctcccattacatcccataacatggatgagcggagaatacggtctacccgttcactgccgtcgcataccattccgaatccgccattgatagctttacctatacctacaccgcctccattgtgcaaagcgacaaggctcatgccccgggcacaatttccggcaaagcattgcacagccatatctgccattacattgctgccgtccttgatattggaggtttcccggaaaggagagtcggtaccgcttacatcgtggtggtcacgtcccaacatgataggacctacctcgccccggcgtaccatttcattgaagcgcagtgcgatattcatacggcccagcgcgtcttgatacagaatgcgtgcttgggtccctaccaccaggttattcttttcggcgtcgcgaatccatatccagttgtccatatcctgtccgcggcgatctttagggatacactccatagcggcacggtcggtctttatcaaatcttcctttttcccgctcaggcatacccagcggaagggaccgtaaccataatcgaaaagttgaggccccatgatatcctctacataggacggccagatgaatccatccttctcgtctgttccattgcgtgagatttctttcactccggcgtcataaatcgctttcatgaaagaattgccataatcgaagaaataagtgccccgtgccaccagttccttgataacatggaaatggcggcgcaaagtttcgttcaccatttcatcgaaagtttctctgtcttctttcagcatacgggtacgttcttcgaaggaaatgcctgcaggacaatagccgccttcgtaaacggcatggcaggaagtctggtcactgagaagttcgatgtggatgttgtgatgcaatgcatactccaacagattgactacattgccatggtaggctatggaacaggggattcgtcggtctatggcatcggcagccagccggtaggcttcagacaaatcggatgtgatatgctgtacccacccttggcggtggcgggtttctatgcgtgaataatccacctcggctataatggccactgctccggctatctcggctgctttgggttgggctccgctcattccgcccaatccggaggatacgaaaagatggccgttcaggttgccgtcctgcggcactcctaatttcatgcggccggcatttaatagggtgttgaacgtgccgtgtacaatgccttgcggaccgatgtacatccagcctccggcggtcatctgtccataattggctactcccatctgtgcggctatttcccagtctttctggttgtcgaacatgcctaccatcatggaattggtgataataacacggggagcttcgggatgtgatttgaataatcccaacgggtggccgctttctacgaccagggtttgttcattcgtcattacctccagatactgcttgataagccggtattgcatccagttttgacaaacttgtccggtttcgccgtaagtcaccagttcgtaaggatagagggcgatatcaaatgaaaggttgttgtctatcattacttgaaacgcttttccttcgatacagtttcctttatattcgtcaatgggctttgctttcaagtcaccttcgggtcggaagcggtaaccgtagattttaccccgggtgagcagttcatccatcaattcgggagcaagttgctcatgcagttccaccggaatgtatcgcaatgcattcctcaatgccgtttccgtttgggcgggtgtcaagcggtagccccggtcgggagcacggcggatgccttccgtgaatgtaggataggcaggtaaatcagtagatagagtgatagtcatagtatgtaagtgttttgtcacaaagatagcaaaacaattggaatactatgggtttggagatatgtttagtgacataaagttgttttttatctatagacttgatgtaaaggtaaacgcacacggatataaaaagcttgccataatgacaaagtaggttgcctgttcttgtgtatagtaaataaagggggcggtagaaatttagtggaagctggttcttattttcccgtttatatctttctttggatttttttaagtaagaacctaccggcggaataaatgaatgtctatcatatcacagcctattgcataagttttttctttctccagattaagcctttttatacggatgtattctatctccatagcctttggagttatctccataagctttggagttaactcccaagccttgggagataactccaaaggcttgcggagataaaacaagcaggaagaaaagccttagccatatagtagaaaacgtttggtgatacggaaaaaaggctttatatccgtgatgaagtcttagggtatcagcagcgaactgtctccgtagctcagaaacctgaaatcatggtccagtgcataatcataaatccttcgccagtttcctttcacaaaggcggaaaccaatagcagcaatgtactttgcggctgatggaaattggtaaccatcttcttgactattttgtatgtatatcccggcgcgatgataatctgagtactgctatgcaacgcttccatttcgtgtcggttcagataatccagaatctgttgcagtgcttccaccggagtcaggtcattcttatcttcgtagggcatccattgctgtacatgcaactcgtcctgagtggcatcgggattgtggctgataaggacgccgatataataaagactttccagggtacgtaccgaagtggttcctaccgcaatggcttctccatgatgggcaattaatttttcaatggtatgcttgcttacagaaatgtattccgtatgcatctcatgtccttctatctcttcacttttcacgggcttgaaagttcctgcacctacgtgtaaagtcagttcctcccggtcaattccccgttcgtccagcgctgccagtactctttccgtaaaatgaagtcctgcggtgggagcggcgacagaaccttttattttggagtaaaccgtctgataagtttccttgtcgctttcttgtgtctcacggttcagatagggagggatgggcagttcacctgccacttccagcaggtcggcaaaggtaattgtgtcatcatcccatgagaaatcaatccaatggctggttcccttgcactctccacgggtggcggacaggactatttgtttgccttttacatttactatgcggctcaacgtaccttctttccattttttcagattacctatcatgcataaccagctgcattggcgtgtttgctggaagtttaacacatagtcattgggctggacaggttccaggcagaatacttctattaatgctccggtttctttacggaaatgcagacgggcttgaatcactttggtattattgaatatcatcagttctccggattccagatagtgtggcaaagacgtaaagatgtcttcgctcacttcgccgtggcggtaaactagcagtttggactggtcgcgcgtggcaagggggaatttggcgatccgttcatcgggtagcgggtagttgaactcacttattttgatatgtttggtatcttccatctgaatctatttctttttctgcgcaaaagtaccgatatttgcgctaactaaaaaagaaaagagtatgaaaataggagataaagtccgtttccttagtgaggtagggggcggtgttgtgaccggatttcaaggaaaagatatggttttggtagaagatgccgatggcttcgatattccgatgcccataaaggagtgtgtggtgattgacacggatgattataatatgaagcgtaaacctgttgctccggctcctaaacaggaggttgccggtgcaaaggcaaaaggagcgtcagtcaaggtgcgtccggatgaagaggaggatgaacgtcctgtcacttatcgcccggccgagcgaaagggaggggatattctgaatgtgatgctggcttttgtgccacaggatctcaaagctatttctgcaacggcatttgatgcatatcttatcaacgacagcaatttcaccttatactttacttatcttacagccgaaggtagtaactggcgggtgcgcagccatggcatggtggaaccgaatacgaagttttatatcgaggagttcgagaaaagcgttttgaatgaattggaacgggtggccgtgcagcttatcgcttttaaggataacaagagttttctgttcaagcctgccgtgtctgtggaattgcgcatagatacagtgaagttttataaattgcatactttccgtgagagtattttctttgaggagccgtcacttatttacgatatagtgaaaaatgatgttccggtaaaacaggtgtttgtttcggcagatgatataaaagatgcattattgcaaaaaaaagtgccggaaccgcaggtagcgaagcagccccagcagaaaaaggtgaagaacgatatcatggaggttgatctccatgctcatgagttactggatacgactgccggtatgagcaacagcgagatattgaattatcaattggacgtttttcgtaagactttggaagaatgcaagaacaagaagggacagaagattgtctttattcatggtaagggggatggtgtgttacgcaaagctatcctgcaggagttaaaatataaatataaaaactatgaaagtcaggatgcttcgttccgtgaatatggtttcggggctaccatggtgattattcattaagactttcttattcatataaattgtgatatggcaacattaaaagaatttttgaaagcggatcgttttgctacttgtgcgggagtggaacttcttgagataaagccggggtatgcccgtgcgtgtatggaggtgaccgaccggcatctgaatggtggaggagtatgtcaaggcggcgccttgtttacattggccgatctggcttttgcagctgtagcgaacagccgtaagaaacttacactttctgtgaatgccaatattacttttctccgtcctgctaagttgggttacgtgtatgctgaggctgttgaagtatttaatcatcatcgtattccttttgttgaagtaaagataacagacggacagggggagctgatagctatatttacttcatcggggtatcgtaaagagtctgatttgccggtagatgcgttagaataatttataatagataaaagcctgttgttgaaagaaggcaacaggcttttaaaatgatggttatcagtgaagacaagggggcttatccttctttgactttagcctttcctattcttcccggttctacgaataaatatttgtagcctgcgcgtatgcttgccagatgcagtttttccaaacgcgcacggcggacaagcaaagctgtcatttcatgaatacgtccgttagcataacctatcatttcgttctcggtcgtatcttcagaaccgtaagtgcctgctccttggacgatcataaaaggtgattcggtgcctgctttatccatcccgacagcaatagccacataaatccacataggaccatgagcaactactttacgtgctgtggctgtgcggctttcgccttttgtcagtgtcttgtggcaacagccttctatggatttgattttctttcccaaatcatatacggttactttgtcatcggcagcatccaaaggttgctcgaacaaaattgtgtcttttttgtccggatagctgatgtgataacattcatattccggttgcattcctctaggttcgtcatcgcccacggaacctgctacaagtttaacttcaagaaatgagccgttcagggcggtttcatataccgcatccgtcaaagcggcgttactggttaattctaattctttcataagtcaaggtttttaataagtttctctcataacagtaggtggaaagaaaagttcgaaatagtgtgataaggaacaaaaacgggtgttaatagatgaaataaggagattggtcgataactcttgttccaatgatgataaagctttaattttacttttggaaaaagaaaaagtttgagaatcaagatcgggtagtagaaaggtagacggattattagtttgtctggatagagggattgatatagttgtaggaaggatatgaagaggcagtttataaatacgttaataataagtttgttagtaaataaggtcggctgaggctttgtttataaggaaaacgctcgttgtgaaacgggcgtttttgattttgcatcagtatgtgtttaaaagtaaatcttatactataaacgacgttctactccgtgaagaatagaacgtcgttttatagaatggaatgaagtttacaaacgatagtcagctaaatcatctgctttgaatttacggatgaaattgaaatgcttttctatttcagcttctgcatagtttacatatacatgggccgacttggcgaacaattcaggtgcttttgtcgcatcttggataagaagatgtgacatgatacatacggcagccatttcataaagacggcgtgcaacgaaatcaagtaactcttgattctgggcctcttttaccgcattggtgcatgcgtcaaatttgttggccatttctttcacgcggtccattagcggttgcatatcttcactgcaaggaatagcttcataattacgcaaggttgcgatataagaaccgttggttacataacggatagcggctacagtctgcaactgggtcgttccttcgtaaatgctggtgatgcgtgcatcgcgatagatacgctggcaagcatattccatcatgaaacctgaaccaccgtgaatctggatacaatcgtatgcattctggttggcatattcagagttcatacccttggaaagcggagtaaaactgtctgctagcttggcgtagactttttgttcctgacgttcttcaggagtcagtttgcgttcgcgggcaatgtcatccaatgctttgtaaatatccacatagcgtgaagtctggtaaagcaatgcacggcctgcatccagtttggctttcatgatagacagcatgtcatatactgccgggaaatcgatgatggcttttccgaactgcttacgttctttggcgtatgccaatccttcgttgtaagcagcttgtgacaaacctactgactgggcagcgatacccagacgcgcaccattcatcaatgccataacgtattttatcaaaccgagcttacggtcaccgcaaagttcggctttcgcgttcttgtaaaccagttcgcaggtaggagagccgtggatacctaatttattttcgatgcggcgtacatctacacctccttcgtttttgtcatagatgaacatagacaaaccacgtccgtctttggttccttcttcgctacgtgccaataccaggtgaagattagcgtcaccgttagtgatgaaacgtttcacaccgttcagacgccagcagttgttggcttcatcgaaagtagctttcagcattaccgactgaaggtcggaaccggcatcgggttcggtcaagtccatagacatggtttcacctgcacaaatacggggaatgaaacggctgtgctggtcttcgttaccgaattcatacagcgtttcgatacagtcttgcaaagaccagatgtttccgaaacctgcatcggcggcggcaacaatttccgcgcacatggtgtagggggtgatggggaagttcaagccaccgaaacgacggggcatggtcatgccgttcagtccggctttgaccatcgcatccaggttttgtttggttcctgaagcatattccacacgtccgtttccgcagtgaggaccttcttcgtccactccttcggcattgggagcgatggtttcacctgtaatctcacctgtgatttccagaattttatcgtaagagtccatggcatcggcataatcctgcggtgcatagtcgaactcgtctttatctctatagtcgcgctctttcagttggcagatgcgctccatcatcggattgttcaagtgatacttgagttccggtatatcggtataaaagtttgccataatttttagtagttagagtggttaatagtagctaagggtagttaagtagtgggtggcgatacatttttcaacaaggctatgcagtaggcgtttagcaggcggctgatttcggccgcttgtatgcctaattgttctttgtcttgcaatgtgatgtatcctaaatctttcgacaggataatgaaattgcgtgtttcttccaacgaaccttgtgaaatgttatagaaacgcagtttgtcctttgagctgattttagcatatccttccgctatatttgcagtgatagaggctgctgcacggcgcatctggttaaccaagcagaataattcctctttgggatattgcttggttattttgtaaatggccaatacatacgaatgtgccttttgccaaacaatcagttgttcaaaggattgacttttcatttttttctactttgactacttatgactactactgactactttgaattctttttataatacttaatcaatttcggaacgacttcttccacagtgccgttaatcacataatcggcaatggtgttgatcggagcgttcgggtcactgtttacagagatgatgatacctgcatcctgcatacctgcgatgtgctggatttgtccggagataccgcaagcaatatacagtttgggacggacggttacacccgtctggccaatctggcggtcatggtctgcataacctgcatcgacagctgcacggctggcacctacttcggcgtgaagttctttggccagttcgaacaatttgtcaaaaccttctttagatcccatgccatagcctccggcaatcacgataggtgcgcctttcaggttatgtttggctttttctacgtgacggtcaatgactttgactacatagtctgtttcaggaacaaacttggcaacgtcgtggttcaccacttcacccttataattttcatccagaatctctttcttcatcactccctcacgaacggtcgccatctgtgggcggtgctcggggttgacaatggttgcaacgatgttaccaccgaaggcgggacgaatctgatacaacagattttcataggtgatgccgttcttcttgtcttcgtgggtaccgatttccaactgggtacagtcggcagtcagtccgctggtcaatgcggaagatacacgcggtcccagatcgcggccgataacagtagcgcccatcagacagatttgtggtttttcctctttgaacagattcaccaaaatggaagtgtggggcagtgaagtataagggaacagacccggagcatcgaatacatgaagtttgtctactccgtagggcaatacttgtttttcaattcctgcaaggccggttccgacagcgattgcctcaagctggcatcctaactgattagctaatttacgacctttggttaaaagttcgagactcacatcggccactgttgtgccttcaatctcgcaatatacaaatacattattcataatcgttatcctattgtatggttagctaacagttcgacaatcaatccttccacatcctggtcgcttcctgtcatggtcttgctttcttttgcctggaagacgatgttttcaatcttcttcactttggtgggagagcctgacagaccgcactgcttggtgtctccttctacatcggccacactccattcagtgatattcaggtaagggaatttctcatatagttcagcgtaaggcagttcagaaccgtctttagtgatggctgctttttcctgtgcgccgagagcgcgtttgtatttctgtaacaatttggcattgcgcggacggcagggagctgcacttccgtttacagtcagtacaataggcagaggaccttccacagtttctacccctccgtcaatgtggcgttttacggtgatgcggcgggcagtttcgtccacgtttagaatttcttcggtgtaagtaatctggcttaatcccagcttttctgctacctgcggacctacctgtgcggtatcaccgtcgatagcttgacggccaccgataatcaggtcacattcgcctattttgcggatagccgtagcgatggcgtatgaagtggccaacgtgtcagcaccggcaaaagcacggtcggtcaataaatatccattgtctgctcctctgtataaaccttcacgaatgatttcggcagcgcgtccgggacccatggtcaggatagttaccgtagaaccgggatgtgtgtctttcagtctgagtgcctgttccaaggcgttcaggtcttccggattgaagatggccggaagtgccgcacggttgatagtaccgtcagcgttcatggcatctttccccacattgcgtgtgtcgggaacttgttttgccagtactacaatttttaaactcatatactttaatatatttggtattagtaatattctggcgacaaatttacttaaacaatttgagcaacaaaaggatatgaggagaaaatatgcacaaaaaggtgaggtgtgagcatgagtcgaggaggatacaaatgtttttatgataattatattgtagaataaaagcggaaatatttgtttaagtggaaactttttatattctttgtagaaagtgatactatgaaaacattcacctccaagtacaatcaagctaaatggccttcgtggacggtctgtttctgatgatagggacagacggtatctttttcattatacctctttgaatcatcataagatatccctatttcaaactttaaaaaatatattatgaaaagaacatttaaaatggcattgattgcctcattggcagttggtggaagttatgttttgtatggttctcaaaacaaagaagaattgtccgatttagctttgtcaaatgtggaggccttgactttaggtacgaaggattgtatgtatcaacgtaattcacgttgttatgaactcgttgtaggtcctccgggcgaacctgttattattgaaacaagtgaggaagcgaattgggtaaatcgatataccattcctgagtaattaggcatttatgtaatacgggacaaaataaataggtgttaggcatttgttttgtcccgtttgaagagtattaaaattatgattaaaataaaattgtattattcgattgttaccatcctttttttaatttcctgtgtcagtaacaaaggaaatgactttttatctattcccgccaaaccgatctatggctcttattatgataaagaaattatgtccaatgagttggttgcattctcttctcttgattgtggaattcttatggttcaacgttgtaaacttcctggtgaacctatttgtcagattctagaggaacagacaggcgaaagagtgggtagctttggaagcaggggacaagggcctggagaatttatagccgctgaatttattggaaaaacagagggggacgatactttatattttgttaatttgccttctactgtcctattgtatgcacgggaggaaaagggtgctgactaccgttatgtaggaagtgaaaaaattaaagtaaaagatggttgttttacaacccgtttctgtcgactgtccaatggttatagtgtggcgacgactttgtctgggggtaaggagtttttcattctctttgatagggattttaaagaaataaagcgtttcggtaatcatccggtgcggggaatgactactgaagcaaatgattttatgcagttgcagggggagatggtttcatacaaaaacagcttttattttgcatctagattttttggttatctttgtcggtatgatatatcggatgaggaagatgttactttgaagtgggaaaaaatgcttgttgagcctgtttgcaatgtctatgaagcaaatcttgcaagaaagaagaataacttggatggattttatggattgacagccaatgataaatatgtttttgtgacttatagtggtgagttatgctataaagcctttgaaaactattcagcctgtacacctaaaactttgctgggtttttccatcgatggtgaactggtaggcaagtacgcattggaacaccaaagcatgagtgtgcttctttctcaatatacccctcagttgtacttgttaaattgcgaatcggaatgtaatgttgaaatatttgagatggatgatatcctgaaagcaaaattatgaaaatcctgctttatgtgttgttggcttttggggtattttgtttcttctcgtgtaaaaggacagaaaaggagcagttgacttttttgatgaaagaatggactcgaaaagaaattctctttcatgatagagctgtctttaccatacaaggcaaagacacattagataagtttccttatgcttcaacatattataaaattgtaacttatgtagactcattaggatgccttagttgcaaattgcaattattggaacggataaattttatagcggaggtagactctgtcacatctaggaatgtatccttttattttttcttccaccctagaaataggaaggaactaataatgacattacagtcagaagattttatttatcctgtatgtatagatctgaaagatacctttaataaactgaataagtttccactgaatgataaatttaggacattcttgcttgacaatactaataaagtgatattagtaggaaatcctatgcatcatcctcggataaaagagatgtatatgggacagttgcgtgattgtaataataagccggaggtggagggtgatgaatgaaccagagggtaaaagaaaagaataaatggatagaccgtttaataaactttgtattttatggttgtgtacttgctctgatatggttgctgttacaaatcacgaccttttcttcgttcaggattcctactgcatccatgcatcctactctgataaaaggtgactatgtaatagtgaataaatggatagcaggcggcaggatatttaatgtttttaatgcggtaaaaaacaagcatatatcaataaaacgtattccgggaatacgacggataagaaaaaatgatattctcatttttaattcaccagtcgggcaatataagaatcgaatacattttgatgtcatgcaatattatgctaaacgatgtgtggggcttccgggtgacactgtggcaattatcctgcctacattatctgccttagtcgaggatagccttacgttttcttttgatcataattactatgacctgttaggatggactgctgaaaaattcggtcctctttatataccttgcaaaggtgatcaaatcccgataaatagtttgactgctacccaatatggaagtgttatggaatgggagactaaacagaaaatagattataaagatagcgcatattttataggaaatcatcgtttcacaaattatcagtttaagcatgattattattttatgctgggagacaatatacaccattcattggattcacgacattggggattggtgcctgatgatttcattgtgggtgtagtacaatggatttggttttcaaaagatgaagagcaaaattcaattcgttggaatcgaatcggtagagtagattgaaataagagatgcgaaaggttatagttctatgcttgttcggataaaaacgtataaatgatgcgttgtgatatatgttgtatgaaaagtttttgttaatattgtcatcattatgagtttgtttttgttgtatgatgaaataataactgaagaattatgaagaaagtattgtttttattcgcctttttgcttctgggtataggagctatggcacaaaaggtaatttatgatgaaaccaaccagaccggagtgcgtacagtggtatgcgagggtatgaatctgggtgtttccaataatatggacgtatatgtggcactcgctggatttcagtataaaagtaccatacgttattcgctggctgttactatcgggtcggggcatgaggtggaaattcctaatgacagtaagtgtgtcctgacgttggataatggaaaggcattagagctgcctacggtagcaggcggcgcttctgtattgcagcatgtagatgtggagatgagtgatgtgtatcaaagtttccgccgttttgcctattataatataaaggctaaagaattgaagaaaatcggcaaaaacggtatcgtacaaatggatatacagttatctcccggaaactattccattgcattcaaccaggatgtcttgggaagtatgctgaccggttctatgtcattaataaataatatgtttgggaaataacttcttttttcatattgtatggtgcagccttttcttctcagaaggagaggctgtcttgtttttgaaagtcaaagggttaaacaaaacattgtttcatgtgttttcctaatgttttttaatgtgataaacttatgaggaaaatacgtagatggggagtatggctccttttaatcattcctttggcactgaatgcccagcagcgggccgaaaaattattgaatgtacccttgccggaacattggcaagaagaggatgcgatgtttcaacaactgcttccggtggatgaccattggtggactgtatttcaggatgccacactggattcattgattcatgtggctgtcaggcagaatccgtctgtccttacagccttgaatcgtatagatatggcgaaagcgaatctgaggatagccagaggaggctattatccggctttgtcattggatgccgggtggaaccgccaacagactagtggcaataccggtacgggacagcctcaatccagagtggggtattatgatgcaacggttaatatgaactggcaggtggatgtgttcggttccatccgccaacgggtgaaagcgcagaaagaaaattttgcggcaagtcgtgaagagtacaatgcgacgatggtaagtctttgtgcagaagtggcgtcagcctattttaatttgcgtgagacccaacaggaactcagtgtgttacagcgcaatgctttatctcaaaaggcggtggtggatataactgaagtgcgttataataccggactggcttccaaactggatgtggctcaggctaaatcggtttattatagtacattggcttctattcctgctacagaatccggtattattcaatatatgaatgcgttggctgtattgctcgggctttatcctcaggatgtgacggctgcactggaaacgggaaaaccgttacccgattatatagagccggtaggggtcggtcttcccggacaattacttttacgacgtcccgatgtacgggttgccgaacgtcaagtcaatgcacaagcagccttgttgggagcttccaagaccgattggcttccctcattttttctgaacggttccttcggctatgcttcacatgatatgaaagattttactagacgtagcagtatgacatggagtatcgctccctctatgagctggacgatttttaatggtggccagcgtgcgaataatgtacgcttgcagcgtgcacaactggatgaaacaatcaatcagttcaatactacggttcttacagcggtgcaggaggtggataatgccatgagtagttataagaattccatcaaacagattgtagcatgtcgtgagatgttgaatcaggggaaagaggcatttaaactttcattggacttatataaacaggggctgagccctttccaaaatgtattggatgcacagcgttcgttactgtcatacgagaattcattggtgcaggcacagggatattcattgctttgtctgattcagatgtatcaggcattgggaggaggctggtaggctgcgacggaaaagctgttgaactatagaaataataaaaacctaacccaagatatgaaaaaaataatgatagctttcgcatggacggtatgtgtgttgaccgcctgcgataaaaataaaccttctcagacagaaatgcaggcattgcctgtagatgttgcgaaacctttggtggaaaatgtgacgctgaccaaagattatcccggttatctggaagcggaatctactgtagatttggtgggacgagtaaatggaactttacaatccaagaattttgcacctggttcccgggtacgtcagggacaggtattgttcgttatagaaccgacactttatgaaaattcagtgaaacaagcggaagctgaattaaaaacggctaaagccaatcttgaatatgctgtcagtagttatcaacgtatgaaagaagcgataaaaagtgatgcggtgagccgtatacaatatttacaggcggaaagtcatgtggcggcttgtgaggctgccgtaagtaatgctgaagcagctttgaaaactgcgcgtaccaacttgagttattgctatgtcaaggctccttgtgacggagtggttgatgtttcggcttattctgtcggggcgtatattggtggtgctttgcaaccggttaaattggctactgtttataaggataaccgtatgtattcctattttaatattgcagataaccaatatctgacatacgagctggcccaggaggctgccagcaagattcctgcggaaactcattttgtaaccttgcgtttgggaactgacggggcacagtcatggaaagcgaaactggattatctttctcccaatgtgacattaactacaggtactctccgtttgcgtgcggaattggataaccctgacgggatgcttcgtcccggattatttgtcagtgtcaccttaccatacggtgaagcgcggaatgcagtgttggttaatgatgcttctatcggaacagaccagttgggtaaatatttgtatgtagtgaatgacagtgatatagtgaattatcggcatattgaagtcgggcagttggcggatcataatatgcgtgttgtaaaaagtggcttgtcaccttccgaacgttatgtcaccaaggcattgttgaaagtgcgtcaaggcatgaaaattaaaccgatagaacaaaccaataaacttcaatagccttatgttttcaaaatttttcatagaacggcctatatttgccacggtgctggctttgttattcgtggtggccggacttgtaaccctgaatatattgcccgtggcgcaatatcccgatattacgcctcctaccgtgcaagtcagtgcggtatatccgggtgccaatgctgaaactgtagctcaaactgtcggtatccccattgaacagcaggtaaacggtgtggacggaatgttgtatatgagttccaattcctctgcatcgggcgcttattcgctgacagtgactttcgaagtgggaacggatatcgatatggcaactgtgatggtacaaaaccgtgtcagtgtagcattgaattctttacccgaagctgtgaaggtacagggagtgacggtgcagaagcagtcatccaatattgtgatgatgcttacactgagtggtgacagtatttatgatggcctttatctgaccaattatgccaatttgaatctggtagaccagttgacacgtgtaccaggggtaggagcggtggatgtcatgggagccggtgattattccatgcgcgtatggctgaatcctgaaaccatgcgtatccgcaatattaccccgcagcaggtttatgctgccattcaaagtcagaatatggaagtgtctgccggttatgtgggacaacccatcggcagttcggccgataatgattttcaatatacgctgaatgtaaaaggacgtctttctactcccgaagagttcggcgacatcatattgagagtggaagaccagggaaaagtgctccgtctgaaagatgttgcaaaaattgagttgggcagtgccgggtatggagttgtttcccgcttgaaagggcaacctacggctgctattgctgtttaccagttgccgggaagtaattcgctggatgtttctaaacacgtccgtgcccgtatggcggaactggctgaaacatttccgaccggggtgaaatacaatgtgacgttggatactaccgatgtggtacacgactccattgatgaagtgatgaagacctttgtggaagcgattattctggtggtgctggttatcttttttttcctgcaaagctggcgggcggttcttatcccctgtcttactatccctgtgtcccttatcggaacattggcggtaatggctgctttaggcttttccatcaatacattgacactgttcggcttgatattggctatagctattgtagtggatgatgccatagtggtgactgaaaatgccacccgtattctggatgaagggaagctggacgcccgtgccgctaccgagcaggctatgggggagattaccggacctattgtcggagtggtgctggtactgcttgccgtatttattcctactacgctgattagcggtatttccgggcagctttataaacagtttgctttgaccatcgcggcttctacagtgataagtggtttcaactcattgaccttgactccggcagtctgcgctctgttgctccgtcccaccccgacgcataaagcgcgtttgttcctctggtttgacaagatgaatgactggatgcagcgggtttatgacgcttcggtaaaatggttgttggcacggccggttattgctatcggttcttatatcgtaatctcagtcattgctattctgatgtttgtaaaatggcccagcacctttattcctgaagaagatgacggatattttatgattgccattcagcttccggcagcttcttctttagagcgtacacagatggtgggtaagcagattgatgctattttgtcagagtatcccgaagtgaagacttatttgggcgtaaacggattcagtatcatgggaggtggtcagttgcctaatgcggctacctattttgtggtgctgaagaattggaaagagcgtgcgggtaaagagcataccgctcaagcggtggtcaatcgttttaacggacaggcatatgccatgatacaggaagcccaagtctttggtattattcctcctgctattccaggtatgggcaatacgggtggtttacaactcgaactggaggatcgtaagtctttgggtccggaagaactgcaaaaggcggttgaggctttattggctaattatcataatgagccggctgtcgcttccatgagcagtatgtatcaagcggatgtacctcaatattttttgaatatagaccgggataaagttcagttgatgggtttgcagttgaatcaggtcttttctacattagggtattacatggggcaggcttatgtaaatgattttgtggaattcggccgtatctaccaagtgaaattggaggctggcgaacaagcccaaaaagtgattgatgatgtgttaaaactgagtgtggtcaattcgaagggagagatggtgcctttcagcagttttacgcagatagaacaaaaactggggatggaccagataaaccggtataatatgtattcggctgcttccatcacttgtacgccggctgcgggcagtagttccggacaggcgatagaggctatagggagtttgattaaaaatcagctaggtggtgagtttggatatgaatggacctctgttgcctatcaggaaactcaggcaggtaatactactacaattattttaatcatggccttgttggtagcctatttggtactggcggcacagtatgaaagctggacaagtccggtggctgccgtgatggggcttccggttgctattttgggagcgatgttgggctgctgggtgataggggttccggtgagtatttatacccagatcggtattattctgctgatagccttgtctgcgaagaatggtatcttgattgtggagtttgcccgtgattaccgtaaggctggcaatcctatccgtgaggcggcatacgaggcagggcatgtgcgcttgcgtcctatcctgatgacttcatttaccttcgtgctgggtgtgatgccgttgttgtttgccacaggagccggtgcaggcagccgtgtggcactgggtgcggcagtggtgttcggtatggctgtgaatacaatttttgctaccatttatattcctaactggtatgaagtgatgcagcatattcaggaaaaatggctgactaagaaaaaataattgtttggtttcaccacagattggtcagatttatacggacaactcgatttaaaaactgtatggatttgcgttatctgtggtgaatttgtgtatctttgcgacaaacacatggaaatatggatacaataaacaacgatcttactaacttattgcaacagatgggtgtgcataaggaaagcctgggcataacccagcgtattgtcattatagcagggattctgatcattgcttttgtggcagattatttttgtagaaaaatagtagttcctactataaagaaactgacggcaaggactcaggctacttgggatgattatttattcaatgatgctgtattagataatatgtgtcatcttattccacctattatattgtatgtattgcttccttttgcttttccgcatgaacctgtgactttgacattcattctgaagctatgctgggtgtatatcacggctgtagccatgaagttgatttgttcttttctgacttctctctataccatttcaagcgaacatgagaaactaaagaatcatcctctgaaaggggtatatcagatgataaaactgattgtgatttgtgtaggggtgatcattataatcagtaccttgattgataaagatcctgtgaatattcttaccggattgggtgcttctgcagctatcttgatgttggttttcaaagatacgattatggggctggtagccggagtccagctttctgccaatgatatgctccgtccgggagattggattaccatgccgaaatacggagcggacggtacagtaatagaagtgactcttaccactgtaaaggtacgcaattgggataatactataactacagtcccaccttatgcattggtcagtgattcgtttcagaattggcgtggcatgagggaaagtggtggacgcagagtgaaacgttctattaatatagatatgaatacggtccgtttctgtacaccggaacaaatgaaaaaatttgaaaaacaagtctggatgtcaggctttgaaaagacaggaaaggaggaggtgaatctttatgtatttcgtcactatctggaatattatttgcgtcataatcctcgggtgaatacagaattgattttgatggtgcgtcaattacaacctacgccgcaaggattacccatagaactttatttcttctcagccaataaagactggattccatacgaacgtttgcaagcagaggtttttgaccatttgttggctgttcttcccgaatttggattaagggtattccaaattccttcaggattggatgtgttgtctctttcttctcattaattatttataatctcactagcggagaggtacaggaatcatcacatattaacatggattacatcaaatttattgattgtcaaaatgaataatccgtgttaatatgtgagaatgtacactattatacatgaagttccagtataaaccgagttccttttttataatcagtgtccaaagtcagtgtaccatttaatttataagcgataaggctgcaagtaggcaaccctagtccgtttccttgcgttaaatcgcgtatttctgcaaatggcttgaacagtttttcacgtgcttcaaccggaattcccgttcccgtatcagttagtatgaattgatgtgtatgggcgcttcgttttttgaattccagtgaaatcttaccacttttcgtatattctgccgcattgttcaataaatggtttaatatacgttccaattcttctgcatttgtcttaatatttacacgtggaacatttaccactgcttctactccggatttgaagtttattttcgctttttccataatactttcacacaatgtatttatgttcagttcctttagcggataatgttcttcacgtgtttcttccaatgaaatatacgtctggatagctgtcatcagttctttcagtgccttgatgttttcatgtaatattggggtggatattgtttcctttgttgcttcatctattgtattcagacttggttcaatttgggcgctgatattaccgataaatttagacttctgctcattgttttcattcgctgtctgcaggctatgtttcaatttctttacttggcggatatgtttaaataacagggtagctaagaataataatccggcagccaatatggcggataacacacatagtgcaatgataataattagatttgtggtaatcttgtcttctttttcctgcaaagtcttttgactggtttcatatttttgttgcagtgtgtttagttcattggctgtttttactgcttttatggaatcttgccatgaagtataaagttttctcattgcaatagccaatggggcattattattctgttcggcatatcccaacatgtctttatagcattggtctattcctttttcgtctttaccggcagagcgcttttggaataagatgttgtaacattccaagcttttgtctgtcataccgaaagtttgataataattggcttccgtcattagaagctcttcttgtaaagagtctgattttaattggtctgtataggaatgaagttgtttcaatagtatcttgcattgttctgtattttttagattcgtatacatacgcaggcgttctttacccaccatgaaacgtaatttgtattcgggtgattttttttcttgctcattataataaatcaatgcatccatttgtcggcaagtggcaaaggcttctttatattgcctgttttgagtaaagagcgtacttatccgtattccctcttctaccgctttatttatttgcttttgttcggcatactgagtgaattttgcccactttgtatttaactcttgaatattgacatctgccggtttggctgtcgtttgtccttgccctgcagcacaacaaaaggcaagtgctaatgttagaagaatttttttcattattgaaacaggttttctgcaaatataacctttttttaagcaaaaagtttagggaagtgcaactttttttcagcttctagcgtctaaacagtaaaacaataacttttaagcaggacaggccatcttgtaaaaagaataaaatcataatatttaaaatgagaaaaatagtaatgatagccatactggtagtcagtatggtacaaggagtttttgcccaacaaataattataaagggcactgtgaaagacgcgacaagcaaaaaggcagcagaatatgttaatgtagttttacaaacagcagattcggtttttgttggagggactactacgaatggcaaaggcgatttcttgctgaataaggtttatgcaggcaattatttattggcactatcctgtgtggggtatcgtacgcaattcattgtattagacggaattaaacagaatataaatttaggggaaattttgttggaagatgatgctgtggctatggaaggtgtaacagttagtgcttccggacagatcagtcattcggatcgtaagttgatttttccttctgaacggcaaatgaaggtttcgacaaatggagtcaatctgttgcaacagatgatgcttccccgtattcagataacccccatgaataatgagataggagtgttagggggaggagaacttcagcttcgtattaatggagcgaaagcagaagttgaagagattaaggcattacagccatcagacattattcgaatagagtatcatgacaatccaggtttacgttatggtaatgctgaggtagtgcttgattatattgtccgccgtccggaaacggggggaaactttggagtggatttgtctcaggggatgaatgccatgtggggagaatataatgtttttggaaaagtgaaccataagaagtcggagtttggcgtttcgtattacatgggacctcgcgatttctatggtatgtaccgggataatgaagaggaattccatttggcggacggaacgacattacatcgtatagaagaaggtgaaccggggcacggatctatgtttatgaataatttaagtatgaattataatttgcagcagaccgaaaattcattgttcagtgctacttttcgtttgagaagtaatagccagccgcattggaattatcaaggagtattgactaatgttgccgattctgatgataaggtggatatgatagaccgtactaaagaaagttggtctcgtccttcgttggatctttattatcaacagggattgaaaaataagcaacttttggtattcaatgtggtcggtacttataataaggaaaaatcacgccgtttgtatcaagaaagtttgcaggatgagttgttgactgatattaataataatgtattgggagataaatattctctgattggggaggctgtttatgagaagcaattttctaaaggaaattccttgagtttcggtttgcgccatactcagtcttttgccaataatgaataccgtaacggtcattattatgaaacggatatgaatcaaggggatacatatgtttatggtgaatatagaggaaaggtgaaaaaattggactacagattgggggtaggcgttactcgttcttattataaacaaagtggtgatgattcgtatgagaattatagttttaatccccgtttggtactgcattatgcattaccgggaaattcatttgttcgttggaaatccgatatcagtaatgcttcgccgtcattgggggatttaagtgctgtagaacagattgtggattcgttgcaaatcagacgaggcaatccgaacttgaaagcctatttgcgttatcacacagagttgacatacgaatggcagaaaggtatattttattctaatatttggggagcgtatgattatcagccgaatgccattatggacgagaagtatcaggacggtgacaagattgtacagacatgggacaatcaaaaggattggcagaaattatcggggcgtctgactttgcgtgtcggtcctattaaggatatgctacagttctcgtttaccggtggagtaaaccattatatgagtcatggtaatacatattctcatatttatacaaactggtattgtaatgctgaagcatcctttaattacaagcagttctctctttactggcagatgaatactaactggaataatttctggggggaaaccttgtcggggggagagaatattcaggtattgatgatgtattacacgcataagaatttgcgtgtggggctaggcgctttcaatccgtttacggataattataagcaacagactgagaactggaataaatatgcttcttataaaaaaacgaattatgtgaaggagagctcacaaatgtttttggcaagtgtttcttataatttctcgtttggccgtaagtttaagacaggtcaacggagggtgaataatagtgataacgattccggagtgatgagtaccggaaaataaacaagataatcatttgaatgagcttaagttcatggggcaagtaagttaagtaacttgattcacgaacataagttgcttggcttacgaagttaagttcataaatttaccggaataatagatatattacccttaacaaaatcatatatgaaaatgaaaaaaaacttgattgattatgaactcctgtgggagaaaattacggattacgcaaaggccaccggtagaacgactgctcgtcctgtacttctattatattatgtattgcgaagccccgaaactccttcttcggataagatgttgattgtggcggcactttcgtatctggtattgccgatcgatttgatttcggctaagcggttaccaattatcggctggattgatgaagcggtatctttggtttatgcttataaaaaggtgtgccgctatgtgactcctgagattgaatcagaagtggataatatattggaacgctggttcccggaaggaaagtatgagttgatagaagaataaatattgtacttgtctttggggagtaaggatgggtaaatggagcattttaggaatgggcttcgtcgaatttcggcgtggcccttgctgattgtagacaaaggtaaattgtaactctccccaaggaacttcattttgtctgagaatatgtgaggtatgtaaaagtgttacaatatgttttgagtcttattaattccctataattcaattattaacatgacctaagttctcttagaacttagataaaaacgctcaaaaagagttgttttgctggatttggcaagcaaaaagtaaggcttaatagaataaaattatttattatccaacattttatctgcaatttctttgatatttaatatattttcatatctttgcagcaatatttaatataaagttctaagagaacttagcatttatgaacgttaaattaaaaagtttttttatgaaaaagagagttttgtttacgttggcttgtctattcctatggacaggtatggcaatggctcaagtatcccgaattactggagttgtagtttcggcagaagacaatgagccgattgtcggagcttcggttcttgtgaaaggtactacccttggaactattaccgatatgaatggccggtatagtataaacaatattccggtcaatgcaaaatctttggtaatatcgtttgtcggtatgaaaacacaagaattggctataaagggtggtgagcaaagagtagtgatgcaaagtgatacggaattgattgatgaggtcgttgtagtggcttatggtacacagaaaaaatcatcttttacaggagctgcttccacagtaggggccaaatccatagagaaacgtgctatcactaatgttacagctgcattggaaggaaatgcttccggagttcaggtgactgctgccaccggacaacctggtgaatcttcttctatccgtattcgtgggtttggctcagtcaatgcatccaatgctcctttatatgtagtggacggaactatatacaatggcagcataggtgatattaatcctgcggatattgagtctatgactatattgaaagatgcggcatctacttctttgtatggttcaagtgcgggtaatggtgtgatcttgattactactaaaaaaggtaaagagtcaggtggaacaggagtaaacttaaccattaaccaaggatggtcaaacagggcttataaagattataaaaaggtggggatttatgattactatcctttacaatgggagatgttgaagaactcttatattacatctggtaaggatgctgcaacggcggcctcattggcaacatctaaaattggaagtacattgaagtataatccttttgttgatgtcgcagatgatgccattgtcggaactgatggaaaactgaattcttctgctgatgcattgaagtggggggatgatttggattgggaagatgcagctttcaagaccggctatcgtcaggaatataatttgagttataatacaaaaacagaaaaaagtgatacttatgcttctgttggctatttaaatgatgatggttatatgatcaagactgactttgaacgttattctggtcgtttgaattataatgtgtatcctactaaatggttcaagactggtttgaatttgggagtaacgcgtacggtatccaattattcaacttcagattcgggaaattcgagttcatatagtaaccttacccgttttattcgtaccatggctcctatatatcccgttcataaacatgatttggaaaccggtgcttatttggatgctaatggtaaggcaactactgatccgggtgaatatatttatgattatgaaggaactcgcttgtcgaataatggacgtgatgcgatagctgaaacagagttcaatcaacgtgaactggtgcgtgttaatcagactggacatacttatctcactttgactccggttgaagggttgaaccttacagccaattactctatcaataatattgattatcgtcgtaaagtctatgaaaatccttatgtgggcgatggcactgccggaccgggtcgtttgaaccaaatgtctacccgaacgctgactcagaccttcaatcaattgataacttatagcaagtctatcggaaatcataactttgacgttcttttgggacatgaaaactattcttataagtatgagtatttatatggcatgaagacccaggaaacagtttcgggcatgtatgaatttggtaatttcgtaaatatcagttcacttagctcctatacgaacacctataaaaaggaaggttactttggccgtatcaattatgattatgcgcataaatactacgcttcactttcttatcgccatgatggttcctcgcgttttgcaaaagagaaccgatgggggaatttctggtcgttcggagcaggctggagaattagtgaagaggcatttatgaaggatgtgaaatgggtgaataacttgaaattacgtgcttcttacggtgaaacaggtaatgataatatattggatagtgatggtgatcctgattattatccttatcagaccttatatggtttgggatataagaatggctcagaagctggagcctacttcacggtgatagccaatccctcattgaaatgggaaacacagatatctacggatattgctcttgaatttggtttgtttgaccgtttgacgggtactattgaatattttaagaaagattccaaggatttgttgtttgatgtttcccagcctgcttctgtcggagtaacatccattatacagaatatcggtaaggttactaattcaggagtggaaatagagttggattataatgcatttaaaaataaagattggagtgtatcagttggggccaatgctacttttgtgaagaataagatcaagaacctgccggctacaatgaaagaaaatggatatatcagtggctctaaaaagtggttggaaggaaagtccatttatgaattctggcttcgtcaatggcatggggtagaccctcagaccggtgatggtttatatgtggctgatgtaagtaaatataatcaagggaatatcggaacaggggatggaaacattacgcagagccagtttgatgagtataaaaaaacagtagtgactattgatggtaaggaattgaccaattcgtatacttatgctaaatacgacttcagcggttcttctattcctgatgtgtatggtgggtttaatgtcagagttagttataagaactttgatttggctgctgtattctcttaccagttgggcggtcagattctggatactaattatgctaccatgatgagtatgactgaatttggttatgcacaaagtccggatttgttaaaagcatggaaacaggcaggggatattactgaggttccccgtatagacaatagtgcggctcataccacgaatattggtcagtcttattcaactcgttggcttaccagctcggattatcttaatttaagatctgtcactattggctatcagctcccaaaaacttggttgagcaaagtgatgcttaagagtgcccgtttgaatctgactgcggaaaacttgttcatgttgaaagcccgtcagggattgaacccgatggccaactattccggtgtaacttataatgagtatatgccgtcccgtaatatcacgttagggcttaatgtttcattctaaaaataaaagaattatgagatcaattaaaaatataacattaggattagcgacagttggagtaatgtctctatccggttgtgccggtgattatctggataccattccgtctacctctgtttcagaaacgacaataaacacctcgttggacaatctttatatagcattgaacggaattcataaagagatggtttctcaggaaagcggatatcagtgtctgggcggtgaacccggttttatgatgtcacgtgatgcagaggctgatgatatgaattggcagacaaatacatggatgaaggcggcctatttaggatggcaatgcaatatgaatgaaacgaatggttataattataagttctggcagatttattatcaatggattctgaatgccaataaaattttggcgggtttggaggaagttgaaataactagccaggaattgtttgaccagataaagggagaagctttatgtatccgtgcttgggctcattttaatttggtccagctttatgcaaaacgttatgaagccggcaaggataatacacaggatggaattccttatcgtgaaaaagctgtggccgaagagcaggcacgtaattccgtagaagatgtttatgctaaaatcaataatgatttggatgaggcttgtatacttttgagtggaataaaagtaaatgatgtcaatcattatagcgagatggtggcatggggattgaaggcacgtgtagcattggccatgcaagattataataatgcggcggtttatgcagggaagtctatttctttagctgaagcaggtggtcaccggttgatgactggcagtcagttgaattgtgggtttgccaatatcacgacggacactaaagaagcgatgtatgctgcaatgactcccgatgataagactgtctatttttattcttattacgcatatatgtcatggaactttaactccagtgccattcgtcagggagtgaagtgcataaatgtggatgcttatgaaacgatgtctgaaacagacttacggcgtgcgtggtgggatccgacaggggaagcatctgttccatcatcaagttatgcaaagaatgcttatcaaaaccgtaagtttactgcccgttctacagccgatgctgtaggtgatgtcgcatttatgcgtttggcagaaatgtatctcacccaggccgaagcattggctcgtgcaggaaaagatagtgaggcgcaggctgtatttactaaattccagataacccgcgatccctcttatgtttcaaaaggaaatatcggtgaggctttggcagaggaaattatgaatagtcgccgggtggaattgtggggtgaaggttttcgtttttatgatttgaaacgtttgcatatgtctattaagcgtggatcaaattttgatatagctttctgtacttttcttgaaaaggataaagatgcacaaggttgggtgtgggagatacctaaaattgaaactgactttaattcactttgtacgaagaactattgataattctctctaacacataaattttctcttaaaggaggtgggcagaatttttcttgaaagttttgtaccacctttttgcttgacataacctttgttttacaagaccgatagcttttctggttttctttttgtattactagggttgtctaatatcaattttgttgatgttttttggtaatttagaagaaatggatttaatttatccttggtctatcgttataatccattgtcttgaataaagtaaagaacctgtaaacacgaaataagtgtaaacagattctttactattgtttaaaatgataaactattcaggtgaaaaagcttattcctcttcgtccagtaaaatgtccataatctgaacagctgctttggcaacagaagttccgggaccgaagattgctacaacacctgccttgtataagaagtcatagtcttgagcggggataacaccaccggcgatgaccaaaatatcttcacgacctaatttctttaattcttcaataatctgcgggatcagtgtcttgtgtccggcagccaatgaagaaacacctactacatgaacgtcgttttccactgcgtcacgagcagcttcggcaggagtttggaacaacggtcccatatctacgtcgaaaccacagtcggcataacctgttgcaactacttttgcaccacggtcgtgtccgtcctgtcccatcttggcaatcatgatacgcggacggcggccttccttctttgcaaattcttcggtcagttcgcaagctcttgcgaagtctatatcctttttactttctgatgagtacacgcctgatatagttctgattactgctttataacgtcctacaattgtttcacaagcatccgaaatctcgcccaaggtagcacggacatgagctgcctctacagccagttccagcaaattgcctttacctgtctttacacattcggtgatggctgccaaagctttgtctacttctgcttgattgcggccttctttcaaacgcttcagattttcaatttgttccaaacgtacagctgtattgtctacttcaaggatatcgataggatcctctttttccaaacgatatttgttagtgcctacaattgtctgggcaccggagtcgatacgggcctgagtacgtgccgcagcttcttcaatacgcattttgggtactccggtttcgatagctttcgccataccacccaagctttcaatttcctgaatatgttcccaagccttgtgagccagttcgttagttaaagattctacatagtaagaaccaccccatgggtccacgttcttgcaaacatatgtttcttcctgaatataaatctgagtattacgtgcgatacgtgcagagaagtcggtgggcaatgcaattgcctcatccaatgcgttggtgtgcagtgactgggtgtgtcccaatgctgctgccatagcttcaatacaagtacgacctacattgttgaacggatcttgctccgtcaatgaccagcccgaagtctgggaatgggtacgcaatgccagtgatttcggattcttcgggttgaactgcttgacaattttagcccacagcatacgtgccgcacgcattttggcaatttccataaaatgattcatgccgatagcccagaagaatgatagacgcggagcgaatgcatcgatgtctatacctgcggctactccggcccgaagatattccaaaccgtcagccagtgtataagccaattcaatatctgctgtggcacctgcttcctgcatgtggtagcccgagatggagatggaattgaacttaggcattttttgtgaggtatattcaaatatgtcagagatgatcttcatggaaaaggcaggtggataaatataagtgttacgcaccataaactcttttaagatatcattctggatggttccggccatttcttccaatttggctccctgttccaaacctgcattgatatagaatgccatgatgggaagtacggcaccattcatggtcatggaaacagacatcttgttcaaaggaataccatcgaacaaaactttcatattttccaatgagcaaatagacacgcctgccttacctacgtcacctactacacgttcatggtcggggtcatagccgcggtgtgtcggaaggtcgaatgcgacagacaagcctttctggcctgatgccaaattacggcgatagaatgcattactttcttcggcagtggagaaacctgcgtattggcggatagtccaaggacggaaagtgtacatcatggagtacgggccgcgaagataaggaggaatacctgctacatagttcaagtgctccatgccttccaaatcttctttagtgtaaacaggcttcacattgatgtgttccggcgttttccagtcggcggtgatgccattttctttttgccattccataccattctgaggttgaaatccggcatatatatctatatttttaaaattcggtttcattgttcttccttacttaattcctaacttagcgttgtattctttcaatgtgtccaatacgttgacacgtacatggataaagttttcgatgcctgcggctttcagctcttccatacaagcaggagcacctgcaacaatgaaaatagctcgtccgtccaatgccttgaatgcaggaatagcatattctgcgtattcatcatcgctggaacagataactacgatgtctgcaccggctttcatagctgcttcgacaccggcctctactgtggggaagcccaaattgtcgattacttcgtaaccggcacaagccaggaagttgcatgagaattgggcacgtgcttgacgcatggccagattaccgatagtcagcataaatgctttcggacgtttgccggatttctctgtctgcaaacgaagtgcttcaaactggctggcagcacggtcgaagtttaatgtggcaaacggcttttcacagctgtcatgattacctccacaacaacatttggcttctacaggagccttttcgcctgctttttcattgaagttaggatattggttggtacccagtagaatttctttgcgttttgaaacggaatcgtggcgggccttgttgcttgcgttgatcgcttcctgtacttttcctgctttgactgcttccagcattcctccttcgtcttctactttcaagaataattcccatgcctgtgtggcaatagaaattgttaaattttcaataaagtaagaacccgcggcggggtcaactactttgttgaaatgacattcttcttttagcaataactgttggttacgggcgatacgttcagagaagtcgtccggagtttcgtaagtcttgtcaaacggggttacggtgatggagttgactcctgccaaggcggcactcatcgcttcggtttgagtgcggagcaggtttacatgtgcatcaaacaaagtcaggttgaaagtggatgtttcagcatgtgccaccattttgcaggcacagagacaagtaccgtcttccgctttgttcggacattcgggctggcggttgcattgaggatgatattcttttacgatgtccgcccataacatacgtgctgcgcggaacttggcaatttccagaaaatagttggaactgatgccgaaattgaattttattttcttggcagccagtgcggcaggaactcctgcttctaccagcttgctcagatattcgttaccccaggccaatgcatagcccagttcttgtgaaatataagatccggcattgttcagttctatcgcattgacacagatacaacggaatttaggtagcggagccagtacttctaccaattctttggcagtagtgatgaaattgctaaggtctttgccttttaccatcattttacccatagggtcatagttgacggagccttgcaacttggtcaggtcgtatcctttcttttggaagtaagcaaccaataatttggctaattccaccgtatgtccttggcaagtggagaagtttaactcaatgcattccgcacagatatcattcaataatgtttcgatatattcaggactgaggtctttcttctttacgtagaatcccaatgagtcaacacctttgttcaaaatatccagtgctttagcattagcctctttagggcattctactttgatttcctgacgcacgaaccaagtattgtcgtttttcttcgtgcctcttacataggggaattctccgggtagtccttcagttgttttcaaaccttccagatcttcctggcgataaaatggttttactttaaaaccttcgttggttctccaaaccaatttcttttcaaaatcagcgcctttcaagtcggctgtaatcttttccatccactgttccgtagaaacggctgggaagtccgaaaagagtttctctttactatctgccatagtttattcggtattaatatttaagaattatatcacatactttttcaatagtacgggcaaatatactaaaaccttttaaatagaatcctttttttagctattttcataaaggagaaagagaggtttctgtcattttgttaagtgacgaaaacaaaagatgttcttattgcaaagtggatattgcaaaataaataggaatcatgaaataatagttttcaaattgttgggctgagtgaggggaattcattaattttgcggcaatttataaaaacatagtattatatcatggactggttacaaaatctattatttgatgaaaactcaatagcgcatatcgtgctgctttattcctttgtgattgcagtaggagtgttgctgggaaaaattaaatttttcggggtatcgttaggtgttacttttgttttgtttaccggtattgtctgcggacatttcggcttaacggggaatacacagatacttacatttttacaggatttcggactgatattgttcgtgttttgtatcggacttcaggtaggtccttcttttttctcttcctttaagaaaggagggattgctatgaatctagtggcaatggggattgtcgcattgaacattgctgtggctgtggctttgtattatggtttgaacggccggatagagttgcctatgatggtgggtattctttgtggtgccgtaacgaacacgccgggactgggtgctgccaacgaagcgttgagccagctgaattacagtggcccgcagatagcgatgggatatgcgtgcgcttatccgttgggagtgctgggtatcattggttctattattgctatccgctacatttgccggattaatttgaaaaaggaggaagaggatatcgctaaagaagaagctgcaaatcctcatctgactcctcgtatgatgcacctggaagtacataatgaggcgttggcaggaaaaacgttgcttcaggtcagagacttcatggggcgtgactttgtttgttcgcgtatattgcagaacggtcatgtcagtattcctaatcgtgatactgtcttccatcttggtgatcagttgtttgtggtttgtgcagaggacgatgcggaagccattattgcttttatcggtcctaaaattgaagtggattgggaaaagcaggatactccgatggtatcccgccgtattttgattacacaacctaaaatgaatggtaagcaattgggtgagtttcatttcagtagtatgtatggtgtgaatgtgacccgtgtcaaccgttcaggtatggatattttcgcttcacgtaacttgaccttgcaggtaggtgaccgtgtaatggtggtaggtcctcaggatgcggtggaacgtgttgccaatttgatgggtaactcattgaaacgtttggatcatcctaatatcgtgactatttttgtgggtattttcctgggtattttctttggtagtctgcctattgcgtttccaggtattcctactccggtaaaattgggtttggctggtggtccgttgattgtatctattttgataggtcgtttcggatataaattgaaattagtgacttataccactatgagtgccaatttgatgttgcgtgaaattggtattgctttgttccttgccagtgtggggataaaggctggtgcgaattttgtgaatacggttgtcgatggagatggtttgttgtatgtgggttgtggtttccttattacagttatacctttattaataatgggagcggttgcacgctggcattacaagatgaattatttcatgttgatggggcttattgcaggtagtaacacagatccccccgcattggcgtattctaatcagacagcaggtaataatgctccggcggtaggttattctactgtgtatccggtgtccatgttccttcgtattctgactgcccaattattgatattaatattggcaagctgatattggtaaaaagtataaaaacaataaagtataaaacttgtaggagggggtgtcaaaaaaatggtagcttgaatcatttttttgacgcaccctcttgctgattaaaagaataaatatgatttcagtagatggattgaccgttgagtttggcggtaccaccttgtttagtgacatatcttttcagataaatgagaaagaccgtattgccttgatggggaaaaatggtgcgggcaagtctaccttattaaagatcttggctggtgtgcggcaacctagtcgtggaaaggtgtcggctcctaaggattgtgtgatagcttatcttccccagcatctgatgacagaggatgggcgtactgtattcgaggaagcttctcaggcattcgcgcatcttcatgctatggaggcagaaatagaagccataaataaggaacttgaaacacgtaccgattatgaaagtgattcatatatggagttaatcgagaaggtttctgccatgagtgagaagttttattccattgatcttactcattttgaagaagatgtggaaaaggctttgctgggacttggttttatgcgtgaggacttcaatcgccctaccagtgatttcagcggtggctggcgtatgcgtattgagttagctaaattattgctccagaatccggatgtattattgttggatgagcccaccaaccatcttgatattgaatccatccagtggttggaggatttcttggtcaatagtgccaaagcggtaattgtcatcagccatgaccgtaaatttgtagataatatcacgacccgtaccattgaagtaacgatgggacgtatctatgattataaagtgaattactcccaatatctgatattgcgtaaagaacgtcgcgagcaacagatgaagcaatatgaggagcagcagaagatgatacaggaaaccaaggatttcatagaacggttcaaaggaacttatagcaaaactttgcaagtgcagagccgtgtgaagatgcttgagaaattagaattggttgaagtggacgaagaagatacctcagcattgcggttgaaattcccgccttctccgcgaagtggaaattacccggtcattatggacggggtaggaaagacctatggtgatcatgtggttttcaagaatgcctcattgaccatcgagagaggggataaagtggcttttgtgggcaagaacggtgaaggtaagtctactttggtaaaatgtatcatgcgtgagatagagcatgaagggactttgacgctgggacacaatgtgcagattggttattttgctcagaatcaagcctctttgttggacgagaacctcacggtctttcaaacgatagatgatgtggcgaaaggggagatccgtaataaaatacgagacttgctgggtgcatttatgtttggcggccccgaagcttccatgaagaaggtgaaagtgctcagtggtggagaacgtactcgtcttgccatgatcaaactattgttagaaccggtgaatctgttgattttagatgagcctaccaatcacttggatatgaaaaccaaagatatcctgaaacaagctttgatggattttgacggtacattgattgttgtatctcatgatcgtgactttttggacggattagtgacgaaagtgtatgaatttgggaataaaaaggtaaaagaacatctttgtggtatctatgagttcctggaaacaaagaaaatggaaagtttgcaggagttggaaaaataaattagctttgtatctgttaactttggattggatgtggagatgcaaacaatttctatagatataaataaagtacaaaaaggagacgagacggagtttcgtcttctttttaatcttttctatcctcgtctgatgtctgtagcttgccgttttgtgcctgaacatattgccgaagatattgtacaaagtgtctttgtcatgtattgggagcagaagtccgctttgatacccaatgccattcattctttcctttataaatgcacacagaataattgcctgaattatctgaagcaccaagctgttgtgctggggcatgaggaggaggtacgtctggcggaagaacgcatggcctttcagctggcaggatcggacgccaacgaattgtggaatgaggtggttgagcgtgatatccggaaattgttgaaagcttccatctctaaattacctcctaaatgtcgtcaggctttcgaattgtcttactttaaagagatgacttataaagagatagcggaggctatgcatatttcatcccgtacggtggaagaacatgtacagaaagccacaaaattcttgagagaggatttgaaggaggtattgttctgtctgttgtttttgcttcgttaataccttcatgcaggctttttctggagtctgtaaaaaataaaatgcaaaaaaagcatttttttttctttttaaccccgtagttccttctaggttaattgtcttaataatgaaagacaataaagaaagtaaatgaaggacgaaattttaattcgatatatcaataagcattgtactgcaaccgaagaaaaagagattttagagtggttgaaagagaaagataaccgtcagcgtttatttgagctggagcaaatctggggactgaaagctgaaatgcgtttttcggataaaggacgtatggatgaagcttatcggcaactgagcagacaacttggcttgagtgggcagatagagaaaagagagaaaccgatacagagatttaccgtcagggaatggtggaagtatgcggctgtgttggttgctgtttgtctttttgcgacaaacttgttctatatcacgaaagaggaaccggaagcatacaatacggtagtggttccgaaaggccaacgggtttctttattgctgagtgacgggacaacagtctggctgaacgctgagagccgtttttcttatccggctaagttctcggaaaaatatagaacggtcacattggaaggagagggctattttgaggtggcacataatcccaaatgtccgtttacggtgaaattgccgatgttgaatatcagggtgttgggtacaaaatttaatgcaaaagcctatttggatgaaccgagttggattactttgaaagaaggttcggtagaagtatcaaccttagatgacagaagtaaggaaagaatgtcgcccaatgaccaggtatattacaccgttagtgatggcttggtgttaataaggaattcggcgcaggcaaatgtggatagttggactactggtgacctgagattcgacaataagactttgaaagaaatggcaaaggttatagaacgtcggtatgatgtgaaaatcaggattatggatagttcgctggttgaagaatatttcacttgccattttaggaaagacttgaccatagcccaggcgatggaattgttgaaagaaaccagacgggtggattatagaattgaaaagaaaacggtatacctatataaaaaataacagtatgtgaaactttgaaaaacaacggatgcctatgaagtaaaacctttgcaaaaaatgaagggtcgaagacgcaccaccatctttcgacccggattaatgagtaaccttataatttattacaaactaatcaattacaaatgtatggataatattatgaaatgcacgccattgggtgagcaaaaatcactatggctacgaaaaacattgttaattatgaaattctttgttctttttctattattgggaactgtcccgtgttgggcaggcatcgcttattcacagaatgtgaagatgtctttggacatggaaaatactacggtgcatgacgtgattaatgctattgagaaaaaaggaaatttctattttacctataatctgaatcaagtcaatgtcaatagaaaagtatccattaaagtagaaaataaaacgattaaccagattttagatcggttattttcaaaatcaggtatcgattataaaatagaaaatcgtcatattgtattatataagcaagcaattcccgaagtagaagctgtgaaacaacagaaatctataaacggtattgtagccgatgagcagggtgaacctatcattggtgccagtgtattggaaaaaggtactacaaacggtacgattactgatttggatggtcgttttactttatctatcggtaagggaactgaattgattgtttcttatgtaggttataccacaaagaccgtgaaaataggtaatcagtctactataaaaattgtattaatagaagataccaagacattggatgaggtggttgtaattggttatggtacacagaaaaagtctgatgtttcaggttcggtaacatcagtatcgggtgataaactgtctaagattcctactgcaaatgcagagatggcattgcaaggtatggctccgggtttgtcggtaaactttggcagtggtgctgccggttcttctgccactttgcaggtacgcggtgtgacttcttggaaagatgatgatggcgagaacagtgaaagtaacggtccactagtgattatcgatggtgttccgggtaatatgtcttatcttaatcctgaagatattaaatcgatttccgtattgaaagatgctgctactgccgctatctatggttcacgttcggcagctggtgttattttgattgaaacacatcgtggtacgatgaattcagctccgaagattactttttccggttattgggggttgagtgccatgccgaagcgtctggaagtttgtaattcagctgagtttattaaagtacgtaagatggcattaataaatgcaggtacggatgaaagccgctggcctaaatatatcagcgagtacgagagagacccgagtcagtttgctgatactgattggcagaaagagtattatcaacgtggttttacacaaaaatataacattggttatacggcaggtagtgctaattccaatgtgtctctttctgctttctatagtaagacggacggtgtgactattgctaccggagatgaaaagttcggtttccgtttaaactctgatgttacccgtggtaagtttaaaatgggtgaatctgtaagctatagccgttggtcggccgatttggaatccaattcgggtttctcttccatttatcaggtgacgaatatggagccgttagcgttcctttatgatgagaacaacgatggtggttatggtggtgccatctctggtatgggtatgtctgatgccggtaatcaggttgcttttaataaattgattgataatacaagctctaccgattatatcgcagcttccggctatttgcagtacgagccgattaaagggcttatcgtgaaattcaatgccagccgtaatatgtactttagcaaatctcgtctttttacacctacctatgagattggggcggccaaacgaaacacgatggctagtttatctgaatcacgttcgcagacaaccaacgatttgttggaattgactgctaattatgacaagaccattgctgaaatacacaatctttctcttttattgggactttctcaggaagaaaataagtatgaagaccttagtgcttccggttctgattttgagaataacagtatgagcttgatgggacatgctaaaagtaactattctgtaggtggtaccaagacccgcagtgccctccgttctctctttggccgtgtgaactacaactacatgatgcgttatatgattatggcttctttccgttatgatggctcttcacgttttgctaaaggtaacaagtgggggttcttcccttctgtatcattgggctggaacattgctaatgaaccattttgggaaaatttgaaagaaactgtttccatgtttaaactccgtttgagctacggtgctttgggtaatcagaacataggtctttatcgatatattcctactttgagctacaatacccatgcattgaactatccttttgatggtcgtgaaacttccatgggatatgccattacagcttttccatccagtaacatcaagtgggaaacgacggtgtataagaatatcggtgtagacattagtttatggaacaataaactggagctttctgcggaagcttatattaagaacaccagggatatgctttctagccgtaacatcagtttagctaccggctataattcttctatcttggtgaacgatggtaagttgcgcacaaccggttttgaaatgcaagccatttatcatggcaaagccggaggattgaagtatgatttggatttgaatttatctcattataaaagtgtgttgaaatctatggccaatcctgactatctctatgaatacggtgctttgcgtacttatgtaggtggtgaaatcggtgaattctgggtatatcaaactgccggaatcttccaaaatcaagcagaagtggacgaatggaacacagctcatggctataaggatcaaaacggcaactggcagcctctgcagcctgtggctaagccgggtgatatccgtttcatagatcagaatggagatggtatgcttgatacaaacgaccgcgtgaaagtgggtagtggtacaccgaaggtgtcattgggattcaacattaacttggcttataaagactttgacttggtagccaatttctacggtgactttggtgctaagcgttataactatactaaatatcagttggagcgtatggaccatgtgttcaactatggtaagaatgccttgaatgcttggacacctgaaaatcctgatactgatattccacgtgccgtgtctggtgaccctaataagaactctcgtacttccacccgttttgtggagaatggtgactatctgcgtctgaataacttgcagataggttataatctgccggttaaatattgtaagaaaatgggcttgagtaacctgcgtatttatgtaggcgctacccgtttgttcactattaccaactacaaaggatatgatccttcaaccggttcttcagtcggacagatgggatatgactatgcagccattcctttgagtcgtgactttatgatgggtcttaaattcggtttctaattaaatttaatacgaagattatgaaattcaaaaacatattattatatgcagctcttctgagcggaatgtctttttcctcttgcacagatttcttggatgaagactctaatcccaatgctttatcacctggtattttctggaaaagtgaaggggatattatgaaaggattgactagtgtatacggagcgttgcagccgaatgcatcttgggcgataccatttgaacgctacatagtaatagacggatacagaagtgatgagattacccacagagatgatgtgacgagttggatgaatatttcatcattcaatgtggaacccactaactccgtagtcaagacggagtggactaatttgtataaaggtattaattatgccaatcaatgtttgaccaacattcccactgtacctggtgactcggaatcactcaatgccttgaagaagcagtccatagccgaagcccgttttttgcgtgcttacttttattatcgtttgtatgtgaattttggcgagagagttcctatttataaggaggcattggcaggtacggatgaagagttctatcctccacaagccaatccgggagaactggtaagtctgattgagaccgaactgaaagaagtacagagcgaccttcccgaaagttatgaggaaagtgaaaaaggacgtgtcacgcgttatacggcagcggctcttttgggtaagttctatatgttccgcaaagaattgagtaaagccgaagttgaattcaagaagatcattgataaagaaggaagtctttttggcttgatggagaattgggctgataattttgacggtatgcacaagaacaataaagagtctctttttgagattcagtttaccggagaccgttcaggcggacagtatgaatataacttgtttaccgttcatttgggacctatggctgggctggatgcatatgaagaagcttatcctacggactggatgtgtcagacgttattggctgataagactatagacggtaagtctagcgaccgtgcacttcatacgcttatttttgacgatcccgagtgtcgtcccttttattataagaatggaaaatcctttaaggattaccacaaagaaggagaaatcttctggcacaaatatgttacttataccgagggtatgagtgattattgggactatagtttctttaatgtttccgttatccgttatgccgatgtattgttgctttatgcagaatgtctaaatgacaagggtgaaacaacagaggccattaacataataaataaggttcgtgcacgtgtcaatgtaccggcattgccgcttaccatgagtaaagccgaagtcttgaaacatctgcaagacaaagaacgtccttgcgagctggcattggaaggttcgcgctggtatgacttggttcgctggggtattgtagaagaaacgctgaaagctcacaataaaccgtttgttgagaattatgtagataccaagcaccagttgtttcctattcctcatagtgaatttctgttgaatcccgattgggagcagaatccgaactatagcaagtaatcttgtttgtataattttggaagaaccgtttatgaaacatttatttcctatatatggaatgtgtagcattctttggctgggggcatgtaccccggtcgctacacagccggaaaagtccctgtttacgacacaggaagattttcccaatttgttgaatgtgaaaaatgtaccggaacaacctgtagatggggatctcaatttgttctctgatctgggtgcatggagtggctatgcattgccagtaaaccaaagcagggcatttgcgggtgccttcatcgggcctatgacgatgcatggaagaggatggattgcccaaacgttggcacagcctacgttggtggttaatggtgaaaagtacgacttggtccgtaatatgcagacagccaagtatctacctggaaagttggtacaacattttaaagatgcgcggttggaattcactactgagttgtgttttgccacttcacgcactgcttttgtacgttctgttattacaaatcttagtgacacacctttgaatgtgtcgctgacttggagtggcggtgtttttgaagagaatactactgccactaaggtggataagggcgttcggttccattatccgttctacggtcgccgttggggaaccaatcgccagattatcacattgcgtaacgaaccgccggtagacgaggtgacggctaccgtgcttttccatacagccgatgaagtgatgactgtggggaacgacagtttgcaagttgttgagaagagtgactatttgctgcaatccggcaaaagttatacttcggaatacagccagacactgaccttgaaaggcgaagaggcagataaggagtatgttgcaataaaatccataccttttgatcaatgttttgccgagaatgcgcagcgttggaatcaggggcttcaacggatactgtctgccgacagtccttatatgaaagaaaacgcttacaggaacattgctgtgaaagcattgatgacgttgaactccaattggcgtactcctgccggtgatatcttccatggttgtagtttcccttcctatacaggattcatcggtggatgttggtcgtgggatgcttggcaaattgcatcgggtaatgtgtactataatcccgaaggggccaagagtgaaatgctttctttgttcgattatcaggcagagaatggtatggttcctgattttatcggttataataaggcacgtaacaattggcgcgactccaaacctcctgtagcatcatggggagccatgaatgtctataaggttacaggagacaaagcgttcttggacgaaatatttgataaattgtataagttccatcaatggtggtatgctgagcgtgaccacgatcacaatggcatttgcgaatatggttctactgatggtacactgattgcggcggcttgggagagcggcatggataacggtgtgcgttttgatgacacccagatgctaaagaatgagatggagaaagcttggtcgatggatcaggagaatatttgtttgaattccttcctttatgtagataaactgacactttcggaaatggcttctatcttgggaaagcaggagctttctgaacagttggctaaggaggctgaggtaatcaagctgtatgtacagactaaaatgtatgacagcgagagtggtttcttttatgatattcgtttgaatgaccgtacacctgtcaaggtgatgggggctgaggggtggttgcctttgtgggcaggtattgctaccccggaacaagccgagagtgtgaagaacatcatgatggatgaaaaacatttcaactcttacctgccgctaggtactcttgatgtaagtcatcctgcattgcgtcctactttcggttattggcgtggtccggtttggtttaaccaggtatattttggtataaccggattgaagcgctacggatatgtggaggaagccgacttgctgactcgcaagttcatggcacatgctcaaggactgatgaccgacggaccgattcatgaaaactacaatccactgacaggtgaagtgttgaatgcacccaactttggttggtcttctgctttgattttgcgattgttgttggatcaatgatagtggaagtaaaaatcagtatgcggatactccgaatttattaaaagatatatttatgatgaaaattcgttctatattgacagggattgccatatctttgtcgttggcaggtatggcacaatcccaatatgacggtgctccggtaaacaggagcgctaatgaaacaagcacagacaatgtagaagtgcgtagaaacaaatacccccgttcggataatgattgggagaattttgatgtgcttcatatcaatcgtctgccttcggcggctaattttatgggataccccactaaagaattggcattgcagggtgataaatcacaatctccttacttccaatccttgaacggaacatggaaatttcattttgtaccccgttcggatgaacgaccgatggacttcttccaaaaaggatatgatgtttcaggttgggatgatattaaagttccttccaattgggaacttcaagggttcggctatcctttttatgtaggcagtgggtatggtataaagaagaatccaccattgattgcagtggaaaacagcccggttggctcttatagacgtacttttactattcctgcccattggaataaacgccagattattctttatttcggaggagtggcttctgctttttatgtgtgggtgaatggtgaaaaagtaggttactctcaggattccaaaacaccttcggagtttgatattacgccgtatgtaaaacaaggggagaatgaaatagccgtacaggttttcaagttcagtgacggatactatctggaagatcaggattactggcgttttgccggcatacagcgtgatgtttatgtgtatgcccggtctgaaactcatgtgcgcgactatgaagtggttaccgatcttgacggggaatacaagaatgctgactttcatctttttgtagagttgggcaaagcaggagaaggtaaaataaaaggggctgaagtggaagtaagcctgttggacaaagcaggcaaaagtatctacaatgagcgtaagcgttggaatgctgccggtcgggaacttcattttaaaaaggaagtgagagaacctttgttatggagtgcggagaaaccaaatctgtatagattgctgattgctttgcgtgtaaatggcaaaccggaacaatacatttcccaatacataggtttccgcaaatccgaaatcaaacatgctcaattgctggtaaatggtaaaccggtctatataaaaggagtaaaccgacacgaacacgatccttataacggtcatgtggtagatgaggcgtccatgctgcgtgatattcaattgatgaaagagaataatatcaacagtgtacgaacctctcattatcccaacgatccccgctggtatgaattatgtgatatttatggtatgtatgtggttgatgaggccaatatcgagagccatggcatgggatataagcccgatcaatgcctagctaaccagcccgaatgggagaaagctttcatagaccgcacggaacgtatgttcgagcgtgacaaaaaccatccttgtgtcattatctggtcattgggtaatgaaaccggtgagggatgtaacttcgcggctacctataaatgggtacatgccaatgaccgttcacagcgtcccgtgcattcggaagacggaataaagggaccttataccgatattttctgtccaatgtataaaaagatagatgtattgatcaatcattctctctatcttccgaccaaaccgctgattctatgtgaatatgcccatgctatgggcaacagtgaaggaaatcttcaggattattgggatgtgatagagaaatatccctctttacagggcggacatatctgggactgggtagatcagggcttgtatgcaaagacgccggatggaaaattctattgggcatacggaggtgacctggctccgaaaggtactccaagttctgccaatttctgtatgaacggtctgattgccgccgaccgtaccttgaagccgcatatccatgaagtgaaaaaagtatatcaaaatatagcattctctttattggattatcatgagggatgggtagagttacgtaacaagttcttctttacggatttaagtgatttcaattttacttggaagctggaggggaatggtgaacttctggctaccggaactattgataatgtatccctggctcctcagcagacgggtaagttcaagacttcttttccagccatacaggtaaaacccggtgtggagtatttcttgaatttctatgccagtttgaaaaatgaggatggtctgctgaaagccggaacaaaactggctgatgcccaggtgagtcttccattttatcagccgtttgttgctgaggttcagtcttcatcggtggtagcagatgatgcggcttcgttgttgacacttacagccggtaatctgagcgtaggttttgataaggaaaccggtgccttgacttcttataaagagggaagtacggagctgataaaagaagctttacgtcctaatttctggcgtcctgtgacggataatgatatgggaaatggcatgaataaaaccttgcgtccgtggcgtgatgcggggcgtcaggcaaaactgttgtccatgaaacaaaaggcgttgggtaaagaagcttatgaggttgtttctcattataagttgcctgtaggagagtctgattttatcgttgcctatcatttttcgggaaaagggtatttggatgtgaactgtactttcattccgggtaacgatacattgcctttattgccccggatgggggttagtattacactgaacaagcagtttagtcagatggaatggctgggacgtggtcctcatgagaattatatagaccggaatacttcttcttatgtaggtctgtacaagggaagtgtggccgatcagtatttcccgtatgaccgtccgcaggaaaacggtaataagactgaagtccgttggatgagcctgacagataccgccggacagggattgatggttgtcggacagccttatgtcagcaccagtgcttatctgttccctacagaagatttagatgagccgggccttcgtaaatcgcagcgtcatttatccgatatccagttcaaggatatggtgacatggaacattgacctgaaacagatgggagtgggtggtgataccagttggggggcttatcctcatcagccttatttgattccggctgaacgtatgtcgttctccttccgtttctgtcctgcaaagcagcatggagtatcaggaaaccggcaatatttgaattttaagtaacataggttcgttcaaaaagaaagagggctgataattattgtttacttatttgcggtagcccttttgtgaataatttaaggtcagaagggggatggttcagtgagtgaagtatctctcttaaaaaagcagcttggatagtgaattctatccaagctgtctttttattttttatatttgtcataccggttaatatcccggattctgatattcattagcgttatcaatcaacaataattcggctgtgggaatggggcgcaaatagtgaatgttcttatcgaattttgtgatttgcggattagcttttgtgatacggctttcgaaagcacggaatctcttcaaggtcatccagcggttccattcaccaatcatttcgcgtgcatactcgtccagcaagaaatcctgggtaacttccgaagctgtgatatccatactatggtcatgtcctttacaggcacggttccgaagtgtgttcagtctttcggcagcactttggttgttgcctaatctccagtcaatttcggctgatatcaggtaggtttctcctaaacggtagacaatacagtctgctgaggaataaggtttggaggcatttgaaccggcatataggctaggacaatctgctttcttcagacttgggaaaaacttcagaggactttttgtgtcggcatagttgtcttccaagttgaaaatggcatagcggcaagcgtttctttcggcttgtgtataggtcttacgagataaatagacagccgtatctcctaaagtgatatcataggcagaattaccgaccctgctggtggatagaccgtatctttgtgcatcggcctcgttccacgtatatccgttcttggtactgttcgtagcgttattcacataataagtgtctttgaagaaggctttatagcggccgtctttctctccatataaatcaagcatatacttgctgggttccatatagcagttaccttttgccagtttgggaacttcgtatccgttgatgttcgtagcgtaactgggtgtcatgcccgaaagatagatgcctgaggtattgttattgtatgcttcggagtgtttccatacacggttgaaatagtttccacgaggattataagccgtaatggtagagtggcagacaatgaaaagtgcttcttcgttgtttttattgttgttctcatcaaaaacagcttctacatcatcataaagcttgactcccaacgaaccggcgttctgaatcaggtaatctgccgccgcctttgctttttccaaataggttttgctttcgctgtccgtcagggcggtggtattacccagaccgtctgtataggtggagaaagtgaggcaggctttggcatataaatgataagcggctgcacgtgtcacgtgtccttttacttcctgtgtgataggaagatttttcatggcgaattccagatcttccagaattactttataaaaatcattaaccgaactgcaaggaagaacggaaataggactgttcataggctccaatggcaggtatttgcctccccattgctctacaatattatataaggcatgggcacggataaatcttgcttcgctgaccaactcgttgattcttgtttcgcttagcccttccactttgtcggcataatggacagctgcattacatgcactcaatataccatagaaacccgcatatccttcattcaacataccgttggaagcaccgtaatcttcataacggagtagtttgctccagttaccgttggtaccatcgggattcgtatcttgccaaatgtctgttccaccttctgcaaccattagataggtgtcttctgcctgaccataaactatgcggaccaggtcaaagtaacagtcgttcactttcttttcatagcctgccggggtagaccattcttgttctgtggagatgccggagggattaaattcatccaggctgcaaccgtaggcagacaacatcatgattacggctgatatagagagtaatttatgttttttcatctgtataagtttttagaatgagatattaacgccaaatacatattgtttagacaacggtgcgtcgtcatcatttcctcccttttcggggtcgtagtttttcaaatagtcacattttgtaaaaataaacggattgtttgcagtaaagtatacacgtattctgtcaatttttacagcattcaaccatttcttggggaatgtgtagcccagtgaaatggtttttactttcagataagaaccgtcaaaatagttagcccattgttgatacgggtcctgtccgtttgtaatacttgcatccggacgaggatagcgggcactttgattttcaggagtccagtagtcacatacggtaggtgaaggcgtcagaccgtctgtacgataccatccggtcagaccgtaagggattgtccagtcccaccgggcaatcaacaaaatgctcaggtcgaaattcttataattaaaattattaagtaaactgcccgaccatttcggtgtggcgcttcctagaacataatagtcatccgcattcagcttgtaatcgggagtaccattttctgcaatatgaacttgtccgggtttctgactgtatttggctgcttcttctgcttcggctgtaccccatattccggcatacttgtatccgtaataagtcttgattgcctcaccgggaatcaggtagtagtctccgaactgaagcgggccttcgctggttgtttttatcacttcttctttgttggttgagaatgccagtgtggtgctccattggaattcaggtccgacaaagttacggctggtaatgcttaattccacacctgtattgcgtgtttcgcctacattagaccatattttgaaaggagaggagccgtaacctcccgttgcatagggcaggtttttctcgaataaaatatctttggtgtctgtccgataccagtcgaacgccacgttcagtctgtcactgaataatcccaagtcgaatcccaaatctgtcatataagatttttcccatcccagactcttgttggcgatggattgggaataaccgctataagggactcctacatcttgaaatccgataatgcctgtgcggctgtaatctaatgtggcgtattctgaagcaccggcattaccggtgacaccgtaactggcgcgtaatttcagattggaaacagcttttacattctgcatgaagggttcatcactgatgcgccaggcaatagctcctgcggggaacatatcccacttgtttccatctgccaagatggatgaaccgtcccagcggctgcttaatgtcaataggtaacgtcctttatagctatagttgatacgggcgacataggacattttttggctacctacataagaagaagaaactgtgggtgtaccggttgcagcacctaaattatggtatagataagaatccgtatcaaatttgttggcagtggcggtcgctttttctttttggtcttttgaccattcagtgactccggttattgtgaaatcgtgatcctcttttattttgaagttatatgtcaggatattctgccatttataattataagtgaaggtgttggggatagtggcttgcactagcccgctttccagtccctgatatgattttgtgccggtatacttactttctttcatattccggaaatatccgccaagcagactcttgaatgaaagtccctttaacggggtcaattctacataaatctgtggggctacgctcaatgtctttacattatttacatattggtcttctcccatatcggccagcggattcatgttgccgtctcccaacgggtagtctaccagattgccgtcttcatcataaggagtacccaatggcggcatacagagaatacggttccatatacggctgtaacgcttgtcattttcagaatacatggcatataggtttagtccgtattttaccatttcattggctttaaaatctattttggcacgtgccgagtagcgttccagttcgtctcctttcaataatccttccaaattgtaatatcctaaagaaaaataagaggtgacccggtcattagaataagatgtgcttagattgtagctattggtgataccggtttgtgaagctaaatcaaaccagtccacccattgattgttgtctatatatttttgcatatagctgggaaaaagattcccgtcatcggccgggctgttccaggcacctaccgttctttgtgcttctctgcggaaattaatgtaatcctctccacgatttacttcggggaagctggagatgacattccaaccatagtaggcatccagatcaatggagaatttatcttttttaggagttttggtggtgatgatgataactccatttgctccggcagcaccataaacagctgtagaggaggcatctttcagtacttcaatagaagcgatatcattcggattcaattcatcgtaagagccttccattccgtcaatgatgaataacgggctattgtcaccattgatggagcgtgtgccacgtagggtcatgttcactccggaaccggcttctccgctactgcgagtgatatccaaacctgccacctgtccttgaatagcttctagtacattgctggttggcattcggacaatatcctcactttttacggaagcaacagctccagtcaaatctcttttttttacagtaccgtatcctatcaccaccacttcatccaatgtctgggtatcaggctgcattttgatattcaattgtgtgtttttgccaatggttatttcctgggttttatatcctatataggatatttcgagaacattttttccggcaggaacttccagtgcataattcccgtcaaaatccgtgatggttcctatggtgcttgcacctttgattatgacggataccccgattaaaggttcattgttctcatcaataatttgacctttgatggtacgtccttgcaggatcgattgaaccgattcatttttcactatgttacttgactttgcatgcgaataggcaaccggtatgcataggactattgacaatcctaaaataaggggactacgcataaggctgctttcccggttttgttttggatttttcttcatgtttttcatttttgcttctttattaattcactatttgtttttaaaggttgattgttatatcaagttgttgaatcagtttggtttcaatcgtaaacttattatgttagattaatcttttgttttctttctttttttcatgtttctgccttttaatactttggagatttgtttgtgttttttgttttatttctttattcttgctattttatgattttatatttataaatattaaaattatttctttattttatttttagtgcactgtttgtgttataattatcttgtaggtgcaaaaatatacgaaaggaatcgaagataaaagtgaatatgctatgttgttgaacatatctatatcaaattctattttattgttttattatagctgaaatctggtgttggaaatattaagataaaaaagtccccggataagaacgcctttcttatccggggacttttttaaatattataagatgtattctttatcggtttttatacattctttcataatacttttggtaatcgccacttgttacattttccacccatgcttgattttccagataccattggattgtttttacaataccggtttcgaattttgtttcaggataccatcctaattcattagtgattttggtaggatcgatagcataacgttggtcatgtcccaaacggtctttgacaaaggtgattaatgattcgttaatccagtcgatagaaatctcacctttatcgttcaactcttttttcttcaagattttgcgatattcgggagtttccgtcatcatccggtgaatagtggctatggtaagttttactatctctatgttttctttctcattgtgtccgcctacattatatacttccccttcgcgacccttgcgcagaaccaaatcgatggctttgcaatggtcttctacatataaccagtctcgtacattctttccgtcaccatatacgggaagtttctttccttccaaaatgtttttaatgatcagcggaatcagtttttcaggaaaatggtacggaccgtaattattggaacagcgggtaatggttaccggcattttgtaagtatcacgataagccatgacaatcatatcagcgcttgtcttggaggcactatatgggctgtgcggacataaaggagttgtttcagtaaagaaaccttctgctcccaggctgccgtatacctcatctgtagatacctggtggtaacgtacatctttacgccaggtaggataaccattctcatcttttcccgtcacccaggcacggcgggccgcatccagcaggttttgggttcccaaaatattagtttgcagaaacaattgtgggttttcaatactgcggtctacatggctttctgctgcaaaattcacgatgtagtcaaacttgtattctgagaatagttggtctgccaaatcacggtcgcatatatctccttttacgaagaaacaacgttcattatcaatgtctgatgcaatagttcccagattgccggcataagtcaaggcatccagtaccaccaccctgatgtcgtcatgtttggccaggatgtattttaaatagttggctccgataaatccggcagctcctgtaacgagataagtcttcatattgtttttgatattagtgcgtgcaaagttcggaaagattttttaatcttacaacttatccgctagttctattacttctaaatctttaaattctccattatcgatacaaaaacgtaccaatgttctcactttatgaaatccggaaatacctgctgctcccgggttgatgtgtaacatatccagtgtcttgtcatatttcacctttaatatatgcgaatgtccgctgataaaaagctggggaggtttcaccagcaggctgccgcggatggaaggatcatagttgcccggatatccgcctatatgctttatcaacacctcggcaccatctacggtgaagcggttggtttgaggataaagtctgcgtatgtcctgcccgtcaatatttccatatacagcccggaaggggcggaaagcggacagtttccgggcgacttccaccgagccgatgtctccggcgtgccatatttcatcacaattctcaaagtatttcaagtatttgtcatcccaaaatgcatgagtatccgataataatccgattcttgtcatagtttttttgtttattatcgacaaaggtactatatttggaacaaatctaagcataatatggagagcaaatatcattatttcaagcgtgatatcagttggttgtctttcaactatcgcgtgttgttggaggcggatgacgactcccttccgttgtatgaacggattaactttatctctatatattcttctaatctggaggaattctacaagattcgtgtagcggaacataaagccatcgcttccggtggccaaagtgatgatatgacacaggaagaagccagacacctgatacatcagataaccgaagctgtcaatagccagatggaagaccgtatccgcatttatgagcataagattgttccggctttgcgcaggcatcatattattttttatcaaagtaaacaggaggtagagccttttcatcaggagtttatcagtaatttctttaaggaagaaatttttccctatcttcaacctgttccggtatgcaagaatcgaatcaagacttttttacgtgacaaccgtttgtatctgtcggtacgcgtgacgcgcaaagacacgggggaaaaggaatactatattatcaaattgccttatagcaaagttccccgtttcatagaacttccccgacagggagaaaacttttacctgatgtatatggaagatattataaaggcgaatatcaaccgtatgtttccgggctatgatttggattgcagttattgttgcaagatatctcgtgacgccgatattttcgtggatgatgcaaccagttccgaagtaatggtggaacagttgcgtaaaaaggtgaaaaagcgtaaaataggtgctgtatgccgttttgtgtatgaccgaaagatgcctgcggattatctggagtttctggtcgatgcatttggcatcaatcgtgatgatttggttccgggagacaaacacttgaacttggaggatttggctcatctgcctaatcccagtaaggaactttgtacccaattgaaacctcgtcccatgacattgaattgtttggatgagaaagaatccatattccgttatgtgagcaagaaggatttgatgttgcatttcccttatcattcttttgaacatttcatccatttcctgtatgaggccgttcatgatccgtcctgtaaggagatcatgattacccaatatagggtggcggaaaactcggttgttatcaatacgctgattgctgctgcgcagaatggtaaaaaagtaactgtttttgtagaacttaaggcccgttttgacgaagaaaacaatttggctaccgccgagatgatgaagcgggcggggatacatattattttcagtataccgggattgaaagtgcatgccaaggtggcacttgtactgcggtataacaaagagggaaaacagactcgcagctatgcttatatcagtaccggaaatttcaatgagaagactgcccggatatatgctgattccggtttgttcacttccaacgagattattgtgaatgatctgtatactttattccgggtattacagaaagaagtgactgaacccaaattcaagcgtttgttggtagcccgttttaatctgctgccggaactgagaagacgtatcggatatgagataaatatggcaaaggcgggaaaagaagcgcggattatcttgaaaatgaatgcgctgcaagatcctgccatgatagatgaattatataaggctagtgaggcaggagtgaaaatagacttgatagtacgtggtatctgctgcttgattcccaatcagccttatagcagaaatatccgtatcactcgcattgtggacagctttttggaacatgcccgggtgtggtatttccaccatggaggaaaaccgcttctgttcatgggttcgccggactggatgaggcgcaacctgtaccggcgtatagaggccgttacccccattcttgacgaagatctgaaacaacaactgatagatatgctggctattcagttgaaagataacagaaaagccggttgggtggatgaaaatctgaataatgtgttgaaaaggaatccggaagaagaaccggtacgggcgcaatatgctttttatgaatacttgaaggggaagaataaatgaagaatatgaaataacatattttatcttatttgaaatgattatccgcaatcataccaccggatgataaatgggagttaatggatggaacgcggatttatttcgttctataaattaaaattggaacacaaatgatacaaattaataacagtacagcatgggtataaacctgccggaggttagatttgtgtcatttgcgttccggtttaaccgataaataattgatattgttatgaaaaaattatatataactttctgcctcttactggtttctctttgcatacatgcacagatgattagtggaataatagtggatgaaaaaaacagccgctagagtttgccaatatagtgttgttttctttgcctgattttacttttttacaaggtactatcagtgatcaaaccggagcttttaatataaaatcaaatgaaacaaaaggagtattaccaatttcttcagttggctattccactattctcctaccttgcactagttcaaatatgggaacaatacaactatattcagatgcgcaactattatactctcgtccatattatgctcagttgcgaagtaatgtaatgtatattaatcggtatacatatgagggtggtaatccttttttattaccttctttatctcataatataactttaggaacaacttataaatgggtatacttatcagccggatatcaatatgttaaagatgcgattatttcttttagtggagcttattcagaagatgatcctacgattgctttaattaatatgattaatgcaccagactatgataagatttttgcctcgctggttttatcacctactatggggctttggtctccacagaacaaaagaatcgtatgtaataaaaaacttagtttgacggctaaggggttcaatctgcccctatggaataattggacttggcttactccattcatttccgtcttagctgtgttaccatttccctgaaccagggataatttagccagatatattcataccagcggttcagtcttcttttccatttcctactccacggatacaactcccaccattttagttgaaaatccgttttctgcataaattcgtgggtgggaaacagagtaagagttattcctcttatccataatgttttcatttggttttcccaatattgcatagggccgaatcccggctcccaaataatgaagcggccttcatgaatgccataacaaaccacatatcccggtacttcgaaatcattgatggcaaaaagtatggcaggaaattttctggtggacaattgttccatgttttgcaagcagatttccgcttccattcctgcacgtatagctgcctgtttcatacccatcaacgtatattttccatctactttacaccattcggctagtgtgcgtgcatcttgttgaccgccatagtatttcatgacagtgagcagacaggccacttccatgggacattcgtcactggaacggacaaatgatttttttattctgtcaagttcgtcttcagtcataacttaatttatttttcatggcaggagcaaaacagcaacgcggatcgggaaaatcccaacaatcctttccataagcttttatgatatcactccagcaacggttctgataactgaaacagtcttcaaaaagacggcattccctgcatggactctctttgttgatatcctgacgtgacaaggaacaaaggtgcaaggcttgaggggaatgccagacttctttcagactttgtgtggttacattccctatgataaattgtggatgccagtaaagttgctcgcatacagtcactttaccatcaggcaatataaacatatgagtggtcaatgcagagcattcgcttcctttgaaacaccggcttccaccccaggtatcttgatagtttttatcggttacttctttccctaaaatcacgggaaaggaaacctgtgtgagaagagggcgtatttggttgaatacctttgtaatttgcgctttagtaggtttcaaatgcgaaaatacattatactctttgtatatggaattactggcggggataatacgccagtcgcgtatatgcttcagatgagataattcatgcagtaattccgccaagacattcacttggcaattgtagttggtcagcacagatgaaatctgataattcagtccgctgtcatccagtaattgcaggccgtgaagcatctctttggcataattcccgtttactcccagcgaggcagtcagtatttcggaatgaatggcatccagtgaaatttgaacaattccctgataccctgtttcctgtacatcttgcaacagtttttgggttacaggcattttggtcgatatgaattcgggggcaataccccgttttaccaattcttttaatatgattttccagtctttatgcaggaatatttcaccacctatcagatttacttgttgtacttgcaggtctgaagcttccttgatcagctccatcatgcgttgggtggtgagtggggattttatttgcgttgatgtatctgcatagcaatacttacaatgcgtgacacattggttggtcagcatgaatgtgaggagcaacggaccggaatacagccttcttgtagtaagatccagttttttccagacaaaagaatttgcttgcagccggtcaaaacgcaatgctttgcctgccttttccgcttcaatcaatatacgtttgggaaaataaatttctccctgctgggaggaggtataaatgggggtcggattatcaatgaagtccgatacccatttgatcatctcctccttgctccggcagaagaagtcgcacagcagagggagagttgtctgcaaaggtctgtcatacgtgaaaaaactcagcatgacagcttgcagcgggtgaataaaagtatgccagttccgggagcagtcggtatctgtccccgcactggagaataatgcgaccctgtgaatatcatgtctcagatgataatgagggttcagcacatatactttattcatttccggcattctcatcttgtgtttttgtaggattggtaaatccgcctgtatagcatcccaagccacatttggccacttcattgtcatctataccgccttgtacgtccatcagttcgttcaagtccagcacttgttcttcatcttcggaatagcgggtgtattccggttgcttgttgtcggggtcttcttttttcatattcttctttgtttaagttggttattctctgtagtgaaaaaaacggtgttactccgtggtggaaaacaattcatacacgggtgcgaaaatcctgctcagtatgctccggctcgaagtgatgatctccgcccggccggacatgtctatttcatattttatttcctttctgttggttgtcaccagtccgtccggaaagtccacttccacggcataacttttattgtaaggcacaaaagagacggaggcgattcttcccggcagtacgccatacgagtgggtggggtatttgttcagttcgatatttactttgtcacccacggcaatttccgccacttcgtcttgtgaaagagtgatgtgcccgaggggattcccctgttgcttggagataacggtgcacagggtgtctccttcatttacccgggcgctcatgccccatgtctttccccataccactatgccgtcgtgatggcttttgatgaggtacttcttgtcccacgtgcggaggctgttcaccatgttttcgtaagccagttccagcatccggaggtttttggcagtctccatccggtggtttatatccagttcaaagagttcgcgtttcacattcagcaccgccatggcatctgccttaccggtactttccagtatccggagttcttcatccaggtattttttcttctgcggatagatatcaaactcctgatacatcacgcacgtacgcacggcttgggtgaactgttcgtaggcggaagacatttcacccatgatgaggtcaaagggatagtcttgcaggtacttgatgtcgttggtgcggtagtaccattctattttggtcagtacgcggcaaaatgtttgtacgtcttccagtagggcagtatttttcagtatgcccagcgtgtcgttcttttgtacaggtgattggttttccacaaaaaagcggtctatcattcctgcctgattggcagtgatccattccgcacttcccaagtcatcaatggttatcgtttttcttattgtgtcaggatacttaaataatgccgtgcctgcaataagaaaaacaatcagtccatatacgatgtagcttcccgtatggatcaaccattcgggcatatctcccagcatatcattgttttcgcggctatatacttctaccttttccggtccgtccgtattaggtttatagatttcctccataccttattgctattattttttaattctcaattctcatttttaaatttcctaagcgctcagttccagctgattcttcaccagcctgtagtaatcgccctgccgggcaatgagttcttcgtgcgtgccccgttccgttatctccccttctttcagtaccactatctggtcggcattctttacggtgctcaggcggtgcgccacgatgaccaccgttttgtccttgaagaatctctccagattttcctgtatcactttctcattgtccgtatcgagcgcattcgtcgcttcatcaaaaaacaggtaatcgggattacggtaaatggcgcgcgctatcaggatgcgctgcttctgcccttggctcaatccttgccccgtgttacctattttggtgttatactttaaaggcaaggattcgatgaactcacgtatatttgccatctctacggcatacagcaggcgttctttgtctatcatgctgccatccggcgctatgttgttggcaatggtatcgccgaatatgaatccctcctgcatcactactccacaatgtttgcgccactccttgaaactgattttttgtagcgactgattgcctatcatcaccgctcctccggtgggaggatagaatccgagcatcagttttatcagcgttgttttcccactgccgctgaggcccacgatggcggtagtctttccggctggtatgtccagcgatagccctttgatgatgcgtttcgatttttctgatccgtaagtaaagactacattttgcaattgaatcgggtctttgcctgatatttgggtatcctggtccatgccttctgtctcttcatcgggcttgccatgtatttctccgagacgttccaggctgagctgcgcgtcctgcgtgtcctgcatgaaggaaacgaattggctgataggcccttgcatctgtccgatgatgtactgtatggaaagcatcacacccagcgtgatgcttccatgtagtacggcggtggcagagagaactgttatcagtacgtttttcacttcgttgataagtacggctcccacctgctgccactgccccaggttgagtgaactcatattaatgcggaagagagaagcttgtatgttttcccattcccagcgtttttgctgttcgcagcccagcagcttgatgtcctgcataccgtagatgagttgcatcaaattattctgattgacggacatctgttcaaagttcttcctgttcaagtcggcccgcttgcgcatgaacagctttacccaacccatataggctgcgctgaacagaatgaaaatgaggaatattttccagctgtatatggccagcacgataccgaagatgactaccgtgagggtagagaacaaaatattgagcacggactgggtgaggaaactctcgatgcggttgtggtcttcgatgcggcgtatcaagtcgcctgccagtttgctgtcaaagaacctcatgggcagccgcatcagcttggagaggaaatccgagatgagcgacacgttgacgcgcgtactgatgtggagcagtatacagcgccggatcacctcaataagtgtgcggctgaataccagcatgagttgtgcgaccaaaatgagctgtataaaattcagattcctgtgccctatgccttggtctacaatggtttgggtgagaaaagggaagaccagttgcagcaaactgccggccagcaggccgatgatgagctgtatcatcgcctttttgtagggacgtacatagtgaaacagataccataatgacagcttttcatattttatgggttccgcttcataaaattgcggggtaacatccagcaagagggcaattcctttttctattccgccttgtgtggtactgatccagcattttttcaactcctgttcctcatatttcagcaatccgtaggcagggtcggcaatgtagaaccaagttttgccccttttcttttctattttatagaggaccacgaaatgttcctggttccagtggatgatgcatggcagttttgactgttgtttcagtttttccattgaagtgcgtataccggtggcgcgcagccctatgctggctgccgcttcactgatacctagcaagttaactcccgtgcgctgtatgtatgattgctcgcgtaactgctgtacggagaatgtctttccataatatttggctatcattctcaggcaggaggggccgcagtccatgccgtccaactgtttgtagaatggaaatttgctcataattgtcttttttgttttactctgtttatcagccagtcggctatttcgttcatcctttcactttcgctctcaaagaaggcgcacaggtgtttttgccgttctatgatgtattcccggtttgccagtagatcaatgatctgcctgtccagtttcacgggggtaattttttttatttcctgtggcgtgaactctgccatgggcacatgggcaaaggtgcattccgtccagtgggttattcctccggtgataagcgccatgtcgcacaagggcaacagggcttgcaggcggggcaggcggtaaatggctatattgggcggtaatgaaaacaaccgggtttccacctctccatgattggtcagcaggatgaattgatattgcggatggatgctcgcactctgctttatggctttgtagaatgattccgtatgtgagggggtgttcacttttctttcttcttcctcgtcttccagcaagcctataataacagtgcgtgaacggtcttcttttatttccgtcagtttgtcgatgaaatcgtcgtcttttgcaccttgcggcagcaatttataaggaataggcggcagggtgacgacgggcatttccggcattaggtctatctttctgtcggttttgtttatggctataaacagatagtttatgtcatattcattatagacttgctgcttatcttgcagttgatagtccagcaatgccaaatgtggcgtaaaccatcggaaatcatgtggataaatgatgcgtcctattcctttccgcagcaaaccggtagtgaaaacggagtcggaggtatcggtataatagaccttgtttccccgttcactaatcaggtatgccagtcgggtggtgggacatacatttcctgcatccggttttatatcaaaaagaaattcaaacatgccccgtttttctcatcacatttcaattcgtattatcctactactttaaagcctaatgacgtatatagatttttgccatcataataatatgttcctaagaatttatcgaaaaggatgcacacttccagttcatcgcgcatataggcaatgtactcaaagagagtggaacgtgacatatccatctttgctgcaaattccttggatgtgcctgtgcacttgtgccggataagaaaatccatatagaggattttcttaaggtctactcgtttcatggtctttgtagttttttaggatgaataattagggttatcttttaaaagctccaaccaagtatttcccatcttcactagttagttctaatgtatattctccggatgggaaactggctatggaaatgataatatagcttgtttgtgcttggggcactaactgttcatacatcacttctcctgtttgattaccggtgatggtaatttgtatgtcacagtccggagatgtgttttcaatgtagatgttctggccatcggtgcaggctgtgatgggaatagatggcaggcttcgtgtattaactttttcttgattgctataccacttcccatttataataatttctgtactattacaaaaagaatacactttctgcaccgataaaccactaagcaatatggtgaataataccatacgcaaactccaaatctttaattctttagttgttttcataataatattattgattgattgttatgctgcaaagttatggatttagaatgaaaaacagatagaccggatatgtacgttatatggacaattaaaaaagagataatatgctaataattagaatattacctctttgtgcgaatgcggaatgtggacagttgcttccctagaactcccatagccacagatccagtgtctgtcctttgtcgaatgctcctatcttttgagtgatacgttctttcaatcttaattttcttttagataccgaagtcgattctatccccagcaaatcagctattcccggattggctattcccaacttgatgaagcagcatatctgcaaatcgctttctgtcaatgaaggtacaagagtggaaagccttactatataattatcgaataatagattcattgtttcctttacctcttcccattgctcgtctttcatgtattggggctttgtctttagccggtaaaggacatctgtcttttttatcagttggttgcacaggaatctttcacgatcatgcaatcgttggttttcttctcctaaaagtcccaatctttcaagttctttggacttttcattcagcgaagaagaatatttatcaatatgttgctgcaacattttattctcttgttgcagggcttcattttggcattttatttcagatagtacattcttttgctcctccaactgttcctgcgcatctttattcgcctccatttgttctgccagttccttcatgcggctttggttacgactgattattctctcattctcttgtctttttaaggtattcagctgtatttcttcttcatgtctttgtatgatatgctctttacggattaattttcgctggtatatatagataaggatagctatcaggcagaataccactaccaatatgattagtacattacggatgatagtattattttctatttttagctggttcttttcattcaatagtttttgctggttatacttttcctgcatattcataagctctttatttttatgcaatttccagacagaatcttgataaactaccatactatcgcaatataggctcattttttcatagtcttttttctctttgcttagattatataaaatttcataagttgcacaaatcgtttccatgcgattggaggataatgttttattcagataataataggcagaatctgttttattaatgcgtctatatatgtcaccaattaccaagtaactttgttctagccttttttttaggggtaattcgcttgtttctttaagtattaaagctttttgggcataggatagggcaggttgataatcttttgtttcggtatatactcctgctaattcgttcattccatttattaatataccattattatgtagagtttctgccatttgtatagcttctttataatatttgatgctattatcaaaatcaaataatacggaatatacttttcccaaatcataatatgcagaacatatataattcttattttcggatagcttcgcatagtgcaatgactgtttaaacatttgcaatgcatattcattcagcgaattatataggtatatatttcctatactgctataaatcaaatgtgccagttgatagtctttcgtcttttctacttcttctattgcttttaaataggattcttgtgcttcattctttttatcagctttttcatataatacacctttataataaagtaccattgctttccgttggggattgttttgcttcataaagtaatcataggctatattaattaaggtagagtcagcaagttcttctttataattcttatacttggcttgcactgttagcaacgcccaagtagcattttgcaatttgtccgatgatgccggaactttcatcccttgcaatacacccagtgcactattcggatgttcatacatcaccgcttccgcttgaaccaattcaagcaacaacgcttgttgagaagcattttctttttttgtgcaggcagaaaggagtatacttattattataataataaagtttctttttattccaattgtttttttcatagtatttgcatttatgtatagcgaacaaatatagaaattaaaaacgatattgaaaagattttatatcactatttacaaaaaaagagtgattgattatagtttgcatccagtgttgatagaagtattatggatcttaaatattcaatttagtaaggaggcatgccctccttactattttatgtataaaaacggctgtattatgtatatctatttgaatccacaatatgtgattagaaacgaaaataattgttcttatatcattgctaaatcagctttaattactgctaagctagaatatgccatggcttttgcaagcgtagttccaccttctattggatatatcttgtcacatattggagaaggagaattaaatgcttcaatagaaaatatagcaaataccctaaatataaaaccagacctgatagataagtttattcgaaaaataatcgataatccagtaaaagtaggatggaattataaaggagtgacgatttcttttcccccgtatctgctgacttctgttaaggaagaatcggagggaagtgtttatacggataatgaattattttatactacagactttatacctaaacgtccttctgttccgctgaatcttaactttatgattacaacccaatgcaggacggattgtatgtattgctatgcggatagaaacaggaagaacgatttgacaagttggcaaattataaaggtgatagatgaagctcatgatatggggggggatctggctttgacaggaggtgatatttttgctttccctgattggaaagaggtgatacgaaaagtggggcaatatggattcacacctttattgagtacaaaaataccgctaaaagaggatgatatttactttttaaaagagtctggaattaaattcttgcagttttcattggattctatatttacctctacattacagacaatggtacgtgtaaaagaagactatatagataatgtgaagcaaatgtttgagtattcttaatccaatctgtggtcagattgataagaaaattataattcgcaaataaaaatgaggattaaacttataaatatttgtaacaaatgattgaagcaagagcattagtttctattaattttctgaatttgtcagaaaactatgattttatgtcacgttggttaggtgtatatgataaatatgcaaagctattgaaaggttcgtcggatgcagttgtaaaagacggatctggaaagatacctgaatcagcaaacgataaagtggatttaaccaacaagcatttggcattacaggctatattagctgaatatggtcaaaagttaaataaaagccatctttattctgaaacagtcggtctgtccgaagcccatgatattcgtcgcaaatgtttcagcgcattacagatgaacatcaagagcaagagatataggaacaaaagaagatcaagatgctgcaaaaagccttattgatcagactggaaattataaaatgaataagataattacccgttccgatatgtctgcccgtattgcaggttacattttgattctgcaatcagagaaaaaccatgattcagtagaacgactgaatctggctgatcgcatcactgaagtggaaaaggcaaataatctttatttggacttagatacacagcgtggtattgtgaaagaacagaaaggtctttcggctactagtctgcataagaactgtaatggattattgaatcagctatattcattggtaaatgatatgttcttttattatgataatgaactgtttattgcctttgccgatgaactgaatgctgtggctgaatcttatcaattggttatcaataactaaggtgcggcaatgaattgatctgctacttgtataagtgattctataagactgccttaaataaaagtgtggttacttttatttaaggcagtttttctatgagaatacgaaagaatgttaaatgaaaatcttttttttgttcagtccggaggtgtcggactgtgggagattacatttgcaatatcaaaacaaacccttattgtttaaccatttaaaataaattcattatgaaagagaacaatgaaaacaaggctaaagccttggaggaaaacaaaaagaattattcttctgaaaattcaactcctcaaaatggagaagatattattagtaatgaagatgctgaaaagctggaaggcggtattaagcatgaagatcttgaaagaccatctgaaggttctcttggtggaatcatctgctgcaatggttaatgatttgtttcagatcaatctaaaaagattagtctgaagtagaaggtacttagcgataagtaccttctttatcttaatttttatatctgaatatatgataaatacttaccattataaatagattcttatgattataaatgatttaactacaaaatatacattagcaaataattggatattaagaacagatccatattatgaatctagaaaatattctgtttatgatattacttctcgtttaaccttgtatgtgacaagatcatgttatactcttttgaaaatatttcatgataaggctttgtctttttcaagtttgtatgaagctattgagcaaaagaatattaaaatagattgggaagggttttggaatctttgcaaggaggtagaacctttaaattttttagttccttcggaatttccattacataagggagatggtttccctaatggagatggagtttgtggttatgatgttcctattacatctactcctttaactgctgaattgcattttacacataattgtaatttaagatgcaaacattgtttccaaggttcttctcctaatagtagtcgatacaaagaacttggggtttctgactggattggcatttttgaacagtttgaggattgcagaatgcataatgtgacacttacagggggtgaaatcatgttttatccacatttttctgaggtctttaataatattgtcgataaaaggattaattatagagtactaactaatggtacattaataaatagtagtaatgttgaggcattatctagaaaaaatgtatcattaactatatctttagatgggcactcggataagcagcatgaccagctgagaggaaaaggagtctttaataaagttgtaaaaaacattgaacttttggtcgctcatggtgcaaaagtttccttaacatacactattaattcaaataattatctttatttacaagaagctgtaaagttagcaatttctttgggagtaaaaggtatcttctttggatttacagatagaataggcagagcaaacgagaatttgactttaatattgtcacgctctcaacgtgaaattgtaaaacacaattttgctcaattagaggaagaatatggtcatcttctgagtttgtctttagtagaagttgctactttggaacgctatcatgaatttgttaacaacaaagtttattgttctgccggaacaacgcatattggcgttagttcggatggaaaattatatccatgtatttatgcttttgggcatgaagaattgcttataggagatcttatgaaagaaaatttgaaagaactttgggaaaatagagataaatggagaatgttccgaggaggatttagtttggaaaatatagacacttgttctacttgtacattaaacaaaaagtgttcactgatgacttgtcgtctaaggaattatgatcaaggtaatagcttctataataaaccgatagaatgtgccgttgattattctatagctttgtaatataatgtgtttttgaaactttaaaaatatagaatatgagagcgaatatacttttttgtttatacttctttatggggttggcagtgcagctgcaagcacaggttacggtaacaggtaaagtaattgatgagcaacaacaacctgtcccttatgccaatatagtgttactttctttgcccgattctgctttcgtggcaggaagtatcagtaatgaagaaggcgcgtttagtctcaatgtcaaagaaacaaaggatgtgcttcgcatctcatctattggctatgctactgtttatcgtccattagataacagaagtacagatcttggaattatctgtctcgcttcagacacacagatattggctgaagttgtggtaaaagctgatatgcctgttactcgcatgagaggcgacgcactggtgactaatatacaaaatagtgtactctctaaagccggatcagcaagcgatgtattgggaaaagtaccgggtgtaataaaagagaggaattcctatgaagtgcttggcaaaggaacacctcttatttacatcaatgggcggcaagtacgtgatgattcggaattggatcaactaaattcggaagatattaagagcgtagaagttgttactaatcctggtgcacgttatgatgcaactgtaactgccgttatccgtatacagactatccggcgtgccggagatggtttcggcttcgatctccgttccagttactatcagagccggaatgtagacttgatagagcaattgaatgtaaactaccgccataatggacttgatatttttggtatattccgttatttaaagaacgaatatatcatgaaaaatgatattgtacataccttggagtctgattctttatggaaatatcagaatttattggatggaactgtagtagacaagtctttacgaggtgaaataggagctaattacagcctgaatgataaacattcactgggattccgctatactcttacttcccgtccaaatacgaagtcggatgtatttacctctaatgatattacagccaacaatcagttttatgaccacttggaaaatcaagagtattcttctacttccggtaagcctactcatcaactaaatgtttattataatggtactgtgggagatttgaatattgattttaatacagactattatactaatacttctacaggaaaaggtctttatcacgaagtcagccaagagcaggagagtcgtgatgtgcatacactgagttacatcagaaataaattgttagcttctaaattggtactctcttatccgttgtttggaggtaatctttcgttgggtggagaatatacagatactcgtcgcaatgacgaataccgtaatccggagaaatatgtggaaagtaccatcagtcgtgtagaggaagatggattgagtggctttgccgaatatagccgtcagttcccgataggtaacctttcattgggtgtaagatatgagcatgtaacttttgattattataaggatggtgtgcacatggatgaacagagccgtatgtatggaaactggtttcctaatctttctttttcaagaaaactaggttctgtccggacacagttgagttatactgctaaaacgcaacgacctacttatagccagttaagcaacaatgtcacctatgtagaccgtttcactatgcaacgtggtaacccattgctggagccgtgcaccattcacgatatttcattggtcggtacatggcgttttttacagttacttgtcagctatcagcagtggcgtaaggaaatcatttattggggagatccgatagataatggcaattcaatgatgatgacttacctcaattatcataatcgtccgactttgaatgtttctttctctatttcaccggctattggcttttggcatcctaacctaaatatcggcgtgaagaaacaatggatgacaatagatggcatagagtttaataagcctcgtcctacaataaggttcaacaatacatttgaacttcctggtgattttcttgtcagtttggatgggctttttatgggaaaaggaaattatcagaatttgtatcagttcaaaaattatggtacagttgacatctctgtccgtaagtcatttttaagggatgccttaagtctggaacttcgagggaacgatctttttcatggttcacgtaattattggcaaacatattttggcagtattatttgggagcagactaatcaatgggatactcgtgaattttctattactttgcgctataagtttaatacaacaaagagcaagtataaagggacaggagcggcaaatgatgagctaagacgtttgtgataatttcaaaaaaataaaaagtatagaacatgaggaaagtgattttactactcggattagtgttacaagtgattattgttgacgcacagagtgtttccggctcattagttgatgaaaaaggaaatcctgtcagttttgctaatgtggtattgctatcttccaaagattcatcttttgtgcaaggtacaattagcaatgaacaaggaattttcagcatagaccaaacaagcggtaacaatatactcagaatttcttgtcttggctttattccggtgacaaaagcctatgctcaatttccggtaacgattgtgatgcatgaagatgttaatctgttgggggaagtcgtggtaaaggggaatcgcccgtcatataaacttactgctgaagggttgcagacccatgtgcaaggaacagtgcttagcaaaatgggtacggcggaggatgtgttgaagcatataccgggacttcagaagaaaaatgatgcgtatgaggtatttggaaaagggagcccgataatctatgtgaatggaagattgctgcgtgatttgtcggaactggaccagctgaagtcagaagatattaagaatgtagaactgattaccagccccggtgcaagatatgatgcgtctgtgaaagcagtggtgaagattactacccgccccataaaaggggaaggatttggatttgatgtgcgttccggttataatcagtgggagtatgccggtttcgtggaacagttgaactggaattaccggcgtgataaattggatgtgttcggcaccgtgtattatagaaaaagtgaagggtttgacgaaagccggtttactcaagatgtgcatgttgatacgctttggcatcaggacaattatcagttcgcaaaaacgaatcaacaggcatttaccaatatcgcaggtgtgaactatgcattcgatgaaaataattcaatcggagtaaaatatacattgaaagccaatccggatgcccgctatcacactatatttaattcggatgtatatgccgacggcacgcattatgactatctggcgaatgatatcaatgccactgcatattataatccatcgcattcggtaaatgtttattataaggggatggcgggaaaaacggagattgattttaatgcggattatctgtttgacaaaaacggagacaatacgatacaacgtgaagaaagcagtaataaggaagatagggttgtcacttctaccaatacattgagaagtgaactctttgctgccaaactggtgctgagccgtccgctgcttggaggaaatgtcatgataggggctgaatacagtcatacagagcggcaggatgattatgtgaatccggaaggttatgtgccgacttcattcagtgaactgaaagagcagaatatcagtccgtttttagagtatagccgcaatactcccatagggcaactctccgtggggggacgttatgagtgggtgaactttgattattatgaggatgggaaatatatggaaggacaaagccggaatttcagtaatttctttccgagtgtttcattgggttctgaaataggcggagtgcagttgcagcttagttatgcggcaaagacgcgtcgtccgtcctaccagcagttgagcaataatgtgacgtatgccaataggttcacgcttcagtccggcaatccgttattggaacatgaggtggtgcataacgtttctttgatggggacatggaagtttatgcagttcagtctggattataatgacagaagaaatgcaatcatttactggggggaacaaatggagtataatccggcggtaacgcttatttctttcaaaaatctccatagcttgaaatctgtttcggcattcttgtcattggcgcctaagtttggaatctggtcgccgcaattgaattggggagtgcagaaacaatggctggatctggagactaccgatggattgctgaagatgaacaaaccgatgtttacgggggcttttaataatacgtttaattttaatcacggctggatggcttcggtggaaatgaattatcaaagtaaaggcgatatggagaattgctcggaaaccaagaatattttttatgtggatgccggggttacaaagttcttttggggggataggatgtctgtgaaactgagtggtacggatttgttccatggcatgaagtctggaaaccgtatgtattataaccgggcatcttctttgcaaattaataactatgatagtaggaaagtgatgctgacggtacgctataaatttaatgctacgcgtaataaatataagggtagtggtgccggagagagtgagaaggaaagattatgagtgcctacttttcacatctcatttgttcttacccagcttatataccatttggcggaataaaggtacgtttaaccatatatattcgtaccaatgttctacctttcttttccatagtttgctccagctatatatttcccaccattttagatggagatttgccgaattcataaaatcttgtgtgggaaagagggtcagggctattccttttatccataatgttttcatttcgtccgcccaatattgcatgagtccgaattccggttcccagataatgaatcgggattcatgaatgccgtaacagactacatatcctggtacattgaaatcattgagagtgaaaaggatgatgggaagttttctttgtgttaattgatgaatgttttgcaaacatatttcggctttcatgccggaatatatagccccttgtttcattcctgccaaggtaagctttccatttattttgcaccattcggtcaatgtatgtatgtccgtttcttttccgttgtaatattttataacagtgagcaggcaagctacctctacagggcacttggcattggaacggacaaatgatttctttattttatcaagttcgtattctgtcataacccggtttgttttataagagaaaactcatggagcggccgcaatcacttaaaaaaagaaattcattggagcgattaacgttcatttggacgtggaagtaggtatgaacgctgaattactttaataagtgtgcggccggagtctgcatgagttatatctgttacgtcctgctctttctattaacatatcggctattttgtttatttcccgattcttacgctcaaagaaatcgcataactctttcgccttttgtgttagtgttgttttattttgtaatgcatattctatttgttgctccaatttcatcggagttatgtttatcatatctttaggcgaatatttcagtaccggtatttgagcaaaggtacaatccagccatgcgtcagaatgtgagtcggtcaaagccaaatcgcataatggtaatatggtgttaaggttcagcgtgcggaataattccatgttgtcgggcaattcagacgattgatatacatttggtatgtcggtcaataatatgaattggtaccggggatttctgatggaacttctttttataactctataaaaatcttctagtatctttgaatttttatttccttttcctaataatccgacaataatatttctttctttgtcttttttaatatcctgcaatctctttgtcaatgtttccaaacgtggtccggaaccggatgacaggtagggagtgggtggcagataaagtatagaaatatctttgtcctgtatgtttttttggtcaggcaactgcatggctatgaaaatatagtcaatggctagctgccgatagagggaggcatgtgctgcatgccgacaatccagaagcgttaggtcgggctttaaccaacggaaatcatctggataaagtacgcagttgcttattcctttatcatatagtacaggcgtaaaagcagggtttgaggtgtaggtatagtatacctcttgtttcttttcccgcaatatccctgctaatttgatggttagcaataactggcttttgtccggtgctatgtcaagaaggaaattcagcatatattattgcgttaatatggatttgtttaatgaactttttggacaaattatattcatagaaattggaactttcatgttccaatttctaatgaatcaagttagtggtttaagtatactttagttgggttatgaaaacaggtctgtcactcttgagtgaaatatcccgttaaatgtccggaaggtgtacctgttatttctagtttatattcttctgcagggaaatttgcaatagaaattgtgatgtaagcgctctgtacttcaggaatatcattttcataaacgacgcccccttttgccatatctgtgatgcggatggtcatatcacggtcgggtgacgcgttcttgagggtaaggagatagccatcggtaaatacagttatggggcaattggtagcagcacttctaataggatcatcccatctgccatccaattctacatctttaacaggagtttctgttgtattggcttgtacaggcaaaatacctattaatgtagttatgataataactatactccatatctttttctttatactttttaacttcatgactttatgtttgttttaattgttttgtttggggcaaagttagaggataaatcttaaaaacgtgcagatatcatgtggacaaatggaaaaaggtaataagttaataactagcttattacctttttttataggagggcgatatagacaattgtttatttttagtattccataagccataaatcaaggctttgattttcgcctaatgaacctatttcttgtacgatgcgttcttttaatcttaattttcttttggacacagatgtgggcgagatggctaacatattggcgatgtcaccgttgctgaaccgtagttttatcaaacagcatatttgtatatcaccgtctgttaaggaaggtatctgatgacatagtcttttagtatagttatcgaataataaatctattttttcttttatttcttgccatagtttgttgtctatatactttgttgtttttagcttattgaataattctgtctgcttaatgagttggttacataaaaaagcctcgcgtttatgtagatactggttttcttttgatagatgttccatagcttccagttctttcgatttttcttttaatgactgggcataattgcttatatgattttgcaggttattgttctccagtttcagcgtttcattctgttgttgtatttcttgtcgtattttattttgttctttccattgttcttttatctctaggcttccttccatttggatcgtaagttcttctatccgcattttgttgcggtttatcaatgtctcattttcatgtattttcatagtgaaataacgaattttttcttctttctccgatatctcttgtttttgagaaactatttttcgttggtatagatagtttgttattgctatgatgaaagacaaaatgattaaggcaatgagcacattgcgtatgatccggtctttctttatttgtgacagattattttcattgattattttttgctgatcatatttttcttgcatctctattaatgctttattgcgatctgttttacctattgaatcttgatagaaccatagcttattactgtattctactgcctttttgtaatctttttcttcttgactaatataatatagtgcttgataggcgctacgggctgtatggatattaggtgacaggcaagcttggtttaggtaaaaatatgcagaatcgtacatttttaaatagcgataagtatctcccaatgaaaatattctttgatcagtcttttttattttaatacaatcttttgcatactgaagagcctttttattttctcctgttttaagaaataaaaaactggtttcgttcatggcgcttgccaatatggtaggatagttattcacttgtcctatttttatagctttttcataatattctatcgctttattatattgttttttctgtgaaaatgctctggcgatatagatgaaagagaaagctatgtatgtttggttgtcggatagttcggcattatgatgtgctttttcaaaatattccatagcataatcatttagttttcgatacagatacattagtcctacctctgaattgataagaaagcctaattgataatcatttgttttctctatttcagtcgctgcttctagataaaatgacaatgcatcttcggcatgatgactttcatggcgcaagatacctttataatatagcgccaatgcctttctttgtgcattatcatgtttggtgaaataagagtaagcgatatttattaaagaatcggattgttcaatttggtttttatattgagcttgtgtcatcaataatgcccatgtggcatattgttcattttcagaaggaatgtcaggttgtatgccctgtaatatatgcagtgcgctgtcgggatatctgtacatcattgcttctgcctttgccaattcgggttggaaggctgtggggtagttcttgttgtgtgtacaggatatcagactgataattatgctaattattagccctgcatatttgaaactgctcatagtaatcatttctatattattggcgataggaatcttatgggatatgttgcgtaagtgaatgaattggttgattttataggaaaagtttgaagattgatgttttctgatttatcctgccatggtataatataaagggatgtgcctgaattattttaaatacggaataaaaaatcaggcatgtcccttcattatagctggggtaaccctttgaattgtctgtataccatttttaaagtagttaaaatcctaactttaattttacaaactgtttgatgaattgtactgttccatcaatccccaatacggacgaatcaatgcataagtgataagtttcggcagctccccacgttttgtaactataataattatagtaagctgaccgttttttatctgctttttccatcaattcttcagcggcttctgtagaaatatgatggatatgcatcaatctttcgatgcgtgcttctttggaagcagaaacgaatatattgacgcaacggggatggtcacgcaaaatgtagtcggcacatctgccgacaaacagacacgattgtttttcagccagttcacgtattacgtcgctttgtattttgaacaaagcgtcattgctcagacaactgccatagggaatggctccgtcgctgataaaaggaaaacgtgttccgaacagaccgccgataatgctttgagaagctttttcatctgctttttcaaagaattccttgcataggccgctctcttccgaagctagtttgattaattctttatcgtaaaaggcgataccaaactcttgggccagtttttcgcctatctcttttcctccactgcctagttggcgtcctaggttgataacataatgctcgttcatagtcgttgtctattgattatgtgggcaaatataaggaaactaatttttaattcttaattttcaacttttaatttgttaccgtgggtcttaaaaatcttgaactggcggtaaagcatgattcctgcgacaacacttgccgccaagtctgatattggcatactccaccaaattcctgctgatccccagcaaagagggagcaggatgatgctgggaagcaagaataataattgtcgggttaatgacaggaagatggctttaccggccatgccgatactttgaaaaaaattggacgttaccatctgaaacccgataatgggaaaaaatatgactacaatgcgtaagccggtagctgatagctgtatcagtccctcatgagtggtaaaagcggatacggccaattcgggcatcagttcacctactagaaaaccggttgttgtaacagcggtggcgccataaatggtaagttttaatacttggtttacacgatgatattgttgggcgccaaagttataaccggctatgggttgcattccttgattcagccccatcacaatcatgacgaacaggaaaacaatccggtttacaataccaaatgcgccaatagccagatcgccatcatattctttcaaacctttgttaatgaaaattacaatgaagcatgctgccagattcatcaggaacggagacataccgatagcgatggtgttttttacgattgtaccgcgcagtttgtaaatgcctcggcggagatgaagcaactcgttcttgttggtgaaggtcttgaattgccacaccagtgagatgatttgggccagaatggtggcaatggcggcaccctggataccccaatggaatagatagataaagatagggtcaaggatggtattgataattactgtggtgatggtggctgtcattgctttttgtggatgccccgaagcgcgtagtaaggcattcagtcccaaatacatgtgggttataacattgcccagcaggataatgaccatgtagtctcgtgcataggagatggtatccgggcttgccccgaagaagtagagaataggatcaaggaaaagcaaggttaatatactgaatcctatacctataataaagttcagcgtaactacgttacccaaaatgttttgggcggtagcataatctttctgtcctaattttacggaaactaatgtggaggcacccacaccgaccagtgaaccgaatgcagccgccagattcatcagcgggaaggtgatagccagtcctgaaatagccaaagggcctacaccgtgaccgatgaagatgctgtctaccatattgtatagggaagatgccgtcatagcgataatggcgggtattgcatattgtaaaagtaattttccgattggttgtgttcccaattctgtggggattcctgtttttgccatactttattttctgtctttttacctgtttaacctgaattcggctgcaaaggtacacaaaaaatgagtgtgagggaaaagtttgtttatctttgcatttaaaaaaataaacggaatagaattaatgaatagtcaaaaaggaatagtgggctgcttgctattggcatgcaccttacaaatgtcggcacaagtaaaaacgtataagtatcgtgtaaactttcgcgataaggcggaaacaacctatgcattggacaagccttcggcttatttgtccgaacgtgctttggagcgtcgcatgaaacagggattgcccgttgattctacagatattcctgtgtgccggagctatatagatatgctggtcggaaaaggagcacagcttgtatccaaaagtaaatggaacaatacagtggtagtgcaggtatccgacacgtcggttattgataaagtggcggcattgccttttgtgacagctgtccggaaagtgtggacagctcccgacagtattcctgcccgcaatgccaaccgtaaaaaagaggtgaccaatagggtgacaaagagtaataactattatggggatgcgtggcggcagattgctgttcatcacggggacagtcttcacgctgcaggttttcgtgggaaggggatgcagatagcggtcattgatgcaggtttttataatgctgatgaaatcagtgttttcaaaggaatggacttgttgggaacacgcgattttgtaaattctcactcggatatttatgccgagaactatcacggcatgaaagtgttgtcttgtatggctgccaataagccgaatgtattggtcggcacggctcccgaagcttcatattggcttctccgtagtgaggatgatgatacggaacagcctgtggaagaggattattgggcggaagctttggaatttgccgatagtgtgggagtggatgtggttaacacttcattgggatattatgagtttgatgatacgaccatgaattaccggtaccgtgatttggacgggcattattcattgatgtctcattccgcttctttggctgccgataaaggattggtgttggtatgcagtgccggaaattcggggcgtggcacatggaaaaaaatcacacctccgggagatgcggaaaatgttattacagtgggggcggcggaccggaatctggttaatgctgatttctcttctgtaggaaatactacagatggccgtgtaaaaccggatgtgatggcggtgggagttgcttcggccgtagcgggtaatgatggaacggtttctcatgccaatggtacttctttcgcatcgcctacattgtgcgggttggtagcctgtttctggcaggcttgtccctggcttactgccaagcaggtggtggaggcagtgcggaatgcaggagaccgtaaagagtatccggataatatttacggttatggtgtgcctgatatctggaaagcttgtcaaatagaattagagaagaaaaaataatggaagaacatcctctttctttatatgaactgaatgcgttggttaagcgtagcattcatgcttgtctgcccgatacttattgggttcaggcagagctgagtgatgtacgttccaattattccggtcattgctatttggaatttgtacagaaagagccacgggggaataatctgatagctaaggcaagggggactatttggagcaatgtctaccgtctgctgaagccttattttgaagaggaaaccgggcaggcttttgttgcaggtattaaagtgatggtgaaagtggctgtggagtttcatgaattgtatggttactcgcttactgtgcaggatatagatcctacttatacattgggggatatggcgcgtcgccgtcgcgaaatcttgaagcaattggaagaagaaggtgtgctgactttgaataaggaactggagattcctttgctggcgcaacgcatagccgttatttcctcggctacggctgccggttatggtgatttttgtaatcaactggaacagaatccctatggttttgtcttttatccgcgtttgtttcctgctattatgcagggggaacgggtagaacaatctgtcattaccgcattggatgctatccatgcctgtcgtgatgattgggatgtcgtggttattatccgtggcggaggcgccacgtccgacctttcggggttcgatacatatgagttggcggctaattgtgctcagtttcctatacctattataaccggtatagggcatgagcgtgacgatacggtgttggactgtgtttctcatactcgtgtcaagacacctactgctgctgccgagtatcttataaatcatttgcacgacactgccaaggttcttgaagattatgcatcggctgtacttcatactatctctacccgtatggaacgggaaaatacccggctgaaccggatggtagaacgtattcccatgcagacgcggatgaggctgaaagaggaacattatcgccaggaacgaatcatgaaacatttggaagtaggcctgcaatcccgtctgacaaaagaaacccattgtttaaaaatgatggaaactcggttgggcatcgtttcacagcgtcgtctggtaaaggaaaagcatcggctccaacttttggagcaggaattgaaggcggcatctcccgaaaatttgttgaaaaggggatatagtatcacgctgaaaaatggcaaggcggtgatcgatgcttctgtattgcagccgggtgatgaacttaccacccgttttgccaaaggagaaataaagagtatagtaactaaaaaataaaacgaagtatggcagcaaagaaacaaacctatgaacaggctatgaaacgtctggaagaaatcgtatcacgcatagacagtaatgagttggacatagacagtttaggtgtgaacctgaaagaggcacaggaattaatcaagttttgccgggataaactttataaagccgatgaggagataaagaaaatgttggataataatgtttcaatgtgacaatatgctaatgtgccaattggctgcgctatattctgcatggcatatttgtaccttagcacattgacatattggcaaattataaaagctataaataaaaaagctgttttgattggaatttgcaaatataaaacgtaattttgctctcattcgtaaataataacataattaagatacactatgaaagagattgattgggcaaatctgtccttcggctatatgaagacagactataatgtacgttgctactatcgtgacggtgcatggggagagttggaactttgttcggaagaaacgttgaatattcacatggccgccacttgtctgcactatgggcaagaagcgtttgaagggttgaaggcttatcgtggaaaagacggtaaaatccgtattttccgtcctgaagccaatgcggaacgtttgcaaagtacttgtgacggtattctgatgccggaacttcctacagaaaagtttgtggccgctataaagaaggtggtgaaagccaacgagcgtttcattcctccatacgaaagtggtgcggctctttatattcgtccgttactgattggtacaggtgctcaggtgggggttcaccctgccaatgaatatctgtttgtggtattcgtaactccggtaggtccttatttcaaaggtggtttttctactaatccttatgttattatccgtgagttcgaccgtgccgcaccttatggaaccggacgctttaaggtgggcggcaactatgctgccagcctgcgtgccaataagaaagcccatgatttgggatattcctgcgagttctatctagacgccaaggaaaagaagtacattgacgagtgtggtgcggctaatttcttcggcatcaaaaataatacttacattacaccaaaatcatcttctattctgccttctataacgaataagagtttgatgcagctggccgaggatttgggtataaaggtagaatgtcgtccggttcctgaagaagaactggaaaccttcgaggaagcgggggcttgcggtacggcggctgttatcagtcctatccagcgtattgatgatttggaaaacaagaaatcgtacattatctctaaagatggaaagccgggtcctgtttgtacaaaattgtataacaaactgcgtgctatccagtatggtgatgaacctgatacacataattgggtgacaattttagactaatagaaaaatagattcttatgaaaacaaattcagaattgaagaatcgggcaatcgatgcgttgaccggtaattggggactgggtgcggttattaccttggtctatggactggtgatgaatgcccctacgctgccctatcgtattatggagtcggtggcttcgtcttcctttagtctcatcgctttgttgcttttgccattgggcttcggctataccgtcctttttttggatgtgattcgtggaataaagctggattttgcccgtcttttcgatgggtttaaagactatggacggatattgggtacaatgctgctgactacagtctatacgttcctgtggacgttgctgcttgtcattccgggcatcatgaagtcctattcatatgccatgacgctctttattctgaaagattatccggagttacagtacgatgctgccatagagaaaagtatggcgatgatgtccggtcgtaagatgaagatgttcttgttggatttgagcttcattggttgggctattctgtgttgttttactttggggatcggtttcttgttcctggctccttatgtagaagcatcacatgctgctttctatgaagatctgaagaaagaattgagagagtccgttgaggcaatttctgaataatatagaaaatagaaagataagaaaaatagacctgcaagtgaattgcgggtctattttttttctctttcacaggatattcctacctttgcctgtggaaacaaattaatgatagactaattttcatgggaaaaggaaaactggagaaatttgctgatatgcgggagtatccgcacgtgtttgaatacccttattcggtggccgataacgttacgttcgatatgaaggggaattggaaccgtgacttttttaagaacgataatccgatagttctggaactgggatgcggacgaggtgaatataccgtagggctgggtcgtatgtattccgataaaaattttatcggtgtagatataaaaggggcccgtatgtggaccggtgcgacggaagcgctgaaagatggcatgacgaatgtggcttttttgcgtaccaatatcgaaatcatcgaccgtttttttgctccgggtgaggtgagtgagatatggctgactttctctgatccgcagatgaagaaagcgactaaacgtcttacttccacatactttatggaacgttatcgtaagtttttgaagccggacggactgattcatttgaagaccgacagtaattttatgtttacttacacccgctatatggtagaggaaaacaaattgccggtagagtttatgaccgaagatttgtatcattccggtttggtggatgacatactaggcatccgtacctattatgaacaacaatggttggatcgtggtttgaatataaaatatatgaagttccgtctgccgcaagagaaggagttgcatgaacccgatgtggaaatagaattggatgagtatcgcagttacaaccgcagtaaacgaagcgggttgaaaacaagtaaataataacagaatgatgactttatatccgaaattgattttggacgccttggcaacagtgcgttatcccggaacgggaaagaatttggtggaagcggagatggttgccgataatcttcgcattgacggtatgtcggtaagcttttcgttgatttttgagaaaccgaccgatccgtttatgaaatctatgataaaggctgccgaaacagctattcatacttatgtttcacctgatgtacaggtagctattgtgacagagagccgtcaggcggcgcgtcccgaaccgggtaagctgcttccattggtaaaaaatgtcattgctgtttcatccggaaaaggcggggtgggcaagtctactgtggcggccaatctagctgtggccctagctaaactgggatataaagtaggtttgctggatgctgatattttcggtccttctgtgcctaaaatgttccaggtggaagatgcccgtccttatgctgagcagattgacggtcgtgatttgattgtgccgattgaaaaatatggtatcaagttgctttctatcggtttctttgtcgaccctgatcaagctactttatggcgtggagggatggctagtaatgctttgaaacaactgattggagatgccgcatggggagaactggattatttcatattggatacgcctccgggcaccagtgatattcatctgactttggtgcagactttggctattacgggagctgtaatcgtcagtacacctcagcaggtggctttggctgatgcgcgcaagggaatcaatatgtataccaatgataaagtaaatgttcctattttgggattggtggagaatatgtcatggtttactcctgcggaacttcctgaaaataagtattaccttttcggaaaggagggttgcaaacagctggcagaggaaatgaatgtgcctttgttgggacaaattcctattgtgcagagtatctgtgaaaatggtgataaaggaactccggctgctttgaatgaggacagcattaccgggcgtgcatttatagagttagctgaaaatgttgtgaagcagactgagaagcgtaatgaggaacaggcaccgacacacattgtggagatgaagaaatgatttaggaatatatttttaagatgaaaagagactgttcggaacagcctcttttctgtttttatgctctttattgcagtttgaaagttacaggaacagtgtatctgcaacgtactgctttgtcttttacagttgccggcttccattttggcatggattttacaacccgtgctgcttcagcatccagttcgggggtaatgctgcgtactatgcttacatggtctaccgaaccatctttttcaataaccatctgtacgattactttaccttgtgctccttccttttgcgctgttacgggatattttatgttgcgtgccaaatattgcaagcaggctatcatacctccggggaattcaggcatattgtctgctatctggtatacggggtcttctccgacaagaagtaatctcaccagttccggattttccatatctttgatggggcagagttcttttaccgtgaattttccttcttgataacctttatggttaatggcaatggtttcgcctactcctactgttaactgagcttctccgtgagcgtttgtcgtggctttggcatttgttgaagaagaaataagttctactcctgcaagttgttggttatcattattggatatttgtaacttgatccgtatttgtttgccggctttgatgtaggcggcaatatcatcatcggtatcgaaaatggcagtgacattcggtttgtttgctgaaagtagaagtgattggtgtttggaacttttaggagaggaaacgtctagggaaacatacttgggagtcgtcatatccacttctatggtagcctttccttctgcattggtcttgaaagtttttacttcattacccggtttgatttgcagagtaatattaggctgaggcttaccttcactattggttacggtaatagtgaaagtcaccagaccttgtactgttgtgttgacaaaagatgccacttcttccctttcggggcgtggggtgctttcttccgtggaatagattaacctttcggctgtccgtgccacggtttcaatgttgctgaccaagagtagagcagcagtcagcggtgcaaacaaggcatatttgatatgccctgtggtgcgggttctttttttgttcatcattttaattctgttttttaagtgtgataagttgaaattattatataaaccggtttgtctgttttggttggctaatcccaaaaggtgatattgatatgctttcttatttgtgccggattccattactttatgatcggcaaggtattccaaattgagtctgatctctgttttcagcagccatgcaaaaggattcatccagcaaatgatatttactatttcactgataatgacatctatggaatgccattggcggacgtgggtctgttcgtgcgtcaggatttcttgtttttcatcttctttcagtccgggcagatagatgaaaatccattgccagaaagagaatggattggcaggttctgatagactgcgtatggatatttggtctacatttatactcttgctttttaagacaaggcggaaaatactgcttagttggatcataaatcgtgcggataataaaaggattccaatccaatagacgaactttattatatcaagcaggtcgggtgtgggaatagcaacaggagctgtgactactgtggcagtggaagtatttgtttctgtcagcatcatcagtgcgtagtaatctgccagttcattgatggcaggttgttctttcacccatgcttgcatatccatcagcggataaagaaaagagagggcaagaaaactcagcagtgcgatacgacgccactggaagaaagtgtcgcgacagcagaacagcttgtagaaagcatagaataaggcgatgcctatatttactttcagcatgtagatgagttcgggtgctgtagttatcatagtatttgtgaatttagcaggattatttatcttcttctttctctatcaagttgataatgtctttcaagtcggctgcggagattttttgctctttggcgaagaaagataccatttccttgtatgagtcagcaaaatagttccggaccacaccacttacaaatgtgcgtttgtattcgctttgtttaaccactggggtgtattgataagtgttgccgaatcgtttggccgtaacgtacccttttcttttcaggttgttcactatggatgccaccgtagtataaggcggcttgggttcgggaaatttagcaactatgtctttcacgaaacattctcccatgctccaaatatgaagcatcacttcttcttcttgtatcgttagcttttccataagaaaatgaattgattacgatgttttcgcaaatctacgaaaaaatcgtaataagcaaaaggaatgggagttaattagtgtgaatacagattgtgggcagataaaaaaacaaagtgaagaatccggctgtgatagattgaagcggacccttcactttggcatgaaaatgacagatgaagtaaagtttattttttgtgtagaatataatggtctgctaactctcctgttattgcctgtttgtcttgattgagagcggtcagggtattctcaccgactttataatattgcttatcctctccattaattaaagttatgatattaccttcaacagagtaagttccatattctttgaaagtagcatcctgccggtcaatatattctgatatcaactcaaaagtcttgtcttttttaatagtcagggtcatgttgatacccggacagtcggcagccggaaaagttccggtgtaagtaccgtcataatccaatgagttttctgcattgtgcatatccgttgtttcggtggaggttgcagaatcgttagtgtttttggagttgctgttacatgaagtaatcagcaggcatacgcatgccagaataaaaagttttttcatcataaataattcatttagttcttaatttataaacaaattcagacgacatttgttctgcgtcttttcttaatctcttttaatctttcgtatacatgtctgcggcttaaggtaatctgacgacggtatacgatgcaggtggtaaggaaataaacacctgtttgtatccacaatacccggtactctgtcagcacatcggtcagtgtggctcccatattgttgatgcgtacaaagccgttgatgccgaaagtggaagggaacagccacgaaaccacctcccagaatttaggaatggcagtacctggccacgaaatgcctgagataaatagcaacggtactgaggtaaatacataaatcatcatacaggcttcccgatggtgaataaagatagaacaagtcatcgcgaaaaagatgcatgccagtatatagggaaacatgaatgccgctagggttccggcttgagctatttgtaccaggctgaacattttgggaacaaggcagagcatataggtagccatgacagcatatatcataaggtaagtcagtgatttgcctaaaacaatgcgcagcgtgccatgataatggcggctcatggggataaggtctcgaaaacggttgttctcacgagcagttccggcagatagacctactcctagcagtaaagtttgttggataatcagtatcagtacggcgggtatcaggaagctggcaaaaccgttctgcggattgaaaatggaaatatcctcatacgctatgggagacgtgctcacttcatcttgtcggatggttgtgttgccggagcgttctatctttatctgtttgttcattaccagcgaggcattggtgttggctgtcagcatggctttgtagtatagcataccgctcatgtcacagtagatggtgacatgggtttgaactcctttagtaatgtcgcggctgaagctttcaggaatatagatgatgccatacactttgccgttcttcaataaagtttttgcttcttccatatcactgcaatgagatactatttccaagtcggcacctgcatctaccagacgcaggtattcacggctgaggctggaacggttgttatctactacagcagcagggacttcacgtactgtttcattggtatatataaaggtatagagaagcggatagcctagtggtaccagaatgaagaagataagtacaccctgatcctttacaactgctttcaactcttgccaccagatgtagaaaaggtccttggttccttgtgagatgatatctttgagtttatatgttttcatacctgtttgccgttttagggaatatatacataatgtaatagtactgtgcgcagtcttttcagtataaagaaaggcaacagcatgaataacatcaacgcgactactgaatgccatgcgtaaatcagcggatatccgttaagtgccaaatctacataaatcaggaagtagtggcgtaacgggaatagattggccagtgcctgtaatacaggattcattgccataaccggaaaactcatacccgatatggagaaagaaatcaccccccatagggaggcggtgctcagtgccaagcggactgttgtaaacaatccgaacagaaatactccgaaagcctgtgaagccagtactagtaacagaccggcaaacagcatgggcagtataccgctattacagggatagtgcaggaaaccgtatagataaacattatagaaggtggccatgacaaagaaaactacagtctggggcagcaatttgccggtcagggctacggtgatggaattgtctgccatgcccatccattctttttgggtgttggttttcatttcacttccaatggtatagacggtggtcataaagataagcagcatcaggatacccggtatgatggtgttactcaaatatacagagtaattgagccatggattgtttaatacatgagagtcgatgactatgggctgcaggaatgccatggcctggtcttctgtagctcctttggcatataaggtggcacggccgatggctccacccgccagctcggacatggtgcgctggtctttatagagtaatgaacctgctaccagataggagtagttggtataaaaggaaaccttgggttgacggcttgctaatgccttctcggtagttccttttggaatatagtagaaagcatagatctttccttgctgcatggctttgcgggcatccgcgaaactggggtaatgtgctatgattttagtctgctgaaaagcgtccagattacggatgatgctgcgtgtggtagctgtgttgtccaaatcgaccacacctgccggcatatccgtagggagtccgttccacattaatgtagtgaagaagagataacagaacaagggagctatgatcatgcagaacagatatagcggtcttgtggcgatgcggaacacttcacgccgggctatgcggaatatacggttatggacagtattgttcattgtttgttatttctcgatgatggcactcattcccggacgcaatccgtctgttctctctacaggaacagctttcacctcgaaggtcttcaggtcgaattgtcccgtagtcttggttgctttccaggcagcatatgtacccagatctttcatataagtaaccttgaattttatttctttgtcaaaggcaggaataaatgcgctaatctcatttcctacggtaaagtcttttaggaaatcttcgcgtacattaaatgttacccacatgtcattcaagcgggccacgttcataatgggggcaccggtacctaccagttcgcctgctttgggaaaaatttcggtcacttctccatcagctgacgcggtcagtatcgtttcgtctatgtaggaggaaacttcggctacagcacctttggcacgttctacttgggctgcggctgctgctttgtcttcacgttgtgcaccgttctttgccatttcgtattgggagcgtgctgctttttctgtagcggtcatggcatcaaattgtgctttggcttcatcacgtttttgcgcggacattactccttgttcaaagagccggttgacacggttgtatgacttttcagcaatttctactccggctttggctttctgccacatttcgtaggcagcttgcagttgctcttggcgggtacctcgttgtgctttttcattcaaggcttgtgctgcttgttcggcagcttgtgcttgagaaagtttggcttttacatcgggggcttcaaggatagccagtgtgtcaccggcttttactttgtctccttcctttacacgaaattccagaatgcgtcccggcactttgctggatacacggtattcgtcggcttctgcttgcccctgaatgatttccggacctttacccagtgtaaagaaacctatcagtgacactatgacaatgactgctgtcagtgaaataaatgccagcaaaatattgctgtgttgtgatctttctgccatatcttttcgtttttaatctttaatttttatttaagcactcccattgatttgcgcaaatagacttcagtcagttttacatcaatctgagcgtctattttgtccgactgggcagataaccaagcggtttgcgcttccaatacgttactggtaggaatgactccttccatgaatcccagtttggcatagcgcagattctcgtctgctttttccagatttttttcagccatactcaggcgtttggctacttcatttactttatagctggcttggcttacctgcaattctaccttttcttttgcatctgccagttggtagcgggcaatgtttgcttccgccttggcagcttttaccttatacattccttcgccccagttccatattggaatttgtaccatagcgccaacagcccacatgccgcggaatttgcgttcaaagccgtttaccaatgagggattggttaccatgtagttggcggtcagagctactgtaggaagaaatcccgcgcgggtgatattgactttttggtcataaattttattagctagatccaaacttcgtaattcttcgcgatttgccaaagcggtggctacattatcacctacatgatattcaaggagagttaagctttctacgtcttcatctgctaaacgtatttcatcatttaaaggcagaccgcataattggcatagtaccattttagataggcttaatccgttgtctatttgtgtgagcttcatttcggcttcattcacttttacttttacacttagtccgtcggctttggtggcgacaccttcggttatcattttatctacatcactgtccagttggctgaccagttgcagatagctttgggctagttttttcttgtttatcagtgagatgacttgccagtaagcttggtcggtactcaaaatgatatcctgcataccggtggcgtgctgtgattcggccagttgttcagcgtatttggtgattttattgtaggcaacgatttttcctcccatgaagatgggttgggtaagggtcacagctcctgcatacatattgcgtgtgtcggtgcgcagcgcatctaccaaaccttgtcctaccttgttcagtgcatttccaatacctgggatgaggggagcaagtggttgcagtatttgtgcgagttcgggattggaagctgccagttgttggaaagtttcctgtatggagccttgggcggtagtccctatctgactgatagctcccttttgttcgtcacttaataaagagatttctttctgagtgtgcatataggttcctatagccgcaatcttaggaagataattggtaaaagccgttttcttttcataatgtgcagctgttatcttttcagctgaaatgcgcaactctttattgttggataatgctaaagcacgacaactatctaaggtgagtgtgctttgggctgaaatactatctaaaacaccgataaataggataaaagctgcaatctttttcattatagtgttcttgttttgttgtttttaagttgtttatgcaacaaaaataagacaaatcttcaagaaagccatattctggatgttattttaaaatatttttataattctgcaatctgtatgtttactgcttttgcttggtggagaaaaaaacagccggttcgtttccaaccggctgtttttttattaaatatattggaggggagaatgttccttgttatttcatgctgaaagcttgttgtcctatcatggttccatcagcgaaaatataaacatgataagttccggcaggcaaatattcctctacgtcccaatatacggttacattttgttcttctccggtgtattctatgtatttcttgatggaataaaccaaattacggttttcgtatgggaatgtgtttgaagcgtttttggttagtatgtcattgtctggtttggcaatacgtatatataaagtacgttcacctgttttggcggtaatattcttgacaatggtgaacgagatggctatctttttcacatcttttactttcttggctgttttaccacgtttatttctaggctctacgctaattcctgtggcatccaattgggctgccaaggtgaccttttcattcagattttttttctcttgcgataaattattgatttgacgggttgcctgcgtatatttttgttttacttcttggttttcttcagctagtgcttggttgagtttgttcagtgaatctatttggataacataggtgcgtagtacggcacgtactgttttcagttctttcttcaaacgcatgatctcagctgcgttactggtctttacttgtcgtaattcttctagcagccgctgtgttttcagcttctcactctccagcttttcgcgcaaggaatcattgtttatctgtatctgaagttcatcatattgggtggcgaaagtggtatattcgttttccatttccagtttttccacagcgaagagttcgctcatttccttattctcttttgcttgatgaaaagcataaaaagaaactccgccgataatcacaaccagcagaataatgacaataatcagttttttgctcttatccatagtgttacattgaattttggacaaaagtacaataatttatgtagactgctcgaaaaatattatggaaatttttctttaattcggaatatcattgtaactttgcggtgcttttaagaaggcgattttattatcaactttaaacaaaatatagagattatgtcaaaagtaaccgtagtaggcgcaggtaacgtaggtgctacatgtgcaaatgttcttgcttttaacgaagtagcagacgaagtagtaatgctggacgttaaagaaggcgtatcagaaggtaaggcaatggatatgatgcagacagctcagttgttgggcttcgacacaaacattgtaggttgcactaacgattatgaaaaaacagctaactctgacgttgtggttatcacttcaggtattccccgtaagccgggtatgacccgtgaagaactgatcggtgttaatgcaggcatcgttaagtcagttgctcagaatatcttaaagtactctcctaatgctatcatcgtagttatctctaacccgatggatactatgacttatttgtcattgaaagctttgggcttgcctaagaatagaatcatcggtatgggtggtgctttggatagctcacgtttcaaatatttcttgtctcaagccttggggtgcaacgctaatgaagtggaaggtatggttatcggtggtcacggtgatactactatgattcctttgactcgttttgctacttacaaaggtatgcctgtttctaacttcttgtctgaagaaaaattgcaggaagttgctgctgctactatggtaggcggtgctactctgactaagttgctgggtacttctgcatggtatgctccgggtgcagctggtgcatttgttgttgaatctatcatccacaaccagggtaagatggttccttgttcagtttatttggaaggtgaatacggtgaatcagatatttgctgtggtgtgcctgtaatcttgggtaagaacggtattgaaaagatcgttgaattgcctttgaacgaagaagaaaaagctaaatttgctgcaagtgctgctgctgttcgcaagactaacgctgctttgcatgaagtaggtgctctttaataagaacaagctataattttatataaaaagccgttttttcagtgaaatgagaaagcggcttttaatttgtacagaatccctgaaaaagtaagttcacttactttttcagggattctgaaatgaaaacggcaggaagattttctcctccatcagtccatcgggtaaaggggtaaccgggataaagggtaggagctgtttcatctatccattggttgagaagccggtagatgggaatgtcttccttattcataaaagtacctgtgtattgggcatttttagacaactgattaccatcgtcattttttccgataaaggttatttttgcattatcatagtagttgtggataaagaaagagttggcagctatacctgcgaataatcctttggtcgtaattagatctatgttatagacataacaattttcaatgtgcgctccatccgaagctttcccgcatattccaccattgtaactctctctgttctttattatgttgttggcagaatagcagtttgctatcaaaccttgggcctggctggaacctgctattccaccggctggtcctgcttttatttttgaatttgcgtcataaatgatttgggtgttggtaacatagcaattggtgatttcccctgttgaagttcctgctatgcctcctgtattggctgattggttcgttttggttggattggctgcaatttggcactccttaacgcaacaatttagtattttgcctttattgcgtccgactaaaatacttgtaccttctgctgtgctcttgctttttgatgtgatagatactttgctggattctatatggagatttttaactatgccggtgatattgacggctccgaatacacctgtggtgccattgctggaattgataggtatattgtaaagggtgtgattttgtccgtcaaaggtttgggaaaagtaatagttggtttgggcgtatcctatttgttttaactcagtacaatccacatctttaaaatcaatgtcattcaatagataataagtggttattccattcatcgtttctccgaaatcgtccaatgtttttcctttgtattgggtaaatgtattgctattgataagttgactgaatgcaatccaatcttcggcagtcataattcccggagttttttcagatatttttaagtgataagtatattctttgttaccggtaaaagactttgtttctagttgtgttgtatatttctttccatttgttaccatatttatggcgatgaccatgtttccgacaggagggactataaacgaataatttccgaaaggagaaacttgggcaatagtagtcgtatgtgttccgttatccgctagaactatttcagcggattttgggataatagaggaaacagcaggacatgttacctctattttctgaaaataggtttgtaaatttccctccaaatgcagtgtcagaagagaaaataaatgtttgaactgtaaatggatggaatttccggccggaaattcatccttgacatacagtatgtcttccaacgaattgtttttataaagattttcttggacatagtccaaatcgggatagacaggatatactgccgtaacatttgtttttcctgttaggtcactccagctaaattcattttctgctttccattggttgtccatataagtcagaattctgttgtctatctgaagactgccggaagcattcagtaggatttgattgccggagttaaaagtggaaacaggggagctttctgtgaaagctgcttggtatgtattgcctgtgagtactacctcgatatcggtccctgtataaacaagattgtcggtgcagctttgcaaagccaggaccgacaatcctattattaatgagttatatttcaactgaataatgtattaatgaaaattgctttatggttcaggtattgtgaattccctgtcagcaaagagttccattaggccggatatctgtttgagtcgtaaaagttcgtcggcatccatgccaatattcttttttatccattcgtcactcattccggctttggtcagttctgccacgatatctaccatcagttcaatgctgtgagtgccgcgggcgcggttgtggcggatagtgcttgccattctgtttgaaaggtctttttctataacgaccacgggaagtaaacctttttctcgttcaaacacacgttttgaagttttaagcacacaataacgatgatatccgtctaccagttcatatatatcttcatcgggaatataataacatacacaaggcatagtatagccatcttcccaaatgcttaattccagcaatttcatttcaggagcggctacgtggtttggattataactgttggcacgtaccttttccaccggtactctgtgcacgtgatacacaggactttcgaattcttctttcatttgataatgtttttatatttctgcatcactctgtctcttcttaacttttcttttttagttagggcaaatcccatatatttacatacatggtcatttttcagaatgcaaatacacatacgtttataagtggggatttctttaaactctgcgatgtctatatcgtctagataatccatttggacaggaagtttgtctgtcttgtagtttgttttcttttgtacgtagaattttatgcccaaatcagttaatttacgtatggttgataaatccaggcatcctcccttgtatttccagaactcccggcttactcttagtttttccaagtaagactgtttggtttcttcgggtaacgtatctaacaggaaatacatatactctttccatgtgtagccttctggtaatttgatgttttgccatcccatggcacgggttccaccatagattccggtaaagtttactccgtttactcggcctaacattctcccccaagtattaggatcgatggctttgtataatttcaaggtttcctgtgctgtgctgaggaacggactggctacacgttgtctgtccaaaggtactccggctttataataaagttcgtacatttggttgaatggccatttgaaacgggcgtatgctgtccatatatcttcggtagtccagtcatagatagggtaggcattgtataaatcgtatcctagtctgcgggtccacatcaggttgtgatagctgttcaggcgattgttaccgtgaatagttctccatcggtccaggctctcttgagttcggatgccgaccaggcagcaagtgcgtactgcatcatgttttttatggtaccacgatgcaaatgaagtctggaaagtgtagtcccacatttcctcattgtagaatgggaaatcttctttcttataacagtttttaggcataggccttacccagtgggcgtgcatactttcgtcccaagggcgccaataggtttgaaacatagaagcacaagtcactactttgaaagggacacagacatggtagatttccaatatatcctgattttctctgaacgtctgttccacatattctgtagtcatttgatactgtgcttcatagtccatgtggtatactccgattttcctgtccagattatgctctctgatatattgaatacataagttgagcaagacaccgctatcttttcctccagaaaaagaaacatagatattatcaaattcgttgaataagaatttgagtctcttttgaacgagttgataaacattttcccctttagttcttttattattcatttttgttcgtgttgtaaatcattttaatataattagtccaacggtgttcggtttgaaaaccacagttggaaaaaatagcttcgtgtttggtttgaacaattgcatataaattgtttttaggctttactgctcccaacaattcaaccagcacttcctgatcatcgttatggacatagtagttgttaatgacataaccgccacttttctgctctacagggacaaaaccggttacgtcattatcttcgacggcaatgtaccattgaaaacgttcggtcgttttgaagggataattgttattagcccttaggactttaggattcatagccaatggtccaattaaattaaataattgaggttcaaggccatctagttgtaatatttccataacttaatttttacatacgtttacttgaagctacaaatgtataaaaaagattggatataccataaaaaaacgctgccataccttcacaggcgggcagcgcaagctacaatacaaaatacaaatacaactaaacgagatatttttatgctaatagaatgcctttaaacaattccttgagccatcatggcatgggctactttcataaagcctgcaatatttgctcctttcacatagttgatatatccatcaggttcagtaccatatttcacacattgttcatgaataccatacataatttgatgtaacttatcatctacttcttgtgcgctccaactcatatgcattgcattttggctcatttccaaacctgaagtagctacacctccggcatttacggctttacccggtgcatacattagtttattttcaataaacgcatcaattgcttccggggtacaacccatattagaaatttctccaatgcaaagaacggaattttttattaaattacaagcatcttcgccatttaattcgttttgagtcgcacacggaagcgcaatatctactttaacttcccacggacgacgtccggcaacgaatgttgagttaggatatttctctgcgtatggagctacgatatcattgcctgacgcacgtaattccaacatgtaatcaattttatcaccacttacaccgtccggatcatagatatagccgtcgggtccggagattgtgactacttttgcacctaattcagttgctttagtcacggccccccaagctacattaccgaaaccggaaatagctaccgttttgcctttaatatcaattccttttgctttcagcatttggtttacgaagtaaagaccaccaaaaccggttgcttcaggacgaatcaacgaacctccaaattccaagcctttgccagtgaaggtacctgtaaattcacgggttaactttttatacataccgaacatgtatcctacttcacggccacctacaccgatgtcaccggcaggaacatccatatcaggacctacgtggcgccacaattcaagcatgaatgcttggcagaaacgcatgatctcagcatcgctcttaccacgtggtgagaaatcggaaccacctttaccaccgcccataggcaatgtggtcagtgcatttttgaatgtttgctcaaatcctaggaatttcaaaatggagaggtttacagaagcatgaaaacggataccgcctttgtacgggccgatcgcattattgaattgaacgcggtaacctaagtttacctgtacttttcctttatcatctacccaaggcaccttaaatgtaaagatacggtcgggctctaccaatctctcaatcaaggacgctttctcaaattccggatgttgattgtatatatcctcaatagaaagcaggacttcttttacagcctgcaagtactctgattcaccagggtgttttgcctccagggaggtcatgatttgattaatatccataactattatgcatttaaggttttgacaaaatgaaaatcatttctgatgcaaaggtatgttttttggtgaattggcaaaatatttttggctaaattttagtttggtggtgataaaaagttaatcgttgtggtaagacctctctacccaaaagttcttttttattgcgaataagttgcataaaacaatattattgacgtattttgctattacattatccatgtaaatcaaataaccatgctcagcaagttaaaattaaatcagttgtatttcaaggatacttcgtttgtaaacctcatgaccaaacggatttttaatgttcttttggtagcaaatccgtatgatgcttttatgttggaggatgacgggcgtatagatgagaagatatttaatgaatatatgaacctcagtcttcgctatccgccacgttttacacaagtttctactgaggaagctgcctggaagcaattggagaacactacatttgatctggtgatttgtatgcccggatctgataacagtgatacatttgagattgcacgcagcataaaagaacaataccctcatattccgctggtggtactgaccccgttctcgcatggtattacggcacgtatggagcatgaggatctgagcatctttgaatatgtgttctgctggttggggaatacggacctgttagtgtctatcatcaagctgatagaagataagatgaatttggaacatgatattaaagaggtgggagtgcagatgattttattggtggaagattccatccggttctattcttccgtgttgcctaacttatataaatttgtgttgaagcaaagtcaggaatttgccacagaggctttgaatgctcaccagcgtacattgcgtatgaggggacgtcccaaaattgtattggcacgtacttacgaggaggcgatggatttatataataaatatcagaataatgtattaggtgtgattacggatgcacgttacccgcgtggtggtgtggtggatccaatggcaggtattaagttgctggcggaggtacgttccagggatccgtttgttcctcttattttacagtcggccgaggtagacaacaaggtgtatgcttcccggtatggtgctagctttgtggataagaattccaagaagatgaatatagacttgcgtgaaattgtgtctgatgattttggtttcggggatttcattttccgtaatcccgatacattggaagaagtggcccgtgttcataatttgaaggaattacagaatgttatttttgctattcctaaagaatctctcctttaccatatcagtcgtaatcacgtatcccgctggctgtattctcgtgccatgtttccacctgccgagttcttaaagcagataacttgggagtctttgcaggatattgatgctcatcgccgtataatctttgaggctattgtgaagtaccgtaagatgaagaatcaaggtgtggtggctgtgttccaacgtgatcgttttgaccgttattctaattttgcccgtatcggtgaggggtcattggggggaaaaggacgtggtctggcttttatagacaatatggtaaagcgccacgtggaatttgatgagtttgaaaatgcgacggtggtcattcctaaaacggtggtgctttgtacggatatctttgatgaattcatggataccaatagcctatatcaagtagcattgagtgatgcggatgatgacacgatattgaaagcttttcttcgtgccaagttgcccgaccgtctggtggaagatttctttgctttctttgatgtggtgaaatcgcctatagccatccgttcttccagtttgctggaagattctcattatcagccttttgctgggatatattctacttatatgattccttatttagatgataaatatgagatgctccgtatgttgagcgatgccataaaaggggtgtatgcttctgttttcttcagagacagcaaggcgtatatgcaggcaaccagcaatgtgatagaccaggagaagatggctgttattttacaacaggtggtcggcacacagtatggtgaccgtttctatccttctatttcgggggtggcacgttcgctcaactattaccccataggagatgaaaaagccgaagagggaactgtaagtcttgctttggggttgggtaaatatattgtagacggaggtctgactctgagggtgtgtccttatcatcctaaccaagtgttgcagaccagtgagatggaaattgctcttcgtgaaacgcagactcagttttatgcgcttgatttgaagaatacggggcataacttttctttggatgacggctttaatttgttgaagcttccggtgaaagaagctgataatgatggagccttaactttcattgcttccacgtatgatccgtatgatatgattatccgtgacggaatttatccgggaggccggaaggtgataacatttgccaatgtgttgcaacacgatgtatttcctttgccccgtattttgcagttggtacaggaatacgggcaaagtgagatgaggcgtcctgttgagatagagtttgctgtgacattgaaccagcaaaagaagaatggtactttctatttattgcagattcgtccgatggtcgatgtgaaagccaatcttgaggaggatttgaaccttattaaggatgaggatgttcttttaaagagtaataattcactggggcatggcattatggaggacattcaggatgtgatttatgtgaagacagatggttatactgcttccaataatccgaccattgcttatgaaatagaaaagatgaaccgtaaatttttggatgaagggaaacattatatattggtaggtccgggacgctggggaagcagcgattcgtggctgggcattcctgtgaagtggccccatatttcggctgcacgtgtcattgtggaggcggggctgactaattatcgtgtggaccctagtcagggaactcacttctttcagaatctgacttctttcggagtcggttatttcacaattaatgcctatatgaaggatggtatctataaccaagaggtactggatacccggccggctattgaagaaaccaggttcattcgtcatgtgcggtttgataaaccattgatagtgaagatggatggaaagaagaagctgggggtagtgatgttgccggaataatgttctaaattacgtgaaatgtgtcctaaatttcgataaaaatagttatacgcttaactttttattatatttgcacgatttttcgagtataaattaaattaactaaacaatgaaaaagaattttttttattatttgttcgcagtgatttgttctgtggcattgttcacatcgtgtagtgatgatgatgatgccgtgaaggggttaactattgataatgta

SEQ ID NO: 3891 - DNA, 46664 bp, Unknown
  gut microbiota DNA sequence
aaaataggtaggtctttctccaaaacgttgttgattgaataaaacaagtaaaagaaagaatttctctatgttaagataacagtttactttaaattcttaactttgttccccttgaaaaatgattgttacaagataatttaacagctaaaaatgcaacaatataaaagaccggaagctataaaacgtatgaatgagctggcgggtagccggaagcctttcctttttattatagattataaacagcagtgttccttgatagaggaaataagtcggattgattctacccgttgccgttataactttaatggagtgaaaaatgtggatactgtaacagaaagttacagtgggcggatagactggaactttgttccaatgtctttgacagactaccggcaggcttttgaaatcgtaaaacggaatattctggcaggtaacagctatctcgctaatttgacttgcaaggttcctgtcagtactaatcttactttggaggatgtgttccggtactccaaagcgctttatagactttggttgaaagataaactggtctgtttctcacccgaaatttttgttcgtatagaagatggcgagataaaatctttccccatgaaaggaacgattgacgctaccttacctaatgcggaaaaactgttgatggatgatcctaaggaaactgccgaacatgctaccattgtagatttgattcgtaatgatttgagtatggtggcggaacaggtcagggttgtccgctatcgttattgtgaccggcttgaaaccaataagggacctatctttcagacaagctccgaaatatgtggtgtcttgcccgatgattacccgtcgcatataggagatattatatttcgtttgttaccagccggttccataaccggagcgcccaaatccaagacgatggatattattgaagaagcggaaaattatgagcgtggattttatacgggcataatgggttattgtgacggtaggactttagacagtgcggtgatgatccgttttttagaacaggaaggagagaatctttattataaggcggggggaggaattacttcaaagagtgatttacaaagtgaatataatgaaatgatacagaagatttatgtacccatttattgaaactatacggatagaacaaggaaaagcgtgtaatttgtcttatcataatgaaagactgaacaatacccttcatcatttctggccggactgtgccggcatagaattaggtgaatacctgaaattgacaccggagatgaacggaatgaaatgtagggtgatttatgatggaggtggaataaaagaaattagttatgaagcctatcagatgcgtccggtacattctttgcagttggtttattcggatgatatagattatacttataaaagtacagacagggaagctttaaaccggctttttgcctgccgtggagaacgggatgatattttaattgtcagacgcggactgctgaccgatacttccatagctaatattgccttgtttgatggtaaggattggttcacacctaaattacctttgttgagagggacttgccgtacagcattgattgacaacggaattataaaagaaaaagatatccggccggaagaactatcctcttattcttttgttaggttatttaacgctatgattaaatggggagcgttggaattttctaccggaaccatttacggataataagaaagaaggtggaattttgaagatttttgtttgtttccttaaataatttgctatatttgcaaaaaaaatataaatataggtagggtatgagattgcggacagttgccaagttgggtatggtgctatcagtggtattgttttgtacggctgtgggcttttacggctttgctaaattaagcctgacggataagagtcgtgagatcaatctcttctcacttgtaccggctgattgcatcggtgtgttggagagtgataatattaattattttctgaatgaatttcctcaattgaactattctgaagaactgggtaatttccagtttcccggtttgtttaattatgtgttgggaggtttgaacgaatataccactaacactgctcatggtctgagcagtaagatgagccgggtggtggtcagtttccattctccgggtactccgcgtgaccaggtggtatatttccgtatgggggctgatgataaggaaacattgggagatatgttgttagagagaactccgggaagtttttcacctaaaaaagagaaatacagaggaaaaactatagcagtctatccattgggcaataatgattttctagctgtctatagcgaggcgggattctatgtggtgagttatcagaagagtttgatagagaaagtgattgatgcgcgtgaggatgaagagaaagcattgagtaatgatcccgtgtttgccaaagcgatgcagaaaaagaaaacgcataacttcctgactttatacggacgtacgccgtctatgcctttcttgcaggataacagtggctgttggagtgagtttgactttcacatgaacagtgatgtggtgtacctcaccggagatacttttatgcctgattcatgcggctgtgtgaaccagatggccgaaaaattgaagaatattccggatataagggaagatagtttgattatttctgctgataaagattccatggcaaattatatggaagaggcctacgaaagaaatagcaggacattgttcaatgaatgtgtagctaatctttcacgtgatgcagcctttatgcttgtggcggacatgaacaagatttcccgcaacccggaacgtttcgagccttatttgccggcatttctgttggagaatgctcctttattccattcgtttattctttcaacccaattgtcggttgtgaacgaccggctttcccatatcatggtactgacatataaggattagcgcaacttatgtcggtggaagtggggagccactttgcttctaaaataaaataacgaaataacagtgagtgcggctccgaatagataggccatcttgaaggtggctatttctgctatatatccgcccaataacatgccggcgcctatacctacatcccacgaagtcaagtaggtactggttgccgtaccacgctggttgttgggggccaagttcacaaacagcgtgttataggcggggaacatggttccaaacccaatacctagtaaaagagctatggtgaacagaaaataagtggtccattgcagactccatgttgtcagccatccgcatgaactcaaaccgaagaaacagaagcagaccagatacagaccggcttcaataacttgagtaaccattccccggtctaccaggcgtccggagaaaagacgggaaactgccattcctaatgccatgaaggtgaagaagaaaccggtggatgcctggatacctatttgcttggcatacattgcaacgtaattggtggtcatgccataagggatggatagtaataacagactgaaacctgccggtattcctttaagcaaaataaagcggtccaatgatatcggttctcgttttacaggaggtttgtaggtggtctttaccaatgaggcgcatagaaatcctatcaggcaggaacctaatgagcaacagaagataagcgtatagtctgctcctgcatcatgcaggaagagtccggtcatcggtccgatggacatggctatattgtttgccagcccataatatcctaatccttccccacggcgtgaagaaggcatgatatcaatgacaatggtatttccgctgactgtcaccatgccgaatgatactccgtgtataatgcggaataaaataaataaggtgagtgttcctgcaatgagatatcctccgaagatggcggtaaaagtgaaataagccaacagataaagtggtttgcgggcaaatgtatctaacagatagccggaaaaggggcgtatgcacagggcggcaatggtgtaacaggaaagtatggcccctatggttgttttgttggcgtcgaaaacttctgccagatagaaaggcaatacaggcatcagtaaccagaatccaaagaataatagaaaattggctgccagtatttctatataatttttggtaatcagcttgtccttcataagcaataatgtgctaatatgtcaatgtatcaatatgctaatgtggcaatatgttaatatgccaattgaccgcgttctattccgcatggcaattggcatatcagcacatggtcacattgacacattattaattggctgcttcgaattctttcaggaagcgggtatcgttttcagagaataatcgtaagtcgtttacacgatatttcaagttggtaatgcgttcaatacccatacctagcgcatagcctgagtaaactttgctgtcaatgccgttggcttccaatacattcggatccaccataccacatcccagaatttccacccagcctgtgcctttacagaacggacaaccttttccgccgcaaatattacaactgatatccatttcggcacttggttcggtgaacgggaaataggacggacgcagacggatttgagtatcttcgccgaacatttctttggcaaacaacagcaatacctgcttcaaatcagtgaatgatacattcttgtcaatgtagagtgcttccacttgatggaagaatgcatgggcacgataactgatcgcttcattgcggtatacacgtcccggacagatgatgcggataggaggttgcgaatgttccatagctcttgcctgtacggaagaagtgtgagtgcgaagtacgatgttctttttcacatcttcctgattggcttcgatgaagaaagtatcttgcatatcacgtgcaggatggtcttcggcaaaattcatggcagtgaatacgtgcaagtcgtcttctatttcgggaccgtcggcaatactgaagcccagccgatggaatatatcaatgatttcattctttacaatgctcagcgggtgacgtgttcccagttcgatgggataagccgtacgggtaagatccatttcggctgcgctgttatcttgggtttcgaaagcttctttcaatgaggcgatacgctcctgagccttgttcttcagctcgttcagtttcatacccacctcttttttctgctcggcaggtacgttgcggaagtctgccatcaactcattaatcgctccttttttgctaagatatttaatgcgcaaggcttccaattcttccgcattggctgcttgcaagccttcaatttcctgaagtaattgttctattttagctaacatagtttcttctttattttttaatgaccgcaaagttagcgaattaaacccatatattttgctgaaaactaaaaaaaacgatatttttgcatcgattttttctaaatatagaaaatgagaaaacttataatcggagtttgtctgcttatgctgataagctcctgtggaggtgggaaaaagaaaatggaccccttcgagacgcttactgaggagattgattcgctgactgcaaccccggacacaacagaagcgatggctgcggtagaggaagaaccaatggttcccgctacggccgacgaaagttttgccgactttttctacaattttgctagtgatgaaaaattacaattgtcacgcatcgtgttccctttgccgtattatacaatggaaaagaaagagcacattgaaaaggagcaatggaaacacgatcctttattcagccggcaggatgcctatacagttctgttcgataaggcggaagacatggaaatggagaaagatacggggcttaccagtgtcaagatagaatggatttacttgaagaagggaaaaatcaagcggtactattttgagcgtctgaaggggctgtggaaactggaggccatagatttcgcggatatgccgagagaggataccggtaaggaggacttctttgagttttatgaacgttttgccaatgattctgttttccagttgtctcgtttgcacgaaccgttgaagtttgtgaccgctgatcctgaagacgagtttcagatactggaaacgactttggaggccgggcaatggttcgcattccagcctgtattgcctcgtgagaatctgactaatgtaaactatggccagaacgagaatgtgcattccaatacgaaggtgattgaaatgaaaggttttggcaatggatttaataatacgctctattttgaacggcgccacggtttgtggaaactgatgcagtttgaggatctgagcgattgatttgattgtaaatgaaggaaataaaagactactctctgttgcctcataatacatttggtatggatgtgaaggcatctttgtttgtggaatatgaatcggtgacagagctgcaatccatcttgtcggataaaaaactgatggccggtaactggttgcatattggcggaggaagcaatctgctttttaaaggtgattatgcgggaactgtcctgcattcggctatccgggggtatgaggtggttgctgaaaacgaacaggaaatagaggtaagggcaggagccggtgaggtgtgggatgattttgtggcatataccgtgaaaaacagttggtatggtgctgaaaatctgtcattgattcccggtgaagtgggtgcttctgccgttcagaatatcggtgcgtatggtgttgaggcaaaagatttgattgtaagtgtggaaaccgtcgaggtggaaaccggcaggaaacggatttttaccaaagaggaatgccgttacgcttatcgtgaaagcattttcaagaaagatttgaaaggtaaatatatagtgacttacgtcacctatcgtttaagtaaacagccggtttttaatctggagtatggaaatgtgcgtggcgaattggaaaagcgaggaggtgaggtggcattggagaatgtaaggaaggtgattattgccgtgcgtgaagccaagttgcccgatccccgggtgcagggaaatgccggaagtttctttatgaatccgattattccacgcaggcagtttgaaatagtacagcaacagtatcctgatatgccacattatgaggtggatggcaatagggtgaagattcctgctgcatggatgatagaccgttgcggctggaaaggcaaacaaataggacgcgcgggtgttcattctaaacaggcattggtcttggtgaactgtggaggcgctacgggagatgaagtgattgctcttgccagacggatacaggagtctgtgcttcaaaagttcggggtggctatctctcccgaagtgaattttatataaggtatgatatgaagattacaatactaggcagcggaacgtctacgggagtacccgaaatagggtgcaaatgtccggtatgcaccagcagcgatccccgggacaaccgtttgcgttgttcgggactggtagaaacggaagggctccggattctgatagattgcggtcccgatttccgtgaacagatgatacggttgaacgatttcaagccgttggacggtgttttgattactcacgaacactatgaccatgtaggaggcttggatgatttgcgtcctttctgtcgttttcgcgatgtgccggtttatgccgaacaatatacggcagagcgtttacgccagcgtattccttattgttttgccgaacatctttatccgggagttccccgtattacattagaggaaattgttcccgattctccttttattatcggcaatcccgaaggaaacaaagtagaggtgacacctcttcgggtaatgcacggcaaactgcccattttgggataccgtatcggccggatggcatggattaccgatatgttgacgatgcctggggctgaatatgatttgctgcaaggactggatgtgttggtaatgaatgcattgcgtcctcagcctcaccatacccaccagaatttgaaggaggctttggacaatgcacaaagaataggagccggggaaacctattttattcacatgagtcatcatataggattacatgctgatgctgaacggttattgcctccgcatgtgcattttgcatacgatggaatgaaaatttgtttataaagccggcttcaacgaataccggcacaatccgttcaacccgcattccgaacatttcggtgtccgtgccacacaaacatatcttccgtgtaaaataagccaatgatgtgcggtgggcacaatctccttcggaatatacttcatcagatatttctcggtagccagcggtgtggtgcaggtttgaggaaccagcccgatgcggtggctcacgcggaacacatgtgtatctaccgccatggccgctttattgaatactacactttggatgacattggctgtcttgcgtcccactcccggcagtttgaccagttcttccaatgttcccggtacttcgctatgaaaatctttcaccagcatttgcgccatgcccaccaggtgttttgccttgttgttgggataacttacactccgtatgtattcataaatcacttccggcgtcgaagcggccaatgcctcaggagtcgggaaatcccggtaaagaggaggggtgatcatatttacccgtttgtccgtgcattgtgcactcaggataacagctatcaataactcgaatgggttattgtaatgaagttcggtttcggcaacaggcatcgcttcttgaaaataagcgatcaccttgttataaagttcttgttttttcatcttaccttcttttttcggttacaaatataattgataaatcaatagggtagaattattcaagcaattcatttgtttagttgagtaaacttcttatatttgcataaatatattagatttatgcagcttaacgtaaagaatgaaacttctacattgaaagctgtggtgcttggacaacccggttccatagggaaggtccccacgctggaagaaacttatgacgccaagtcatacgagtccgtattgcataacatatacccccatgaagaagatattttcaaagagatgagatgctttgaaagcgtattgttgaaatatggggtacaggtctatcgcccgtggacactggagaattgtaatcaggtgtttgcccgtgatgtggggtttgtgattgacgacaagattattgtttccaacatcattcccaaccgggaggatgagaaggaagcctacgaagtggtctataatcagatagcttataacaagattttcaaccttcccgaaaaggcgcacgtagagggaggtgatgtggtgctttacaataatatagtgtttgtaggcctttatacccagcccgattacccgcagatgaagacggcacgtaccaaccggtatgctttttcctttctgaaagaaatctgtccggggaagatatttatccccttggagctgaaaaaacataatacagatccacgtgcggggattctgcatctggattgtacctttatgccggtagggaaagggcatgcgattatttataaggacggatttatgtatcctcaggattatcatactctgctcgatttgttcggcagggagaatgtatttgaaataacgcgggaagagatgtactatatgaatacgaatgtcttttccatctctcctgaggtggtggtttctgaaaagaactttatccgcttgaatacctttatggaagaggtatggggaatgacggtagagcgtgtaccttattatgaaatatctaagatgggcggactgttgcgctgctccaccttaccattaatccgagaaaatgactaaacaaacaacaaaccacattttgatggtggaacccgtggccttcgggttcaatgaagaaacagcggccaacaattatttccagcagcggacagttgcggcaggtgaaacagtacaagcttgtgccttgaaggaatttcggggcatggtggataagttgcgtgcaaacggcatagaggtaatagtggtgcaggataccccgatacctcatactccggattccatatttccgaacaactgggtgtcctttcacgacgacggaacggtggtgctgtatcctatgtttgcggaaaaccgcagggcggaaagacgggcggatatcttgcagcggatagagtcggaggggttcagcatccgtcggaaggtagattatacaggttttgaggaagaaaaccgcttcctggaggggaccgggggaatcattctggaccgggtgaaccgttatgcatacgcggctttgtcgcaacgggtggacgaagcattattgggtcggttctgcaaggaacagaactttattccggtgccctttcgcgcctatcagactgtaaacggacaacgtctgcccatttatcataccaacgtcatgatgtgtgtggcaacagattatgcggtcgtttgtctggacagcatcgacgacgtggaagagcgtgagcaggtttgtcacgtcttgcggcagacagggaaagaaatcattgccatctccgaggaacagatgcatcactttgccggaaatatgcttcaggtggagaacgggaaaggcgcattgcttctagtgatgtctcaaagtgcttacgattcgttggatgaaggccagttacaacggctgtctaagtataacgcgttgcttcccatgcccatccctaccattgaaacgctgggaggaggaagtgcccgttgcatgatggcggaaatattcttgaagaaagaaaaacattaaataataaaaagcttatggatgcaaaattatcggcagctcaattgatggagcttgagaacaaacatggagcacacaattatcatcctgttcctgtggtattggataaaggagaaggtgtgtttgtatgggatgtggaaggaaagaaatattatgatttcctttccgcttattcggcagtgaaccaaggacattgtcatccgcgtattatcgatacgttggtaaaacaggcgcgaaagctgactttgacttcacgcgctttttataacagccagttgggacggtatgaagaatttgtcacccgttatttcggatatgacaaggttttaccgatgaatacgggagccgaggcagtagaaaccgcattgaagctttgccgcaaatgggcgtatgaagtaaaaaagcttcccaaggatacggcggaaatcgttgtatgccggaataattttcatgggcgtactaccactatcgtttctttctccattgatccggacgcttacaataactacggaccttttacccccggttttgtcgtgattccctacaatgatgccgaagcattggcgaaagtgctggacgaacatcctcatgtggccggattcctggttgagcccattcagggagaggcaggtgcttatgtacccgatgagggatatttgaaaaaatgttacgacttgtgccgtgcccacaatgtactttttatagccgatgaagtgcagaccggcattgcccgtacaggcaaattgctggcttgtgactatgagaatgttcatccggatatcctgattttgggaaaggctttatcgggtggggcctgtcctgtttctgcggtattatcatgcaatgaagtgatggatgttatccgtccggggcaacatggctccacttttggcggaaatcctattgctgcggcagtggctgttacggcgcttgaggtagtacgggacgaacagttggcggacagggcatacaggctgggactgatatttcgggaagagatgagaaaactgtgtgaaacatctcgtgtggcttcttttgtccggggcaagggattgctgaatgcgttgataatcaataatgatgaaacgaaggatttggcgtgggagatttgcttgaaattggccgaaaacggtttgctggccaaaccgacacatacgaatattattcgttttgctccgccattggtgattacagaggaacaattaaaggagtgtatcgaaattataaagaagacgattgctttgtttgaataaaggatttttttatcctgtcttttaggggtggattcaatctgcccctaaaatcgtttttactgatacccacctgtttgtgacgcttcatctttcattgttccatactgtttggctatagaaaaggtaattatttgatgaggctgtttcttcttgataagaatatttaatgcagttatatccggtttactcggaaataatttctatctttgcaccccgaattaaaaaaatagacgtatgatgccgtgaatagcggtcgtgtattctagaacaccacgtaaaaaacaggagaaatgaagaataataatactgtatctgtatcgttcatgttgcttggcatactgttttgtgtatgtcttgtcgcagcaaatttattggaaaccaaagttgtccagatctggaaaattacggcaactgccggactggttgtatttcctatctcttacattatcaatgattgtatagccgaagtatggggcttccgcaaggcacgtcttatcatctggatgggctttgccatgaatttcatggtggtagctttggcgcagcttgccattctgatgcccgcagctccgttttgggaaggagaggatggcttcaacttcgttttcggcatggcgccccgcatcgctgtagccagtctgaccgctttcttggtcggctcttttctcaatgcctatgtcatgagtaaaatgaagctggcttcgggaggaaagaacttttcacttcgtgccatcacttccactttggtgggtgagagtgccgattccatgattttctttcctgttgcctttggaggtttgatgcctgccggtgaactgataaagatgatggttattcaggcagtgctcaagacactctatgaaattattatcctgcccgttaccatccgtgtggtaaattacatcaagaaggtggatggcagtgatgtctttgatgagcatatctcatacaatgtattgaaaatcaaagaactttaataaggtgctgatgtgtcagtgtgccggttagccaattaccatgcggtatatggcgcagcatatccacatagcgcggcaattggcacattggcgtattagtaaattgaaaaattgtcaacaatgaataaaagtgacgcattggttgtgttcagcggagggcaggactcaaccacttgcctgttttgggcaaaaaaacatttccgcaaagtgtatgctttaagctttatctatggacaaaagcatgtgaaggaagtggaactggcccgtgctattgccggaaaggcaggggtggagtttaaagcgatggatgtttcctttataggcaacctgggtaaaaattcgctgacagatactacgataacgatggatgaggtgaagcctgccgatagtttccctaatacgtttgtgccggggcggaatttgttctttctgagcattgcagctgtctatgcacgcgaattggggatcaatcatatcgtgaccggtgtgtcacagacagacttcagcggttatcccgattgccgggatgcttttatcaagtcgctgaatgtgacattgaaccttgccatggacgagcagttcgtgcttcacactccgctgatgtggattgataaagcggaaacatgggcgttggcggacgaattgggcgtgctcgatttgatccggcatgaaacgctgacttgctataatggcgtacagggggatggctgcggtcattgcctggcctgtaagctccgtcgtgaaggattggaaaagtatctggagataaaggcggaaagagagaaacgataggataaacgaaggtgttttctctttgtatgaaaggtgttcctttcttgtcaggtatatcgtttcactttagtgagcaagttttatcactgaagtgaagaagtttcatcactcaagtggtacagtttcatcactttagtgaaacgatgtacttggcagggagagaatttctattccaaggtatgaaagagaaaacatgaatatgaaaaaaacagattttaatggaaagaaaagatgaattgacccttctcgggtcgaagaccgagtacaggcaagattatgctcccgaagtgttggagtcctttgtgaacaaacatcccggaaacgactattgggtacgttttaactgtcccgaatttaccagtttgtgtcctattacaggacagcccgattttgcggaaatccgtatctcctacctgcctgatgtgaaaatggtggagagcaagagcttgaagctgtatttgtttagtttccgtaatcatggcgattttcatgaagattgcgtgaatatcatcatgaaagatttgattaagctgatggatcctaaatatattgaggtgacgggcatttttactccgcgcggtggtatttccatttatccgtattgtaattacggccgtccgggtactaagtatgaggaattggcggagtatcggatgcgtaatcacgatttatagatgtatctcttggaatgaatagatagattgtgggctcaaatatttgctggttttgaaaatttgttctatttttgcactccgaaaaaaggagaggtgctcgagtggttgaagaggcacgcctggaaagcgtgtataccccaaaagggtatccggggttcgaatccccgtctctccgcaaaagtagaaaagttaaagttgtagattcttgaatttgaacaattcaagaatttttctttttccagcacttatctgtatggatgataatgcggaaagtggtgaatacaaaaggtgaataagaaacagtacccatagttcaggcagattgattttataatggatgtaaaaacaatctaatcgggatattattatggatataaattgattgacgcaaaggctggaaaagtatagcttaccctcaatgaatcatttatgaaggattcctttctaaatccttcacgacaacacattgaaaaacaatgtattgtgtaaatatgaaggatttgaaggatttcccggtgtttttttattttaataggttttatgataactccaatcccagtgcttcttttaatttcagcagattcgggtttttcttgctcatcatctggaaacgttccacgtggctgtaagcacggatgttctcggtaggggcactgacacgtaccgtcatggtgattttccggttgtgcagacgttcgcgtaagtgattctgaaccgatggtatcaattgtaccatatatttttccaccatatcattgtctactgtcacttcaaaagtcgtgtcattcaacaaatgcggatgcatgttcatcattcgtgcggagttagccttctcttccttgggcagggcggctgcaaattcacgccagtaatagtccagatctttttcattgaaaatataatcttcgtatgtggcatcgttttgggcagcggtgcttgccgcttttgcttcttgcttctccgcggcttgctgttcgtgcaaaggacggcgcagggatataccgagtgagcccgccttgaacaccgggatttttttctcttctctggtctgaggcagcgggcttggacggcttgcgttcatactgccggctgtacttgtaccctgtggctgaggagcggcggttgctgcggtctgtgcagcggcagttttagcctgaggctgtgactgcgtggcggctgtggaagccgcttgctgcgtaaataggggttttaatatcttcttagggccacgcccaccacttacatcgtcggcatcgggcagagtgagttgggcgcattgaatcagtgtcagttctaccagcagacgtttgtttttgcttgcacgatagttcaggtcacaatcattgcatagcttcatggcacggtacaggaatttctggtcgcatttttgtgcttgttctttatagcggtcgcggataccggcgcctacttccagcaattgcagggtggaagggtccttgctcaccagcaaatcccggaaatgagaggatagtccggtgatgaaatgactgccgtcaaatccttttttcaatacgtcgttaaaaagcagcatggattcgggaactttgttttcaagcaacaaatcggtcagcttgaaataatattcgtaatccaagacattcaggttttcaatcacacttttgtaagtgatgttcccacctgtgaagctgactacttggtcgaagatggaaagagcatcgcgcataccgccgtcggctttctgtgcgatgacagtcagggcttcgggttcggcgttgatatgttccagtttggcaacgtattgcagatggtcgatagtgtctttgatgccgatgcggttgaagtcataaatctggcaacggctcagaatagtcggcagtatcttatgcttttccgttgtggcaaggatgaagatggcatgatgaggcggttcttccaatgttttcagaaaagcattgaaggcggcttgcgacaacatgtggacctcatcaatgatatataccttgtacttgccgatttgtggcgggatacgtacctgctcaatcagcgaacggatatcttctaccgagttgttgctggcggcatccagttcatgtatgttgtaagaacgctgttcgttgaatgccagacaagactcacactgattgcaggcttctccttcggcagtgggggtctggcagttgatggtcttggcaaagatacgtgcacacgttgtttttcccactccacgcggtccgcagaacaggtaggcatgtgccagcttgccggtggcaatagcattttttaaggtgatggtcaacgcgtgttgccctacaaccgattcgaatgtagcgggacggtattttcgtgccgatacgatataattttccataagcggagttcttttttctaatatgagttctgcaaaagtacataaattatccgtttttatgggtaggattgcttgaaatatttctatctttgcaaaaatcaaaaaagggattctttgtatgagcaaattgctgactatttggaactacatccggcgccataagtatatgattacggtgctgatctttattgtagttattggttttctggatgagaacagcttgattcagcgggtaaagcatcgcagtgagatcagcgcgctgaatagtgagatagagaaatatagaaagcaatatgaggaagatacggagaaactgaaggaactgaccacgaatcctgaggctttggagaaaatagcacgcgagaagtatttgatgaagaagcctgacgaggatatttttgtgtttgaagaatgagtaaatcttataatataatttcgatggcaggggcagtcctgctgctggcaggtgcggtgttgcaaatcacccggtgggagcttgcgccttatctgtatacgctgggtgctgtgatgttcggctatgtgcaggtcatggggaatcgttatgatggaaggaattttatcatcaagcgtttgcgtagacagcagattttcggggctgtcgcactggtctttacaggagtattgatgtttaccatgaaacgtaacgaatggattgtttgtctttccattgccgctgtcctggaactttatacggctttccgtattccgcaggagttggagaaggaaaaacgttaagaaaccagtgtcatttcttgtccgcgtttatagaggcttgtcttgtgaaaaataggagaacgcggacgacacttgttacgtgtggtccgcgttctaaaaaatagttgtccggtattgttattccacaatggtcatttcatctaccaagtgtttcgctcctgcaaacttatcaataataaataaggtatagcggatatccacacaggctgcacgttgtaactggggattgtaagcaatgtcaccggtcagtccttcgtagttgcggtcaaagccggtaccgatcaattcccctttgttattgaaaacgggggagccggaattacctcctgtattgtctgttcctgtaacaaaacagatgggcatttcaccatttttcatggcatagcgcccgaagtctttcttgttatacaagtccttcagtttggccggaaccacgaattcatagttgttcggatcctctttttccatcactcctttcaacgtggtgtaatagttgtattccataccgtctttggggctgtatgaacctactttaccataagtgagacgtaacgtggagttggcatccggataaataggagtgccttcatgctgtttcagcttcatcataccctctacccaggttttatgggccagattataagcatcggtttcggctttcatggctgcatcggtatctgcataaccttggtctactgatttggcatattgcaccatcaggtcattttccaatgtcttggcatccggctttgccacaaagttgtcaaaggcttcacggcttcggaagatggatgtatcaaaacaagcatcgacaaaggcgtcaatgtttcctttgaattctttgtctattactttaaagatgctgatgcgctgttcggccggaattaattctgcgtaagtcttcagcaaagctttggaaactttacggtctatttcgggattatagtctttattgaaaaaattatcggcttgtttgatcagtgtgcttaatgcatgatccagcggattgatttctttagtagcatgaggtactttatatcctttttccaatgcttgcaggactttgtctgtggaaggaatcttatagaattccgttcccagtttgcaaacttcgtaaatggcttgctgatgatatacggcatcccggcgtttgctcacgatttcccggatagcatcgaaggctttctggtaggcgtcagtacccgtctcacgtccgtaagccagaagcttttcctgttgtttctttttcgtatcaagtactttcagctgaaccagtccttcgttcataccgatagcattcttccagtaattggctgacgaggcgtatttgctggcatactggatgcgtactttatcacttttcagcatctcttccagcagattattcaatcgtacggtgcggacggtcttacgcatgaagttggtagtctgcatacgttcttccacttcgtccgaaatcatgtatcgccagttgcgtccgggaaatcccattacgaaagtgaagtctccctctttgattcctcccaggttgatggtcagatgttttttcaccttcaagggtacattgctttcgttatagtcagcaggtttaccgtcgggtgttgcataaatgcggaacatggagaaatcgccacagtgacggggccacatccagttatcggtgtcagctccgaactttccgatggaagaaggaggagcgcctaccatacggacgtctttatagatggtctttataaacaagtaatagcggttggctccgtagaaaggctttagttccaaagcggtgaacggagtgatctctatattttcttgttcggcaaaacgtttggctactttgctcagataggagggggacaggtagttcaatccttccgggtcctcatctttggccagttgttcctttacataaggagtgacgtccagaattctgtctatgaaggtgacagtcagccccttgcagggaagttcttctttgcggctcatagcccagaagccgtcagtcagatagtcgtgttctaccgaactgtgttgctggatatagctgtaaccgcaatgatgattggtcagcacaagaccttcggcagaaatgatttcaccggtacaaccacctccgaaatgcactacagcatccttcaggctgatgctgtccggacaatatactttatcaatgctgatatccagtcccatatcatacatggtggccgcattctgttctttcagatcagtcagcatccacatcccctcgtcggcatggccggcaagggttgtgaaagtaaatagcgagagtaatagtatctttttcattattcaacaatagtcatttcgtcaatcaggtgtttgcatccgcccaatttgtcgatgatgaataatacataacgtatatccactgcgatacaacgctgtaagttgttgtcgaaattaatgtcaccacttagtgattcccagttgccgtcaaaagcggcaccgatgagttcgccgttaccgttgatgacgggagaacctgaattaccgccggtaatatcattggtagtcaggaaacaagcaggcatatcaccgttgggcaatgcataacgtccaaaatcttttgcttcatacaattctttcagtttggcgggaacaacaaattccggattggtaggatcctctttttccatgacacctttcagcgtagtgtagtatttatagtgtacgccgtctttgggattgtatgatttcacattgccgtatgtcagacggacggtgaagttggcatccggagctttgggttccggtgaatacatttcacacaggccgcgtacataagttttgtgtaataaatccatgcctttcatcgattctgccagttcgtttcccagcttatccatcaagtcatatttagcccgtacgtatgcagtcataggatctttttctatggctttcacggtaggtttcttgatgaatttattgaaattcgcttcgttggagaagatggaattgtcataacaatggtctacgtatgcgtcatagttacctttaaaatccttctggatggtagtatagaaggcaggtaaagcatcggcaggaaccatttcggcatacaggggcaacagagctttggccactttgcggtctacttcgtgatcgtagtctttgttatgtatatcggcatatacttttttcagcgtttcaatatttttattaatcgcttctttatctttatttttgattgcgtctttcagcttgtccagaatcagataaggagtgccgaattctatacctccttgaaagacttcacggaaacaggtgtagttataaagaataggattactcttttcgatggcggcatcaatttcgctgactactttttcataatcagtgttgcctttggctttagcaaatgctgcgaacttggcttcctgttctgcttttgtttccaataccttgttgtcgataatggctttattcatgccgatagagtttttccaatagttgctggaacctgcatatttgctggcgtattggatacgtactttgtcactggcagccatttctttcttcagtacatcctgacgcacaccacgtatgcggatacggggttcgttggtggaatgcatccgttgtttcacttcactttgagtcagatagcggttggtgcttccggggaatcccataatcatggcatagtcaccctcgttaatacctttcagtgagatagccagatgctttttggctttcagaggaacattgttttcattatattctgccggttcgccgttggcatccgcataaatgcggaagacggagaagtcgcaagtatggcggggccacatccagttgtctgtttcaccaccgaatttaccgatggatgaaggcggagcggcaaccatgcgtacgtcgctgtaggttttcagataaatcagatagaatttattgcctgcatagaaaggcagagcttgtgcgctgatacctgcttttccgttcaggtcactggctttcagttcctcgtcggccagttttttcaggaagtcgtattcaaaggtttcctcttcttttacttcgcctgattttactttattgtttactttatctgtgacatcgacaatgcgttctacaaatttgaacttcaatcccggagtcggtagctcttctttgcggctttttgcccaaaaaccgtcagtcaggtagtcatgttctaccgagctatgttgctgtatcgctccgtagccacagtggtggttggtcaggatcagtccgtccggtgagatgatttcaccggtacatcctcctccgaaaatgcctactgcatcttttaatgaaacgcggttcgggttataaatgtcgtctgcttccagcagtaagccttgtgctttcatgcggtctgccaaatgctgctcttgcatcagttgcaacagccacataccttcgtctgccttcgacggcaagaatgctacacacatcaatgcgagcaataaaagtttgaattttttcatgttgtgtactaattgttatttctttatccttatatcggttacaaaaatagaaaaaaagagggaactttgcactataaattgccttctcggtaataatcttctatttagttttaaattttaataaaatatttttgtcactaaattatagattgtacctttgtatgcgaaaaatagtaatggggcgtagataagcatgaataaactttttttctctgtggtatctttattggcttttacttcatgtgccagtgagtataagatagaaggtagttcttctgtttctcgtctggatgggaaaatgctatttgtaaaagttcctagtggagaccggatgctgagtattgattcggcagaggtaattcatggaatgttcaagatggaaggtataaccgattctacttcaatggcatccttgtatatggatgatgagagcatcatgccttttgtcattgaaaaagggaaaatatccatcagtattgataatgcccgtattgtagttaccggaactccgttgaatgatcgtctgtatgattttgtgggaaaaaagacttctttggatgacagagcatacgagttggagcgtcaggagagccgtatgattatggatggaaaagcaccggatgaaattcaacgtgagataacgagagaacgtgagaaactggctgctgaaatgaatgcattggctaaggagtttatccagaagaattatgataatgtattgggaccgggtgttttcattatgttgtgcagcaattttccttatcctgtcatgactcccttgattgaggaaattatagaggaggctcctgaccgatttaaaaataactccttggtaaaggattatgtgacagtagcccgttcgaatatggaaaaattaaaagctccccattaatgaggagcctttttttatctgtcttggtctggattgtctatttttccttgatatttttcaggtaagtctttctcaatttccctgtaagcctcttccatggttgctttgatgttttccattccctggctttgcggataaatgggcttatgtacgactaatgtcataggatgccaggatacaaaaccgccggtacggggaagaatattaaaggagccgataatagtgagtggtactacgggaagttgcaaatcatctgccagttggaaagcacctttcttaaaatatcccatgtgcccggtaaaagtacgtgcaccttcgggaaataccactagagaagttccatcctgtagtacgtgacgggcatgttctatggtttctattaccttcttgggaccggatttatcaacgaatatatgtccggcagcttcacaggctttgccgacgaaaggcattttgcgcagactttttttcatcatccatttaaagtttcgtcccagaaaaccataaatcaggaagatatcgaaagagccttgatgattggctacaaacacataggatgtttttttaagtacttccggatgtcctactaccttgacaggaataagtaatacatagcagaaaagctgtgaccatatttttcccggataatatccccaaaaatgcggattgcctatccatgaaccaataatggtaactattgctgtaagtatggttaataccagcaaaatgggaagtgctatgaatagttggtataaaatatatagtactttcatttgtctgaattttagttgtacaaagatagaaaaactattttatattttatgtaacgtgattactgtaatttccggccatgctccaaggcgcatagggaacatcaggtagcccaaaccaatattgacaaacaaggattgttttccttcctggtataaaccgttgtgttcgggatatacgaatttagcaggagagaagccaaacaggctgaactgcatttcatgggtgtggcctgaaagcattagctgtacatcactttccggcaagacttctctgtgccaatgagtggggtcatggctcattaatattttatacattccttccgttccttttaatgctttctgcagatctccataattgggaaatgggggatttccgctgttctctacacctgccagggctatactgtctccatgatgatgtagaatgacatgatcgttattgagtattttccatcccatggcagcctgtttggatttcaagctgttcaggttggcttcttgagcttcttccgtttcccattttatataaggggaatagtcatggttgcctaaaacggaatacactccgtcttttccttttatctgttctagaatagggataaattcgtccaattccgttgccacgttattgaccaggtcacctgtaaaaagtaccaggtcggcatgttgtgcattaataaggtttacagccttctgtaaagcagcaccgttgccagtccagctgccggaatggatatcagatatttgtacaatgcggtagccgtcaaagccgctgggaagttcatcggaactgatggttacctccctgatttgaaaatgctgttttccttcggttgctccatatattacatatattaacgaggctaaagccaatcctcctgctacatatcctccatacagttttttgccggagatgatatataggagcttcataaacaggataacaatgacgaaaagtgccttgggtacggagaaacaaagaaaaatcaataagaaattgctaagtcgctgcatggaatccggacgtggctcatgtatagaaaagactaatgtcattcccaataaaagaaacagactgggaagccaataagcccaatgtgtccatttttgggaaacacggcgtatatatgccttgtatatatacatatcgggcaatatcagtagcagtagaaaaaacagaaataactttatcagcatcataatttattcgttttttatagattggcggcgagaaactttttagtttcttctatactcatgccccggcgggcggcgtaatctgccaattggtcttcacctatttttccgatggagaaatagcgggaagccggatgggcaaacatgagtccgcatacagaggcatggggcttcatcataccattctcggtcaatgaaattcctatttgcttcatatccagcaactcgtctaataggaaattgacggattggtcgggcaaggaaggataacctacggcaggacgtatcccttgatatttttcattatgcaggtcttttacgcttaggttttcatcaggtgcatatccccaaagttttttgcgtacatcttcgtgtagtttttcggcagtagcttccgccagtctgtcggacaatgtttgcactaacatacgtttgtaatcgtcttctgcatagagccgctccatttctgcatctaccgtagtggcgaatgctcctattttgtctgtgatacccgatgataatggacgcacaaagtcactcagacataaaaacgggtcatcttctttcaattttgctgtttgttgacgcaaaagcggaaaacgcttgctgttcagcagcagatcatctccgtcggcattggcatccatgatattgaccactccgtgggtctgatacgctgtatccagttcattcaacatccgatttgcctctttgaaaagctgcatggcttcactggctttcggacggtcttcttccgcaaaaccggtgagccacatggcccggcatgaatcacatccatgtatgtccgcaatggcggcaaacttgggttgaaagccccatgcatggaaaaaataaatccagttaatgtattcgcttacttcgtgaatcttgtaatttacaatcatcttttaaaccttaattcttgtccgcgatgactttggtctaccttgttgtcactgtaaaccagatcaccattgacgaatgttttttctacccgtgtgtggaatttctgtccttccatcggagtccatccgcatttgcttaaaacgcagtcggcagttacagtccattcatgatccggatttaccaatacgaggtcggcttgataaccaggacggatgtagcctcgtctttcaatatgataaagttcggccggtgcatggcacattttctgaaccagttgctctatgcttaatatgccttcgcgtactaattccatgatagctactaatgaaaactgtatcatcggcatacccgatacggctttcaatgctcccccttccttttctttcagtaagtgaggggcatggtcggtacctattacatctatcagattggtagacaatgctttgcgtaaagcattccggtcttctgaagttttgatggacggattgcacttgatacgtcctttcaatgtctcataatctttgtcatagaagtatagatgtgacacgcaagcttccgccgtaatctttttttcactcaggggtttgtcttcaagcaaatccagttcttgtgcggtgctgatgtgcaggatgtgcaggcgggcattgttttcttttgccagccggatggccagtgaggaagaatatgcacatgcttccgcactacgtatctgcggatgatattttatatcaggatcttctccatatttttctttgaaggctgttgtattggcactgattatagattgttcttcacaatgtgctgcaatcagcatacctgcattggcaaatacttttctaagtacttccatgcggtctaccaacatatttcccgtgctggctcccataaataatttaacaccgcatacccggcttttatctagtgtggggagtacatccgcattcgtattggttgctccgaaatagaatgaatagtttacgatgcttttggttgccgcatccgcaaacttggcattcaaagcttccagggtcgtagtttgcggagtggtgttgggcatgtccataaaactggtgacgccacctgccgccgccgctgtgctttcagtatgtatgtcggctttatgagtcagtcccgggtcacggaagtgtacatgatcgtctataactcccggcatcagataatagcctttcgcatctattatttctccacaaggctgggagggaactgtttcttctgccagcacttcagctatgacttcattctcaatcactatcgaaccgtgaaaaatcttgccttcattcacaatccgtgcattctttatccatgtacgtttcatactgttttcttttgcgggtatttgcggaaccagctacccagttttaattgaatgactcctaatacagcttcaccgaagatacttccgttcatttttgaagtacctaattcgcgattgacaaaaatcacaggaacttcggctatcttgaatccgcacttgtaagcagtgaacttcatttcaatctggaatgcgtaccctttaaaacggatgccatccagaccgattgtttccaagacttcacggcgatagcatttaaatccggcggtagtatcatgtatgggtaaccctgtgataatccgtacatatttggaggcgaagtaggacatcagcacacgccccatcggccagttcactacattcacaccactgacatagcgtgaaccgatagctacatcatagccttcaacggcacatttgttatacagccttggcaggtcattcggattatgactgaagtcagcatccatttcaaatacaaaatcatattgatgctctatcgcccatttgaatccggcaatgtaagcagtacccagtcctaatttacctttacgctcaatcatgaaaagacggtcggggaattctgtttgcagtttacggacaatggttgccgtgccgtctggtgagttatcttcaataatcaatatgtggaagaacttttccagtccgaatacagcccggataatgttctctatattttccttttcgttataggtgggtataataataatactatcggatttctccatacattttttgtattagctgaataaatatcatacaaaagtaactattatattaacactcccgtcagaatttaattttattaattaaaaaaagaggattacccctgcctggcgcacggataatccccctatttaacagaatagtttagaaatctttagaatgccacaccaaggcggaaaccgaaattgtttaatttatccatatcatagttaaatacggttcccttgttggtagagtagctgtagaatgctgccagatggaagccgatactgtttgtccaggggtagatattcacaccgacttctggtgatacatagaaaccccaagtgttgtctttcacttcgtaaatgtaaaagtcactggacattttggtatagttggcacccagcttcaatccgatataaggttggcatgcaccgtcactgaagcgatagtgtgttgcgaaaccgaaaggcaactgaaatacggaatgttgctggtcggttgtcagggctgccgagttgctgattggtagtgtctgacgtgaaatatactcattattggtatgataattgataaaggcaccgattgacaaatccggcagtatataatatccaccttcgaagttcataccccaaccgcttgctttgtttgcaaagttattgctgataggagcgttgaactgccagtctacattgaaataggtaaacggagttacctgtgcttttgccggcagggcaaaggctatggcgatagcggctaccgccatcagtctgagagttaaatattttatagttttcatatttcctttttattttaaatgaatacttgtttcacttacgtttattttttcagataaggactctgagtgaatgcttggttgatggcagtcgttgtacggtttacattcaaactgccacttccgcccagtaacccgctgatgtatgcattccagacaacagttaatttttctttttgtccttccggagcattctttaaattaatcatgtcggccagcaatgaaccggtgctatagctgtaagtgataggatagggatagtaccatccacctccccaattgccgccccagtagccgggataccaataaccgggataatagccccaccagggtccgtcattatagtaaccgtggaaataataagtacttgctacgtagcttacctgtaggccgaggtcggcgtcgtctttattagctgcggtgtagccggcagcgttcatcttagtcttgaatgcattgatgatgatctgtgcattctcgtccttccagtattcagggtctttcttgtcaccgatgatcaggatgctgtcagggatataataagtactgaagtcattgaacttagtactagtgtcatgactggtgaataccagatactcattgtccaatttgtccatgtccgggtctttctcgcaagataccaaggcaaagaccgccagtaggataggaattaattttttcatgtcaagtttttgtttaagttaatactaattgtttttcgtctagtttctctcatacaacggccagcttatgtttttgttcactaacagtctgttctttagtgaatttttttgcagccaggttaattagagtttcttttttaaagtgtaatttagtttagaaacagctttcttgaagtccttgccaatcattgtcagtgcactgtcaccctctgccagaaagtttgtcttttcgtgtcccggagtagcggaaattaattgataaacgatagcggtgctgtcattaggaattccaataatagttacaactgtaccactgtcggtaaatgcctggttaccatcttttgttcctaaataagtggtcgtcagattgtatgtgcccagtgagtcttggcctgcctcctgaagtgtcagttgatagttgataccttcggcatcggcagctggcagaataccttcatagctatatgtttgtaattcacccagtgtgctgtcgttcacagcgaaaatagagtcactttcactttcggctattatttcagcacttttgtttcctttagagccacaggaaacaatcatggcagccaaagctgctgcaataaatacttttttcattgttaagtcaggtttttaatggttatttgggtacataacatttgttatgcccgttttgtttttaataagttctcttttcagaaaaaacaagaccatgtttaaaatgcattaaacacggtctttaataaatagggcgttgtatctggataaatcggactaccgtagccgtatgccgttcatacttcttcgaatcagtgagttatagataatttttccttttgatacttgttcttctgtttgtggcaggtcgggcatacttcctgtcgtaatataagctatggtgttcttcaataaatactctttggtatctcccagtgggtagagaggggagatgaggttacgttcgctcaatgtgaaatcgggggtgattccatttacatagttggcttgtcctgccgagttgagaacgtatgccacaaccggccataaaataaagttgtaacgctcatcttggtatggttccatggctacatttttgccaacagtcgtttcacctattaccactacattttctgtacctatatatggacggagacaatttatgactgcttctgaggccgatgcagtaaatttgcttgtcagtacgtagagcttgcttaagttcaagttttcggaagcaagtcctgtattgagagggaaatcaattttttgcgggtcactgatgtcattatacaaagttgtgcaaaatactttccctagatctgccgcaggtgccagataacttcctaaatctgtggcacaactcaaataaccaccgggattgtagcgtaagtccagaataaaagcgtcgggtgactgtcccttgaaccgggcgaatatctgtttcatctgttccctgtattctgtatctgttgcctggttattggggcctgtactgaattcattgtagaccatataggctattttttttccggatacctcatatacagtatctatatagaacggattcaattctacagggcgtgatgccgctactttgactgtatctgttgcaatccagctggaattgccttcctcatcaaaaaccaagctttctctggcgaaagttgtattgccgccttccatcagatatccgtaattattgttggtcagttcttctttgccaatggctgatatccagttccctcgttccaatccggcttctgaggccggtgaattgggcagtacgaataaaatacgggcaaatacgtgtgatgagattccggtgggatcggtcattaattcaaaatcaaatccgtaagtagaagtacgttgcaggtaggaacgtgccgcatcggaagcgtcctttatttctatatacgaatacgggtctccttttccgttttgtgccttggtataaaccaatttttgcaggaagtcttccggttcggcaaaatagtccgtttcctttattgccggaatactgtcataccacaaataatgctctttcattatttgttctatccatacattctctccaattaatgcatagtattccccactgcggtcttcgccacatgaagccattataaataaagtggttagaagaaaaaaagtgctccgtatatgcttcataatctaattcctttttcgatctgcaaagctagggattttattttaaagtagggataaggtttggaataaataatccaaaaaacctttatataaaaaagaaatccgccggttaggtcaagcagacttcacggcggacgttcttaattttttatttcttttcagatttccatttgtcagcatattcattcagaattctgcggatactgagtccgattttgatataatctttctcgttcaggttggcaagtgatacacgtacactccattcgggtccgtcgaatccaccaccattcaatacgaccaggcctgtttcattggcaagacggaatactacgtccaatggattatgagttgtctgcagatgttgtacgaattcatctccgtaaaatttcttggcccataccagcatgtctatttctgaataataaccggctcttagtggatcgtcgaggagaatgaaccctgtgttgtcccataatgctttcagacgggtatggattaaattaagcatggcatgacgatatgtattttctttgtccagcaatgaaaaagaagcaaagagtgacatctgcatttgttgtggcaaggacagtcctgctgtatggttcaaggctacttgacggctgtctgctaccatacggtcaatgaatttcatgttttctacttgcatactcaagctgccataccgtttggttagttcgctttttcgtttgcggggcagattggcaatcattctgtcgaatacatttttctcatgtaaggcaattacagcaaggcgccaaccggtcgctccgaaatatttggagaaagagtagacacaaattgtgttctgtggcaaatcagccatcaggctgcggaagccgggaacaaaagtaccatatacatcatctgttataatcatcagattgggattccagcgtgttactacgtctttcagggcatctacgcattctttgttcaactgataactgggtggattgctcggattgacaataaacaaggctttgtatttcgtgtctcgcagtttattgatatcttccactttgtattgccaggtatgaagtccttcttcatttagagtacttgcaggaatattgagcacatcataatcgtaacgtgtcaattcgggtatctctatatagggtgtaaagataggaaccatcaatgctatactatctcctttgtgtagcaggaaattttcttccagcgagtcgaatacatagcacatccctgctgttccgccttcggtggcgaataaatcgaatttaccttgcgggggttgcccgttgcacatttcctgattcaggtaatcctgtactagaatttctgtatatttcaagatgcggtcaggcatgggatattggtcgcctacaatactttcggtccattcgtgtaccagttcgtccggatcggctgcatgttccatcagcatataattataggtacgtttcaatagatctgtccccgcatttccttcatgctttttcaggtactcctcaaaacgttgggctatgcctgttttttgaggaataccggcaatgccttcgggcatgtccatgacccggcgacactcttcaatgccaaaaccgcccaaggcgaagaatgcttcacgagcctccgttgcaatccagttgggattacctctgcctgcattcagcatgacgtgcgccattttcttcacactttcatctgccatttcaatcaaacggttttttaattcgaagggactgatcttttccaaattcttgtccattcgggcaacgctgcttttatcacttaaatattccataatgtatgagtttagttttttagttgattaataatacaatgaccactccccatatgatgagtagtgtatttcctacggcgtaggtcacggtgtatcctaaggaaggtgtttcgctgcctactgcttcttgtatggcgcccaatgcagcagtggtagtacgggctcctgccgtgcatcccaaagagagggcgggatggaacttgaatacatatctggctagaatcagccctaataatagaggcaaggaggtggccaacgcacctatgataaacaacataggacctacttcttttagtccctgtacaaaactgggtcctgcagaaatgccgactacggcgatgaacatattcaagcctacattattcagcacccataaagaggattccggtatttgtccgaaggtagggcgtttgctgcgccaccagccaaatactaatccggctatcaaggctcctccactagtgctcaggctaataggtactccgccgatatggattgcaagtgctccgatgatacctcccagtaaaatgccgagtcctacaaatgtcatatctgtggcattggtggggcggtctatgtatcctagttcttttgcagcagattccacctcttttttcaggccgaccaattccagagtatctccgcagtcgatagtggtttgtgcgaaaacagggatatcaatgcctgcccgtttgatacggcgtatactgacgccgtgcataaagctttgacggcgtatgaagtccaatttttggttggaatatggctttttgtgtatcatgacagggagtacttccacagggaaatcaagcagttggggatcgacgatttcttctccaatccagtcttcctcaccaatggcgaattctcttcttccgctcagtaccacttcgtctcctttttgtaataattgtccgggaataatatcattgacaatggaagatccatgtcgcattctttcaacaaacaatcttttcccttgtgaaataaaataggattctagctggtcaacggtcttgccgttgccaaaccaatcgttctctatgcggtaagcgcgaaaaactaccggacggcgtgcctgttcaaatccgggttcgtctgcttcactggtacccatccgggtttccaactctttgcaagcggctttcactttttctaatcctcccaacattttaggacctaaagaagagaggacccaggcagagcctgccgtaccgaaaatgtaagttacagcatatgccacgggaatgatattaatcatatcacttttttgggaagaggatatgttgagtccgtttatggtatcttctgctactcctatgacggcagagatagtttgtgctccggccagtaacccggctgcttcaccggcattatatcccattaagatagctaataaccaagtgataatcaaacaacctatacacatgagcgcggcgaatcctacttgaggtaaaccatcttttttcagtccgcgaaagaattgtggtcccactttgtatccgatagcaaaaaggaataaaagaaaaaacacggatttcaccggttcttctattgtaatgttaagctgtcccactaatacccctactagcaatacactggtgacgattcccaaactgaattgttttattttcatttttccaatccagaagcctgcggcgattgtcagaaaaatcgccagttctgaatgctgtctcaaaagatgtataatccattccatatttctttcttattataattgctgtttaaaacagagtgggggtaaagaagttgagttaaaaagctccaaattgtacttagttctaatattttttattttatttgcatagagatgatacttgacttatgaaaataaagttatttgtaaaatatatttctttgttagttctcttgtttgttgctgatggttgtaaagaaaaaaaagctgacacatatgtgactaaggtcaccgatttaacgggagaggaagaacaagttttgaaattggaatatgatcgtgatggtaaaattataaagtatggggataccccggtaaggtatgagggcgaccagataaccatcggacagatgaattgtttgaataccggcaataagctttgcaatgttacgtttcaaataggaaaaggcaaggcgagggagagtagggcccgttgtatgttgaaggtaggagaggaggtttatgaagctgataaacagactgtctatgattataaaggagatactatttttatcaattctgattatcgtgctacttccgattatcgtttcttgaagaaagtgcaaggaaaatatgtttttgatcagttgggacggttgaaggaggtgatgactgtttttactgaggcaaatgatagtgtgtccagttgtcatacttattataattatgataataacatcaattatcaggcgaatctgaatttacaggcttatgtgattgattatgatggggtggatagtttcttctattttttattgaatcttgggcagttgaggaatagaacagccttacctaatgatattggatattgtatgaatcatggtttaagcacttataatgtgcatgccaattatcgtctggatgatgagaatccggtcaggatagaagttttatataattataccaaacttctatcccgaatagatttatcttataatcctttaaattaattcatcgggaagtataaacaagtctacttcattggcgccttgctttatcaagtctttcttatctatttggtaaaggcggacaaactcatcatgactgtcgcatagttcctgggctttgcgataatattctattgatttttctgtttcattcaggatataatacacatgtcctgcattcatccagtcttccataatgggcttgggctcggatatcagcaagtcgtaatatttcttggcttgttgatggttgccggtaatgaaggaacaccatccgatggcgcgtcgggcattctgtggctttttatccagatactccactttgaagaaataagccagtgcttcatcgtatcgttccagtgccatcaggcattgtcctatttgtagtgccagattcagactgtcgggctgtgcctgttccaccttgttataatattccaaagcttttgggtagtttccctcttttctataacattgtgccaaatggcggttattccatgtattatcggggatcagcagatctgattgcaggtaataatctatcgcttttttataggaaccgattttctgataaatgaaacctgctttctgccataattcggcatttttacgattgtataattcaattgatttatcatagagaattccggcttctgccaagtcgtcgtgtgtgaataggtaatctgccagtttgttgatatactctttgtgtaacaaggcttgagacaatgcttctttattccataagtccagagtgtcctcaaaaatgtcatgtatttcatgtcttcttgaccataatttgaagaaacggtagaggtcatgaatgtattgccggctcacgaattcagcgcgagcttttgattgtgacatctcttttaaacgttctttcagttcttcagaagcttcatgttgtccgttcaattgttgctgcatgagattcctttggctttccggcatttgtaacatggtaaaacaaaaagagtatttgtcggaattgcagaatacatccgaattcatcaaaatgttgagcagagagattttttgttcgtcatttccgagagataatttggcgatatcctgatattgggggtcaaaaggatagaaccagtgagaaattttgcggaaaaacgggaattgtttcagctgtgaaaaggtactcatatacacatctgccccggacatttgcagttcacctaattcgcgcaatttatcggtaatgcctgaacggtcaatccattcttcccattccggattatgatcttcggcatcttcatccagtccttccaaattaagtttgggatttttcatcatttcgggaatgatttcttcacgcatcttcttgtctatctttcgggtttcacgggaagattgcaataattgaatctggatatgatgcaggtttttgatgaactcggcattttcattcagttcatttatgcgcgacacggcttcagggtattgaaggatacgcttttcataatagtagcatgttagtgcgatccctgcaatagcccgctgattcagcatggtatcctgatgggtataggcgttcaatagaaacatgaacttgcggatgtcgaatatttgcagcaggctcatggtgacggcgctgaccattatggaaaggtcgttgacttggatcaatagtgagttgaacaaagtttgcgcttcagcatattccgattcactccaccgggtggatacccatattttttcaaataattcgtctacggctgtttcgtgacgttttctcatggcatccatttcttcatttcttttggcctcggtggtatatatcaatggggctgtagccatatcttctgtatacgcctccaattgcatttgtaattcggcatagctgtgaggagggctttggacaaaagtgcgcattgtgtcataataggctccgtaattttgtgttgcctgtacggctatatggatacggtcggccagttcgtatgccgtgcgtaacattttatggtatatttccactttattgggatctttcatcccttttgaagtatattgcagcatcaggtcgtatgacgtttgcagggcttctagctcattctttaattgccagtcggaagtatgggtggcatatcctgtcatttgggataatgcttcttttaaccgatattggtctaatagttttatgatttcttcgcgcatattttaaagttctatttgtatgtcttttataaacaaatgcgggcagacttcggttcttggcttatttcagccaggttgcccgtttccatatatattccatcggaccgtgagagtggtgattcatccaccagcggcagaaagagaattgcaagatgaagaaaactattcctgccaggcagctggctgtgataccaaactgattgtgcaatgcaaatccccagttgtagtataacatggaacctactatactttgagtaatataattggtaaggctcatctttccgtatggcgttattttcattaatccgtcgtgtaagtttgtcttgtaaaaagcgaagacgacaccggataccagaatcagcataaatgcaaaattggaaagcgaggtgatgattagtgaaagaggggtcagaatggatttatttgtgataaagtccggtagcatattgcccaacccatataaagggaaaaatgcgacgagtgagcttgcaagtaccttgttccataccttcaagtgctctttcaaaaaaagtcccttgcgccctatcagcataccgagcaggaaaagggcggctgtttggaatacccgtccgtgatcccaggcccaggcaaggcttgccaactgtccttcccataaattgacacggatggtttccagaaaattaccattgctttgcactgcaaaagttgcattccagaagctgcgggtggggatggccggagtaacaaattccggatcgagacaggcacgtattacataataaagtggcaatggctggatcaatagcagacatgccaatgcaaatatccatttgtctttcagccggcaagtcagtggcaggatgaaacctactaaagaataaaggactagcacttccgctgtgaaaaaactggcattgatattacctatcaggaaaagaagaattaaccgccaacaaaaacgtagacggaaatcattgccccgtaggcgttggttgtcatcttgaataaaaaagctaaaaccgaaaagtaaagcgaatatggcgtatgcttttccgccgaacatgaagaataacccgttccaaatggctttgtccgagaagttcagccacgcactttgtccggctgtatcgggaaatgagtagaaattaaaatgttcgatagagtgcaggatgatgattcccatcactgccagtccgcgtagcacatcagctacatctacacgtgcgtgtcctttcaattttgtgtttattgcttttgtttccatggggttatatattagcgtacaaaaataggaaaatcttgaatagttggcaaaaaaaggaggaagtaatcagatatttctttaattttgtccccatcttaaaaaaagatatggatatttcggaattgcaacgtatttatgccggtcatcctaacactaagggactggctgcgttattggaagattcctcagtgaggactattttcctgggaggattacatgcttctgcggcagctttatttgtttcctcctttcttagagagaataaacagacatttgtatttgtactgggtgacttggaggaagcgggttacttttatcatgacctgacacaggtgaacggtgatgagcatattttgttctttccatcctcgtatcgtcgggctgttaaatatgggcagaaagatgcagctaatgagatcctgcgtacggaagtgttgagccgtttacagaaaggcgatccgctatgtgtggtgacttatcccgaagcgttggcggagaaagtggtatcacaagaggtactgatggacaagacgttaaaacttggtgtgggtgagcatgtggacacagagtttatcacggaagtgctggccggttacggattcgagcatgtggattatgtttatgaaccggggcaatatgctgtacgcggtagtattattgacgtcttctcttttgcttccgagtatccttaccgtattgacttttttggtgacgaggtagacagcatccgtacttttgaggtggaaaaccagctttcgaaagagaagaaacagagcattgccatcgtgcccgagctgacgaatgccgccgacaagagcggggtgtctttctttgaattcattcctcgggaaacagttctggcaatgaaagactttctttgggtacgtgaaagaatacaggtagtacgggaggaggcactctctcctcaggcgcttgccgcatacgagggagagaagacggaactgatgaatttggaactgaagctgatagacggggcggaatttacagtacgggctttggatttcaaacggattgaatttggtaacaaacctacaggaactccacaggcaacgttggctttcgatacgacggtccagcctatttttcataagaattttgatttggtaagcacttcattcactgattatcagaaacgaggttacaccttatatatatgtaccgatagtgagaagcaggcaaagcgtctgaaagatatctttgaggagcgtggcgatcatatcacgttcattccagtcaacaagactttacatgagggctttacagataatgtattgaaaagctgcttttttacagaccatcagatttttgaccgtttccataaatacaatcttcgtagtgacaaggcgcgtagcggtaaggtggcattgaccttaaaagagttgagccagtttgagccgggtgactttgtggtacatatagatcatggtgtaggccgttttggcggtttggtacgcattccgaatggaaatactacccaggaagtgattaaacttatttatcagaatgaggatgtggtatttgtttccattcattccctgcataaaatatccaagtataaagggaaggagggagaaactccccgcctgaacaaattggggaccggtgcgtgggaaaaaatgaaagagcgtaccaagagcaaaatcaaagatatagcccgtgacctgatcagactgtattcgcaacgtaaacaggaaaaaggattctcgtatagtcccgacagttttatgcaacatgaattagaggcgagctttatttatgaggatacccccgaccagttgaaggcgactcaggatgccaaagccgatatggagagcgaccgtcctatggaccgtctggtgtgtggtgatgtgggtttcggaaagactgaagtggctattcgtgctgctttcaaggctgtggctgataacaaacaggtggctgtgctggttcccactacggtgctggcctatcagcattttcagactttcagcgaacggttgaaagattttccatgtaaggtggattatttgagccgtgcccgcagtgcgaaagatgtttccagaatagtgaaggaactggcggatgggaaaataaatattttggtcggtacacataaaatcatcggtaaaagcgttaagttcaaagatttaggattgctgatcattgatgaggaacaaaagttcggagttagtgtgaaagagaagttgcgtcagatgaaagtgaatgtggatacactcactatgaccgctacccccatcccccgtactttgcagttctcgttaatgggcgcccgtgatctttctgtcattcagactccgcctcccaaccgttatcccattcagacagaggtgcatacctttaatgaagatatcataacggaagcgatcaattttgaaatgagtcgtaacggacaggtattctttgtcaataaccgcatacagaatctggtagaattggaagccatgatcaagcggaatatacccgattgccgtgtctgcataggtcatggacagatggagcccgaaaagctggagaagattattttcgactttgtgaactatgattatgatgtgctgctggcaaccaccattatcgagagtggcattgatataccgaatgccaatacgattatcatcaaccaggcgcagaattttggcttgagtgatttgcaccagatgcgtggacgtgtgggaagaagcaataaaaaagcattctgttatttgttggcgcctccattgacttcactgactcccgaggcaaagcgccgtcttcaagccattgagaatttcagtgatttgggcagcggtatccatatagccatgcaggatttggatatccgtggagcaggaaatatgctgggggcggagcagagtggcttcattgccgatttgggttatgaaacttatcagaagatactggccgaagcggtgaaagagttgaaagaggatgagtttgccgatctttatgcagaggagttgcaggcagcgggagaagagaaaatcagtggcgagaactttgtggatgaatgtcaggtggaaagtgatttggaattgcttttccccaatgagtatatccccagcagcagcgaacgtatgttgctttatcgtgaactggacggattggaattggataaggacctgctcgctttcaaggcacggttggaggaccgtttcggaaaggttcctcccgaagggctggaacttctgcgtatcgtacctttgcgcagattggctaaacggttggggatggaaaaagtattcttgaaagccggacgaatgactttgttctttatcagtaatcaggaaagtccttattatcaaagtgcggcttttggcaaggtgattgattacatgagcaagaatccgcgttactgcaatttgcgtgagcagaacggcaagcgtagtatggtagtcaagaatgtggaaacggtagagacggcggtaggtattctgcaggagatggtgagcttgtgataaaagatgtctgtattggcggaaaccggcattgccgtagagtaagcaggatatgttaacgtaaaattgaatattaactaaataaacagctgatttttaattaattgtttaacggaattgaatttggggtgttttatattaaaaaataatataagacactcctttttcttttaacttatctatatttttactatcttacttccagtttaaaagcggacactgagatttttactcacatattgtctaatttaaaaaacacttgttatggaagtgaaaaaagcacgaagagccgaccttgaaaagggtaagtcccgttggctgttcatgggtctcattgtgacgctgtcgtttatgtttgtttcgttcgaatggactgaacgtaatgtaacttacgcgatcagtgatttagtcagtgacccggatttctttgaagaattagttcctgtaacctataatcaggataaacctctgccgccaccgcctccgccggctgccgtcaacccggaagagctcaatatagtggataataactcgatggaaacagaaaccgatattgcagcttcagaccctacggatgctccggtaattataccgacccctattgaagtacccgaagaagtagtggatgaaaatgtggaatttgtggtggtggaagagatgccggtatttcgtaacggtaatgctgatttgatgaggtatctgagtgaaaacatcaaatatcctaccgtcagtgccgagcagggagttcaaggaagggtagtggtgcagttcgttgtgggtgttcatggagagatcctgaatccggtagtggtgaagagtgtggatccgtatctggacaaggaagcaatccgcgtgatcagttccatgccaaaatggaagcccggcaagcaaagaggaaaagcagtgagggtgaaatacactgttcctgtagtcttcaggctgcaaagttaagatttaattagtatggatggaggaagcgtaatctcagaagaggacgcttcctcttttttatgacagtacggtcggctgtttatatgtgcaggacacagtgaagtgtcttaattaaagggtgtatcctaaatcgtgtttactttgttaatgtattgttttattgaaaggtacttgtctgtaattgccaataaatccaatcttaaatgatattacgggaatctgaatgtgaagaataaatttcggtaagtaggtctatgatataatagtctgataatcaaaattttcttgttttagatatttgcagcaaattggggctctcttcataagagaaccccaatttgctgcaaatatacgtataattcttcaatctgaaagttttcgcattagaaaaagtgtcttcaaattgccttaagaatgattattgtttgcaaaggttttaattctaaggaatattatgtaccacattatcagctggttaagataaattggggttctcttatgaagagaacccctccaaaaagaagaaatttaagggcttgcctgagccttatatttcaagattatgaacttaaattgtaatgttttgatggcaataaagagcgatgcggaatctgtaaaagtactcccgtcagacaatcaaaacataacgagcgaagcgcctaagttactgctctgcagttcaatcgcttccggctcagacctggggtcaaatgaaggagtcacgccattggcgggaataggaaaggaatacccggaactcagttggtactatctgtatctgtctaataaagagctgaaacgctatatcagtgtattcagcggtaggaaagctgtccggttccgtactctatcggggagtgtagaggaggaatttttctgtttcaaagtgttttcctatacagctgccgatcataggaaacgttttgagcaatgtgcttataccaaggaggaatatactacccgccgtgactcagcccgggtggtgaaagaggcttttgctaccggttccacccaaaaattgaatactttgacggacgagaaggaaattgcaggtaatggctggctgtttgtctgtgctcccttggatcagttggagcgtattctgtctgccatgcttccccgccagtatctggtgacggactataacacgcatcgtgcggctgtcatccctcaaagccagatggaggaatttatctatctgtacgaatccatgccttacaatatcgaactgatgaaccgtcctttggaggactatcttcagaagaagcaaaaaattcgtattaccggtggcgtctttcggggaaaggaagggtgcatcatgcgtttacaccggaatacccggctggtgttcgctttcggaaatatgacggtggcagtgagctatcttcatgcatttccgtttgagaagatagagtgatggtaatttataaaggaaacatttctatcagtttatcaggcagaacgaccatatcggttataaggatttatagccgatggtcatcggcttttatatgagatacatcaaaattcgtcagctaatataaaatatgtcttttagtgaactgttttcatatatcatcggtggaactactctcataggcttgggtatgaccttgtgacaagtttatgggatatattctctacattttatctgcttggctttctgtcaagtgttaacttattaattcgtgtgcttatttgtagtagaatactcccttagcaaaagcattccgctaaagatatatgctttaaataaacagtcctaaataatataaatcttatatacttgcaaatggtaaatataaccgataaatccaaatgttgtggatgcaatgcttgtggggatgtgtgtatccaccaagccatcaaatttcatattgatgttgaaggattttggtatccggaagttgataaagacaaatgcaccgattgcggactgtgcgagaaggtgtgtccgataatcaatacagaagactggcatgaaagtggaggatttgaaaagcctcattgttatgccttgattaataagaatatagaagtgcgatttgatagtacttccggaggtgctttctcggctttggctgatgagatttataaaaaaagtggttacgtaggtggagccatttataatgaagattggtctgtatctcagttcttgtcttcaagcagggaagatttgtctcgtttgcgttccagtaaatatttgcaaagtcatcttgatggtttttatatcgctgttcgtgaagctctgaagactggcaaacccgtacttgtttgtggaagtccctgtcaaatggcagccatgaaacgttttcttcgtaagccttatgaaaatctgatggtggtggactatatttgccgtggcattgcttctcctctctattttaagcagtttatcaactatttggagcagaagcatcattcaacggtggtttattacaaagcgaaaagcaaggaattaggttggagaacactttccactcgtgtggagtttgcaaacaaggatgtcgattatattcttgggaaagaaaacccatggttatccatgcaatataaaataccggaagtctgtcgtcccagttgttttgactgtcctttcaaaggatttccacgaacatcggatttgacgataggtgatttatggtctagtcccggtagcatacctaaagaactggactctgacataggcacatctgttgtctttgctaataacgaaaaaggagctgatatgctaaacaaatgcaagaaaaagatcatttggagtgatttctcttttgaagaggcgaccaaaggaaattatcatttgatgtattctttaaagcactcagagcataacagagaagatttttttaagaccttgaacatttcttttcaggcctgtattgataaatatatgcctgactttggccaaactcagaagtcactcaaagaaaaa

SEQ ID NO: 3892 - DNA, 93221 bp, Unknown
  gut microbiota DNA sequence
gcggagagacagggattcgaaccccgggtacctcgcggtacaacggttttcaagaccgccgcaatcgaccactctgccacctctccaaaacttcctttcagaagtgctttttgttgaaagcgttgcaaaggtacgactttattttaaatatgcaagacttttgaacaagaaaaattaaaggttttattatatttgcactctcaaccgaaaaaaagcatatgaaactaaaatgtcttttcttactgttacttttgggaatatccttttgtgtacatgcacaaaagcgccccgtcatccttgagaaacagttggagatcattaggaaagaacctgataacggggatgcattaaagtttctatgccaatactatttaaataaaggagattattccaaaaccatcacttacgccgagattatgaaaaacgtagcggacaagactaaaaatcctctactccaactctattcatatatctaccaagcacaagcacaaatgatgagcggacgggaaaaaatagccaaaaaaaacttgaacctttctcttgaactagcaaccaaactgaataatgactccaccctttgttccgtctatggtagtctcggactctactctgcaaatattgaaaccgattattaccgtgccatacgatggctttataaaggtatccagttggcacaacaaaataatttccaacaacaatacgctttgcttttaggcaatttagcaaacatctattacctcaaaaaagatacagccggtatcaaatacgcattagaatgttatgaattaggacacagtatgcgtaatccatacatcatttattccggtgcagtaaattctgcctatatgtattttttaatgaaacagaatgaggaagcaatgaaatatatacatgaagccgaaacattgatgctggaaaatgatttctacgaccaagcccatacctacaatctctttggcaatatattatatgatatgggtgaatatgcccaggccttggaatattacaaaaaagccatgaaggacaaacaggcggcacaaacttcctctattgtctatgcccatttgggatatgcacgtatactaatgcagcaaaacaaacaactagaagctattttattgttaaaacaaggaatagctatttcttatgcacgcgtcaacgccatccatcgcaatgaactatacgaaaatctgtccacctgctatgagcaattgcaccaatatcatgacgcactgaaatattataaaatattccgtttggaaaacgacagtcttttcaacaaggacaaagaaagagatttaagtgaaatgcgattcaaatacgactctgagcggcaggaaaatttgataaaacaaagcaaactggatgtaatgcagaaagaacagcgtatacaacaacagacatttattcttattatcattgtgattgttctaggattgctttattacctctaccaccgtaaaaacaaactttatttaagtatagtcaagcaaaatcaagaagcaatcaaaagagaaacggaactgaatcgccgtataaaagaattggaaaccaatgccccctccatggtttctacttccgaaaaatatgcttcctcctcactcaccgacgagaaaagtttagaacttttccgtacattagagcgtattatgagagaagaaaaaatttacaaagacaattttataacaaaagacaaagtagcagaaatattaggaactaaccgtacttatctatcacgtatcatcaatgaacaatccaaactatccttcactcattatgtaaaccgtttccgtattgaagaagctatccgtctattatccgaccccaataacgaaactccgctgaaagccatttctacagagctgggatttaactccatttccaccttttataaccttttccaatcctcagtgggaatgactccctcccaatataggaacaaagttatggaacttcaaaaagagcaataggttatctttttgctcttttttttattctgaaaacagcaattgccgatattaatataggtataaagaggcatatctaagatattatcccttactttgcggtatgaacattaatccaaatttaaataatacgtaatgaaaaagaagttttttttaagttgcctcttaatcgttatggcattgcttccggcagttgcccagattcaagatccggtacaattcaaaaccgagttaaagacgatttccgatacggaagcacaaatagtattcactggtaagattgatgccggatggcacgtttattccactgatcttccttcgggaggtcctatctccgcaactttcaacgtagacaagatagaaggagtagaattagtaggaaagctcactccacaaggtaaagaaattgaaaacttcgacaaggtgtttgaaatgaaattacgttactttgagaacactgccattttcattcagaaactaaaaataacgggcgctacctatatgatagaaggttatatggaattcggtgcctgcaacgatgaaaactgtctgcctcctactgaagtttctttctctttctccggaaaaggagttgccgctgccactacaagcaagactactgaacccgcaaaaacagaaacagccataacggaagttcctgtagcggaaacagctactgcaactaccgcaacagatagtgctacaactgccgccctgatcggcaatgacactgctgtccaagattattggactccggttatccaagagctgaacgcatttggcgaaacgacatcacaacaagaccgttcatggatttacatcttctttgccgggtttatcggtggattacttgccttatttacgccctgtgtatggcctatcatcccaatgacggtaagtttctttttaaaacgtagcaaagacaaaaagaaaggaatccgtgatgcatggacatatggtgcttctatcgtagtgatctatgtattattaggtcttgccataaccttgatattcggtgccagtgccttgaatgcactttccacaaatgctatttttaacatattcttctgcttgatgctaattgtgtttgcagcctctttctttggagcattcgaacttactcttccttcaaaatggagcaatgcagtagacagtaaagcggaacagaccagtggtttgttaagtatcttcctgatggcattcaccctatctttggtttcattctcatgcacaggtcctatcatcggctttttgttggtagaagtttccactacaggtagtgtagttgcccctgctatcggcatgttaggttttgctcttgcattagcgttgccattcacactgtttgccatgttcccgtcttggctgaaatccatgcctaaatccggtggttggatgaatgtaattaaagtagtattaggtttccttgagctcgcatttgctttgaaattcctgtcggttgctgacttggcttatggatggggaattctagaccgtgaaacattccttgctttgtggattgtgattttcgctttgctaggcttctatttgctgggtaagatcaaattccctcacgatgatgatgatgataaagtaggtgttgcccgtttttttatggctcttatctcacttgcatttgctgtatatatggtaccgggcttatggggtgctcctttgaaagctgtcagcgcatttgctcctcccatgaatacacaagacttcaacttatacaccaatgaagtacatgcgcagtttgatgactacgatgccggtatggaatatgcaaaacgtaccggaaaaccggtaatgcttgactttacaggttacggatgtgtaaattgccgtaaaatggaagctgctgtatggactgatccgaaagtaaacaagttgatgactgaggactatgtactgattacattgttcgttgataacaaaactccattgcccgaacacatcaaagtgatggagaacggtaaggaacgtacactacgcacgatcggtgataaatggagttacctgcaacgctctaaattcggtgccaatgcacaacctttctatgtattgattgacaatgagggaaaaccattgaataaatcatattcatatgatgaggatatagacaaatatgttgatttcctccagaccggattacaaaactataaaaaataaccaaagtgtgtcaaaagtcgaaggagtgtcaaaactaaataaacctatcattttattcattcagaatattctttaatgaaaaatattctgaaaatcaacaaaaaggaaaagacaaacgaaacgatagttttattcgagttttgacacactttcaaaaagatttttgcaagaccccttaataattatctactatgatcgccaaaccagaaagagagcaaatcattgcccttataaatcgcgaggtcgttccggctatcgggtgcacagaacccatagccgtagccctttgtgtagcaaaagcaacagaaacactaggtaaaagacctgaaaggattaaagctttactcagcgccaatattcttaagaacgccatgggagtaggcatcccgggaacaggaatgattgggctacctatcgctatcgccttaggggcattaatcggaaaatccgaatatcaattggaagtcttaaaagacagcactcctgacgccgtagcagagggtaaaaaactaattgactcacaagctatctctatcgggctgaaagagaatatagaagaaaagttatatatcgaaattatctgtgaagctgatggtgatacagcgacggccattattgcttgcgggcataccaattttatatatgtggccctaaacaaccaagttttactaaacaaacaaactacctccacctgcaatgaggatgcaaaagagccggagttgaacttgcggaaagtgtacgattttgccaccaccacaccattggatgaaattcgttttattcttgagaccaaacgtttgaacaaagcagcggcagaacgttctttcaaaggaaactacggtcacgaattaggcaagattctgaaaagcagcaaaagcgaagaacaaatattgggaagtaatacatttacccacatcctttcttatacctcggcagcttgcgatgcacgtatggcgggagctatgattcctgtcatgagcaattcaggaagtgggaaccaaggaattacagctactttaccggtagtagtctatgccgaagacaaccataaatcagaagaagaattgatccgcgcactgacacttagccacctgacagcgatttacatcaaacaaagcttgggacgtctgtctgcactatgcggctgtgtagtggctgcaacaggttccagctgtggtatcacttatttgatgggaggcacttacgagcaaatcacttttgccgtacagaatatgatcgctaacctgacaggtatgatttgtgacggagccaagcccagttgtgctctgaaattaagcagcggtgtttctactgctgtattttcagctatattagcgatggaacataaatgtgtatcttctgtagaaggtatcattgacaatgatgtggaccgcagcatccgcaacctgaccagaattggttcacaaggcatgaatgaaaccgataaactagtattggatattatgacccacaaacaatgtgattaaatatatataaagataagagagttaaaaacgaatcagacacggcattttatacaatccgtgtctgattttatttctcactccaccaacatgtctttatattgggtatgccgggtaaaaaacatttttgcaaaagaacaagtaggacgtattttaagccctacaaccgaagcatatctcacagcggcctcggtcaaagcctgagctattccctgcccttccaactgtgggggaactatggtatgaagaatatccaaaactccgttcttttcatcatattgcaaataggcgatttgtcccgattcaaatacttcgaaacggtctactttctcgtcatgtataactgtatgttccattctatattggttttaatgtatgactattactaataaaaacaataataaaatggaattgtttttactcatagatgaaatctgttacagaacgtatgtctgttgacgaaactccgatacacactttaaatgacactataaaatattgagaactatctgccttgtctatattgaaaagccgaaggtagtataccaaattcttccttaaaataccgactgaaatatttcggattattaaagcccacctgataggctatttctgaaatattctgttgacttccacggagtaattgggcagcccgctgtaaacgaattatacgaataaactcgataggagtcttaccggtaatagccaataactttttatataaatgaacgcggctcatccctaattccttgcttaactcttctacagacaaatcactgcgtgcaatattgtcttctacatatttcacagcatgatttatcagtttttcatccatcgaagttatggcagtcccactaggtttgaaatcaatataagcatgattccaaaccgttttcaacttctgttcacttttttcttcaggaacagcagtcaccatttccggcaactcctccggtggaataatatgagttatcatctcattatcctcaccctcaatcaattgaatcaccgttgctctttgtggagcaacggctgagattgtttctatgtttttttcttctgcaatttcttccgtattaccagattctaatcttcggatatcctcctccagtccttctattgttattatatggtttggttcttcttccgattcctccccggcattagacgccatataaaactccgggatctgaagtgtggaaatgtcttctaccggcttatctgtaacttgcacctgttctatcttcgtcggtttactctcggaacgctttactgggatatggataacaaaaacacaaccgacaggagtattatccattacgttcaccgtgccatcgtgaagtgtgacaaaatcacgtacaatacttagaccacctccgccatctgagatattcatatccggattatccacttgataaaaacgttcgaaaatgcgttctctgttttcttctttaatgccgacacctgtatcagccactctgatttccagcatttcccgagaatcctgtccttctactaaaccgacagacacatcaactcgtccaccactgcaagtaaattttaaagcattggaaagcagattcatcatcacttccctcattttatccccatcaaacaacatattcaacgaaggaactgctgaatgaaaaatgagagaaatatctttcttttcagacaaagagataaaagaatcacaaatcgtatgaatacaagagatgatatcatcatcagacagacttaaataatatccattcacatcaattttcctaaaatccaacaactgatttacaagattcaacaaccttaatgcattgcgttgcactatatttaatttatccatcagagcagcatccgattgatattccttcatcagcgtttccaacggtgagataataagagtgagcgaagtacgtaattcgtggccgacatgagtgaagaacttcaatttcatatctgccttctcctgattcctctctatttcttgctttatttgctgttttttaaatttatcccgttctccacgcagaatccaatagcgtcccaatatcaatacagcaaccaacaaaaggctataaacaacatatgcccaaacggaacgccaaaaaggaggatagataacaattttcaatgaagcttcttcatctccaccatatccgtcactgttgactgctttcaccttcagcatataagttccgggagctagattagtataagtcactttgccaaaggcagtagtcatccaaccctcattgaaaccttccagtttataagcatactccgttttttccggcaaaatatagttatcagaagcaaattgtacactgaacatattctgttcataactcaattttatctgatctaccttgttcaacaccttatccaaaatcaccctgccttcatattcctcacccacccctacttcttcattgaacaagaacaaacgggtaaacatcacgctgggacgttttttattgtattttatatcatccggacggaagcggttaataccatacagccctcccataagaatttctccagaagacaattttttaatggaacgcaggttgaacccactattttgcaaaccatctttgtcatcataaacacaactatgaaaaatatagcgccctgtttttaaatctactgccggtatgacattagttattccacgtgctgtagtcacccatatattttcattaccatcttctactattccagaaatgatagggctggaaactccttgctccactcctaatataatcagttcatccgttttgggattataaacattcagcccctcacatgtaccaatccatatcaatccacggctatcctcatacacctgacttatattctgatcagaaaaatattccttaccagatttagtaccttccagattaaccacttttttagtttcaatatccaattccgaaagtccctgagcggtaccaatccacaaagagccctcttttcccatacacaaagaggaaacataatcggatatcaagccggccgaagttgtattataagtggtgaacaaacccgtcttgggattcaaactctgcactcccccacccaatgtacctatccatataatcccctgcttatcttcagccaaagccaatacattattatgagccaaagaattttgccgttccggtatgttttttttataatgaataatacgaccgttatcataacaaatcaagcctcccccaaaagtaccaatccaaagtttcccatcaccggctttcaaaatgcaaacaatagcatcagtagtgagtttatccgtacctttctgtggaaaagcagcccggttgccagtcacggaattccaatatatgataccgacatcgttggtacccagccacacatacccctctttgtcttcttcaatgcaactaatatctcctatatactctgcaccaaatttaaaagcacactcattaaaataggaaattccttttttataagtccccacccacatagtttcactggaatcctcgtatagaaccattactgtattattttgcaaactacgttcatcacctgccttgttccgcaactgcctcacttcccctgtcttcttatccaatatatcaatgccatcctgatctgttcctatccatatacgcccttgcttatcctgtgatacagcacggaccatgttatgagaccgacgcttgataatatttgtcagccaagacagccacttttcctgttccggattataaacccatattccaagcggactgtacatccatatatcattatcacgatctacaaacagagtgaaaattccctgcttgtcagttcccaattccccaaccaaatcatcctgctgccatttaatctcatttgtccgagtatccaaacaaacaagtcttccggtattatataccaacaagattcccttgctacattctacaatgtccgtaatatcaccttctggcaactgatgagtatcaaacaaaagcggatacagtaattgagattccggaatgtacaaataacagccttttccttttatataaaaccacatatttttattatggtctatatatactaatgctggagttccgtcaataccgacttcacatagccatgcatgcacctccctatcaaatgtttctgattccgagttgtaaatgacataacccacaccggtaagaatccataaatttcctttataatcttcttgtatgcttttgatataattatcaggtaaagaagccggatcagcattattactacgaaacaaagtcatctggcacccgtcataccgatttaaaccggaagctgtggcaaaccacataaaaccttcggaatctttaaatatatcaaggacttgattgtttgacagaccatctttcacctccaaatgtttaaacatgaattcacttgcatgcatcagactagaaaagcataataatgtaatgatcaaacatttttttcttattcccatagattttaaaggctaattatttttattccactgcaaatgaagcaaaaagcttgataacagacaaactaatatcggcttttttatcattcgatacccacaatatgtttcatttttcctatttttgcaattgaaatgaaagcattaacggatacacaatacatacgacagcttgtctcggagggagaacactgtcatcaggatttcaaattcgagatttcggacgcacgcaaaatagcccgtagcctttccgcattcgccaataccgagggcggcaggctgttaataggagtaaaggacaatggcaaaatagcaggagtccgctctgacgaagaaatatatatgatagaagcagcagcaaccatgtattgcaagcccaaagtagaactggaaacgcagacttacaaggtagaaggaaagactgtattggaaatacgtattaacgaaacggtttctaaacctgtatatgccctagatgaaacgaataagccatgggcctatatccgcatcaaagacgaaaacatactggccactcccgtccatctaaagatgtggcaacacagcaagaaacctgaaggagcacttgtaacatttaccgaaagagagcaacggttactggatgtcttgaaagaaaaagaaaaactttcattaaatcaatgttgcaaactttgcaggttaaaccacaagacaacttgtgaactattagcagactttatccgttttggtctagtggaacttgttttccatggacataagttctattttaaattaaacaaggaataagtaaaatggatatactgaccctattaatcagcagagtgaatgatgtgctttggacttatattttgatcatcatgctgttaggatgtgcattttggtttacttttaaaacaaatttcgtacaattccgcatgataagagaaatgatacgtctattaggtgattctacaggcaagacagaaggtcgcgaacaccatatttcctcttttcaagcttttgccgtttccatagctagccgcgtaggaacaggcaatttggcaggagtcgccaccgccattactttgggtggtccgggtgcagttttctggatgtggataattgctcttttgggggccagcagcgcttttattgagtccacattggcccaattatataaagtacacggacataattctttcgttggcgggccagcttattacatgaaaaaaggattaaaacagccgtggatgggagttttgtttgcctttttgcttatctttacttttggatttgcttttaattcagtacaaagcaataccatttgtgccgctttcgaagaagcattcaatattcctcccagcctaatgggagtgatactgacctcgctcacattaattatcatcttcggaggcattcagcgtattgctaaagtaagtagcattattgttcctgtcatggcattgggatacatctttttatcccttttcatcgtaattgtaaatgcaaagcatttgccagaagttattgaattgattatagcgaatgcctttggctgggaacaggcattaagcggaggtataggcatggcattaatgcaaggaatcaaacgtggattattcagcaatgaggccggtatgggttccgcacccaatgtagcggcaagtgccgatgttacccatcctgtaaaacaaggattaattcagacattgggagtttttaccgatacacttgtcatatgtacctgcactgctttcatcattcttttcagcggagtagcctccacaaaagaagccaatggaataaaacttactcaaatggcactgaataatgaaataggcaacatcggaactatttatgtggcggtggcaattctgtttttcgcctatagcagcattttgggaaattattattacggtgaagccaatgtacgttacataactcatcggaaatgggctatccccatttatcgtatagcagtgggaggaatggttatgtttggggcattggctagtctggaactggcatggagcctggccgatatggcaatgggatttatgactatctgtaacttgatagccattactttactagggaaatatgcattccgtctattggaagactatcgaattcagaaacgtaacggggtcaaaaatccagttttcaccaaagacagaatgaaagatattgaaaatgatttggaatgctggtaacacaaagcaatccccccggcatcaaccattcaataaaaatgataaatagtaaaacaaaaggattttaatcaaaaatgtttcagtttttatcgctatctttgcagacaggaaaacaatataatttaagaacacaatgagcatattttcaaaattatttggtaaaaaacagacagaaggagaagaaacaagccgcataggtggtatggaagacttcatgacactaatccgtgtatattatcagtctgtaatggcctgcaacataggtatcacaaatattaattttttgccagacatggcagttttcaaacgcacccttaaaataccgacccaaaacaacaagttgggaattgctgagaaatcacgctgcaaaaagatgttagtagaactttatggtctaagtgatgatttctttaaagaaattgacggttctataaaaaagaattgcaagaatgtaaatgatgtcaagacttatctttttatgttccaaggattcagcaatgacttgatgatgctgataggtaatttgatgcaatggaaattccgtatgcccagcgtaatgaaaaaaatgttacgtaacatgaccgagaaaacaattcatgatatcatgaccaagaccgactggaaagacgaaagcgtacacaagacctgtgttgccatccgtaaatacaaacaagccttaggatattctgaaaactggatgacggaatatgtgtataacattgtattactggctaaaaaagaaccaaagccaaaagaataatcattaaagattttatgaaatccttattaaatatagaagaacatccattagagccttttttaccggttaacgccaaactactgatgttaggcagttttcccccacaaaagaaacgatggagcatggaattcttttatcccaatctgcaaaatgatatgtggcgtatttttggaataatatttttccaaaacaaagaccactttctgaatcctgacaaaaaagtatttgacaaggaacgtattattgatcttttgaacaaaaaaggcatcgcactttatgataccgcttcagctgttcgccgtttacaggacaatgcctcagacaaatttctggaagttgtagaacagacagatatcagtttgctactgaagcagattccaatgtgcaaggccattgtaaccacaggacaaaaagcaacggatattattcgtgaacaaataaaggtaaaagaacccgttgtaggaaccagtgaacctttcgaattcgaagaccggacaatgcgattatacagaatgccttcgtccagccgtgcctacccgttgcccattgaaaaaaaatcagcaatataccgggtcatgttcaatgagttaggcctattaaacgaataatgaacaatattttttcataaataggtttgtatattccaaatattacactacctttgcagccgcaaacacgggagtagctcagttggtagagcaccggtctccaaaaccgggtgtcgggagttcgagcctctcctcccgtgcaaaaaagattattcaatgccacgccattggataatctttttttatatcttctactttcttaaggaatttgcaaaagtttatgagtttgtaggctcaaccgccactctggatgttgcaaaatgtaagcaatcacttcttctgtattagcacaagaacaaggctgcaaaaaataatgactggcagacaaatccaaataagcagaaacatcttgtcccacataaaccactttcacctcatctatacgatctagatttattttcgccccttctttaggggaacaagtaacccaatctatattttcaggcagcagacaagtgccgtttgtctcaatacaaacatacttcccttcatgatgcaatgcatcaactaacttttcatcaatccacaatcctggctcaccaccagtcagtattactatctgggtcgaatattttgccacttccatcacaatatcctcatcactcatcaatgtaccttcttcatgctgagtatcgcaaaaaggacatctcaaattgcacccggaaaaacgtacaaaaacggcaggtattccagtatgatacccctccccctgtaagctgtaaaatatttcattaatccttctcataaataacggtatttccttctgactcgcgaacttcaaccttgaaacaagtgggaatttgctcacatacccagcgtgcaatattttcagctgtaggattaaaagaaacaacctcattcaaattccggtgatccaaacgccccatcaccgtttccttgatatgcgtgaaatccaccaccataccatcctcgttcaaaacctcggaacgacaataaacggtaataatccaattgtgaccgtgcaaattctcacatttacttctatacgacagcttcaagctatgggaagctgaaatttccattcgtttaattactgtatacatagcatttaattataataagaaagaactcacacctaatgtcacctcggtgctacaggacgcaaagatacaccataaaaaagaataatataaaaaggacactgtatttttttgttttttggtctatatttgcacctatgaaaatactatataccattgtaggaacaacctcactcatactaggcattatcggcatatttcttcctttactgcctaccaccccctttttattactgacagccgccatgtatttccgcagttcaccacgctggtatcattggctcatccaacaaaaatatttaggaagctacatccgcaatttccgcgagcataaagcaatacctttacatgccaaaatcatttccgtatcattaatatggattaccctaagctattgcgccatctggacactaccctacatttgggcaagaatcctgtttctgattattgcaatcggtactacctggcacatcttgtcctataaaacattaaaacgatagacaatcctcaacagacatatgtaatagtaaaaagatcatattcgaacagcacgggaaaaacagctaataaagacgttaaaaaagttttttaaacgacaaacgataaatttaggacgaaatattttcgtgtttgcttccaatcctttatatttgtgtacaattttggtataaaatgactgaagaagacaaaaagctattaaatactttcgaggcaagactgaggcattttatgtatttgcatgatgaattgaaacatgaaaatgcacagttaaagcaacttctcactgaaaaaaacgaggaggtaagacgattggaaaatagccggaaagaattagaagtaaggtataccaatttgaaaatggcgaggacaatcagtattcatgataaagacatcaatgatacaaaacaacggttgtcaaggcttgtgcgtgaggtcgacaaatgcatcgctttattaaacgaataaaaaaagttggacaataaaacgatagtattatggacgatatgatgaagatacatctactgattgacaacgaacgatacccgatgaccatccgtcgtgaagatgaacagttatacagggacgctgccaaacagattgacaataaactaaacaaataccgtagttattaccctgatttcagccccgcaaggcattgggcaatggctgcgctggagttagcttttgaaaatatttctatgaaagacaggaataatactgcaccttatcaggaaaaattgaaggagctgaccaaagagatagaaaaacaaatcagtaacagagagtaatcgtttagaattgaagatattcacgcacagctatactgttaagagaagggttcttaacagatagattgtgcgttttttatttatatataaattaataacaatgataacaacggtaataatagcaattgtgtgtttcgctgtaggtggtggcctatcatacatgcttttcagatatggcctgaaatctaagtatgacatcatcatcaaagaggcacagacggaagctgaagtaattaaaaagaacaagcttttggaagtaaaagaaaaattcctgaacaaaaaagctgatctggaaaaagaagtcgccctacgtaaccaaaagattcagcaagccgaaaataaattaaaacaacgcgaactgatgttgaaccaaaaacaggaagaggttcaacgcaaacgtacagaagcggaagctatcaaagaaaatctagaagctcaaattgtcatcatagacaagaaaaaggatgaactggataaattacaaatgcaagaacgtgaaaaactggaagctctttccggtctttctgctgaggaggccaaagaacgcctgattgaatctttgaaagaagaagcgaaaacacaggctgcttcctatattaacgacattatggacgacgccaaattaacagctaataaagaagctaaacgtatcgttatccagtctatccaacgagtagccacagaaactgctatcgaaaactctgtaaccgtattccatattgaatcggacgaaataaagggacgcatcatcggccgtgaagggcgtaatatccgggctttagaagcagcaaccggtgtcgaaatcgttgtagatgacacacccgaggctattgtactttcagcgtttgaccctgtacgccgcgaaattgcccgcttagcattacaccaactggttacagatggacgtatccacccggcacgcattgaagaagtggtagctaaagtacgcaaacaggtagaagaagaaattattgaaaccggtaaacgtaccactattgatttaggtattcatggtctgcaccctgaattgatccgtattatcggtaagatgaaatatcggtcctcatacggtcagaaccttctacaacatgctcgtgaaacagccaatctttgcgctgtgatggcttctgaactaggtttgaatcctaaaaaagcaaaacgcgctggattactgcatgatataggtaaagtacctgatgaagaaccggaattgccgcacgcattgttaggcatgaagatagctgaaaaatataaagagaaaccagacatatgtaatgctatcggtgctcaccatgacgaaactgaaatgactagcctgctggctcccatcgtacaggtatgtgatgccatttcaggcgcacgtccaggcgctcgccgtgaaatcgtagaagcttatatcaagcgtttgaacgatctagaacaattagccatgtcttatccaggggtaacaaaaacctatgctatccaagctggccgcgaattacgtgtgattgtaggtgccgacaagattgacgacaaacagactgaaagtttatccggtgaaattgcgaaaaagattcaagacgaaatgacttatccgggacaagtgaagattacagtcatccgcgaaacacgtgcggtaagtttcgccaaataaaaatcagaaacaagaaactcaactataatccctctttttctttagaagaaagagggatttttcattttgtattcccacattttatccacagtctggacaaactcaagaaaaaaaataaatttctaattgccaagcagtaaatcatctaatccttcatttaaattatgtagaacataaaacaagatcaaactatgagacttaacagtatgctagccacagtgcttattttcctttgctctttagtaatttcatcgtgcagcaatgatgaacttgctcccatctccttaaaaaatagagaaacagcaaatataaaattaaactatcctaataatcagacatactcttttcctttgcaagggggagacgggaattatgaaataagctgcgataaaccggaaattatagaaaccaaaatgatttcttcttgcgacatatccataaaagcattagcattaggtgaagcgattattactgtaagagatcaatcaggaaacacacttgacattcatgtaatagtagactattacaccgataattacattgtaagcaaacaggatatacttcttacaggagacttaaaagactctgaaaaacaagcaattaaagaaaaagcattagctacaataccagtaaagataggaggaggatacaaatttatctacacggatgcagaaattgcaagaggcaaagtactggtttatcaagaaaagtttggagacaaggctatagaaggtagttttgaaagaaaatccaatgaaatagaaaatgagcaatggggtacaagacatatcatctcatttgatctaactcttccagaacaacccaaaagaacatttataatctctgaatatataccttcttccaggacttcccccatagttctcatggctttttttgaggatttaaaaaagacattcactatagattatccgaccgtcgagcaagtttataccgagcaagtattaactgtaccgtcacatttatattattaatatattatctttctttccaaaaggaaagagcattcattcttgttatatgcggtagaacctcatctaccccatataacaagaatgatcccccattcctccaatatccccatgtataaaaaacattcttttggccaaaagtttatttttgaagtattcgtttttcttcgaacattttttttgcacaggcatacccttcctcatataaatcggtcagtttctttatatctgtttcaatacggtccacttccatcggcttttcaggacgaattaccacaatcctgcccttgtcttccaattgctctaccaaatcaagctgttcgttgtaaatacgacaacgtttacttaaaaccacgcgcaaacgagggtattttttatagataaaatgaggaattttcatatcctttccttttttgcgatatccccgattacgggtaagtaccactacatttttatcaaatccttgttcaatagcacgcaacacaggaatagaatccacaattcccccatccagcatcggctcaccatctacataagctataggacaaacataaggaagactgctggacgccttagctatggcaataatacgtcgaggatcatgtttctcttccaaataacacgccctacctgtaatgcaattagtagtcaccatttcaaaacgagcaggattttcagcatatgttttataatcataaggaagaatttccttaggaaaatgttcataaagcaattcctgatcaagaatactgtgcttacgccataaatgctttatgccgatataatgatatttctccaataaatcaatattactaaacttagctctaccacgctggcgagacatatatgaaagaccattgcacgctccggcagaaactcctaccccatacggaaaccaaaccttcttatccatcatatagtctaataccccgcaggtaaaaactccgcgcatacctccgccttccagtaccagccctgttttatcatctattttcataatcaatgttgaggaacaaatctatccttgaaagagttcactgcaaagttaaccttttcaaagtatttagccgtatcttttatatttattaaataattgcattccatcataaatatcaatcaaattctcctagcagtataaattactgaatggcaacttatcaaggaaaaataagagaaacctgtgaaattagaaaagcaagattgacaaatgataaaaataaagccgaaatcgattaaaaaatcaaataagcaaatagtacttttaagattataattattacatttgcaacacagttcaataaattttcaattaaaataaagttagccatgtttgattccgcaacttatcaaagacgccgtcaggcacttagaaacaaagtgcaaaacggtattatccttatactaggtaataatgaagctccggcaaactatccggataacacatataaattccgtcaggacagttcattcctctacttcttcggtcattctcaccccggatatgcaggtgtaatagatatagaagcaggagaggattatttcttcggaaatgatgtagatatggacgacattatctggatggggccccaacccagtgtgaaagagttggctgcacaagtaggtattcagaaaagttttcccttctcccagctaaaagaggtggtaggaaaagctatcgcgcaaggtagaaaagtacatttccttcctccctaccgattcgataatatgatgctcttggaagacttaaccggtatccgtgccgctatagtaaagaaatacgcttctgtagaattgataaaagctgtagttgatttacgttctgtaaaagaagcttgcgaaatagcagaaatcgatttggcatgtaatatcggttatgaaatgcacacagccgctatgcgtctatgtaaacctggaataaaggaacaatatatcgccggagtactggatggcatcgccgcttcttatggaagcatgacttcatttgccactatcctgacccaacatggggaaacattacataatcatgaccatagccatatattagaaccaggacgcatgatgctgacagatgccggagctgaaagagtgacaaattattgttctgaccatacccgtaccgtacctgtgggaggcaaatttgaaggacggcaaaaagatgtgtataatattgtattggcttgccatgataaagcattggaaattactcgtccaggtataacctatatgtctgtacacttagaagtctgcaaagtgctggttcaaggattaaaagacctggggctcatgaagggcaatgtggaagaagctgttgccgctggtgcacacgctttattcctgccccatggattaggtcatatgatgggattggatgtacatgacatggaagacctgggacaaatttacgtaggatatgacgatgaaatccgtccttcttcccagttcgggctagcctccctgcgcatgggacgtcgcttacaggaaggctttgtgattaccgatgaaccgggctgctattttattccagcattgattgacaaatggaaagctgagaaaatgcatacagacttcctgaactttgatgccattgaaaaattcaaagattttggaggcatccgcctggaagacgatattctgattacttcggaaggctcccgtttcactggcgagaaacgcatccctatcactatcgaagaagtagaaactatcatgaatgagtaacataacaaacaaaactattatttctaaaatgaaaagatttacattattagcagcattaggtttatgcagtataagcctctttgcacaagatgcacaaaaagaagagccaaaggaagaagggtttgtattcactacagtaaaagaactgcctattacttctgtcaagaaccaaagccgtgccggtacttgctggtgctattccagtatggcttttctagaatcagaattacttcgtatgggaaaaggagaatacgacttttctgaaatgtacatcgtacaccaaacttatttggatcgagccgatgccgccgtacgtactcacggagatgtatctttttcccaaggaggatcattctatgacgttatctatggaatgaaaaaatttggtctggtacccgaagaagttatgcgtccgggagtcatgtatggtgatacattaagtaaccatacagaacttacagccgtatcggatgctgtagtagcagcaatagccaaaggaaaattacgcaaactccagacagataataaccataatccattatggaaaaaggccattgccgctattcatgatatctatttaggtaaatgccctgaaaaattcacttataaaggaaaagaatacactccccattcattcttcgaatcaacaggattgaatccaaatgattacatttcattgacctcgtacacccaccatccgttctacgaaccatttgttcttgaaattcaagacaactggcgttgggggcaatcatacaaccttcccattgatgaattcatgcaggtttttgataatgccattaataacggctatccaatcgcatggggatctgatgtcagtgaacaaggctttacacgtgacggcgtagctgttatgcccgatacggaaaaagtacaagaactaagtggatcagacatggctcattggttgaaaatgaaaccggaagaaaagaaactgaacaccaaaccacaacctcagaaatggtgtacacaagaagaacgccaggaagcttatgacaattgggaaacaaccgatgatcatggtatgttgatttacggtatagctaaggatcaagaaggaaacgactattatatggtaaagaattcttggggaaaagccggaaaatacgatggcttatggtatgcctctaaagcattcgtccgttacaaaaccatgaatatcgtagtcaataaaaatgcactgcctaaagaaattgctaaaaaattaggtatcaaataatccgctactatacaatactttaccgctaattccataaaatatatatggaattagcggtttttttatttgttttttcctaactttacggattgattgggtaagtataaccagaaaatggtattatcccgtctccgagagcagaaaaaagaaaaaacaatatataaaatgaatcacaaatggaattatcaacctccaagccaagaacagacagaagcagctaaagcattagccaaagaaacagggatcagcccgattctttgtaagttgttgctggaaagaggtataacctcagcagcagaggctaaaagatttttccgcccccagcttaacgagctacacgacccattcctgatgaaggatatgagcattgctgtagaacggcttaatcaagctatgggcaggaaagaacgtatcatggtttatggagattatgatgtagacggtacaacagctgtagcattggtatacaaatttctccagcagttctattcgaacattgactactatattcccgaccgatataatgagggctacggagtatcagtaaaaggagtggattatgcctgtgaaacaggtgtaaaactcattattgtgttagattgcggtattaaagccgtagaggaaattgcttatgcaaaagaaaaaggtatcgatttcatcatctgtgaccaccatgtgcctgatgatatattgccaccagccgtagctattctaaatgccaaacgggctgacaatacatatccttacgatcatctttcgggatgtggtgtaggcttcaagttcatgcaggctttcgctttgaataatggcattgaatttcatcaactaactcctttattagatttggttgctgtcagtgtagcatcagacatcgtacctatcatgggagaaaaccgagtgctgacacaccacggcttaaaacagttgaattccaatcccagtgtaggtctgaaagctattatcgatgtatgcggattatcagaaaaagaaattaccgtaggtgatatcgtattcaagataggtccgcgcatcaacgcatccggacgtatacagaacggaaaagaggcggtggaactgctcatagaaaaggacttctcggcagcattggagaaagccaaccaaatcaaccaatacaatgaaacccgtaaagatctggataagaccatgaccgaagaggccaaccaaattgtagaccacttggaaggactagcagaccggcgttccattgtcatctataatgaagcgtggcataaaggtgttatcggtatcgtagcctcacgccttacagagatttattaccgcccggcagttgtattaacccgtacagataatctggcaactggttccgcccgttccgtatcaggtttcgatgtctacaaagctatcgaacattgtcgtgacttgttggaaaactttggaggacacacttatgctgcaggactatccatgaaagtggaaaatgtggaagaattcacccgtcgttttgaaacctatgtcacagaacatattttgccggaacagaccagtgctgtaattgatattgatgcagaaattgacttccgggatatcactccgaagttccatgccgacctgaaaaagttcaatcccttcggaccggacaaccacaaaccaatcttttgtacacataatgtatatgattatggaaccagcaaagtagtagggcgtgatcaggaacacatcaagttggaattggtagacaataaatcaaacaatgtgatgaatggcatcgctttcggacaaagttcacaagcacgctatatcaagaccaaacgttcttttgatatttgttataccattgaggagaatacgcacaaacgtggtgaagtacaattgcaaatagaagatataaaacccagtgaggaataatgataaagatttatctttgaaatatgtcaaaactttaatgacgttatcagacacttatcagaataataagatgataagtcattggagttttgacataattttcttatttcccttccaatgacctataaagaaattctaaaacaatattggggatatgatgactttcggggcatacagaaagaaatcattgaaagtatagacaacggtcacgacacgctaggattgatgcctaccggtggcggcaaatccattaccttccaagtaccagctttagcacaacccggattatgtttggttattacacctcttattgccctgatgaaggaccaagtacgcaatttacgcgaccgaggtatcaaagctttggcagtttattcaggcatgacacgcgaagagatcattgttgcattggaaaactgtatcttcggcgactataaattcctttatatttctccggaaaggctggatactgaaatattccgtagcaaactacggaacatgaaggtaagcatgatcacggtagatgagtcacactgtatctctcaatggggatatgatttccgccctgcttatctgaaaattgcagaaattcgcgaactccttcccgacatacctgtattagcactgacagcaactgccactccggaagtagtaacagatattcaaacaaagctaaactttaaaaaagacagtcaggttttccgaatgagtttcgaaagaaaaaacttggcttacattgtacgtcctacagaaaataaacaggaagagctattgcatattttaaatagtgtgcccggctgcgccattgtctatacccgcaaccggaaacgtacacgtgaaattgccgaactactggtcaataacggcataactgccactttctatcatgccggtttgaataatgatgtaaaagatcaacgtcaaaaaagctggctcaccggagaaagccgtactatggtagcaaccaacgccttcggaatgggtatcgacaaaccagatgtacgtatcgttatccacatagatatgcctgattctcctgaagcctattttcaagaagccggacgagcagggcgcgacgggcagaaagcatatgctgtcctgctatacgcccaaagtgataaaaccaccctcaacaaacgtatcagtgatacatttcccgacaaggattatatccgaaaagtgtacgaagatatcaactactattttcaaatggccatgggagacggtatgggttgcacctttgcttttaacttggatgaattctgtcgtaacttcaaacatttccccgtacaagccgacagcgctttaaagattctgacccgtgccggatatttagaatatacagacgagcaagataatgcttcacgtattcttttcacgatgaaacgcgacgaactctataaactacacgagaatgatacagatacagagaaactgataaacatcatcttgcgttcttatacaggactatttactgattatgcctatattaacgaagattccttagtaatccgctccggattaacccgccaacgaatctatgaaattctactggcgctgactcgtagacatatcatacattacattccacggaaaaagacaccttatattatatatacccgtgaacggcaagaaaagaatcgccttgccctaactcgggaaatatacgaagaccggaaaaaaagctataccacccgaatcaaggctatgatagaatatgccacagccgatgataaatgtcgtagccgaatgctactcagatatttcggagaaaagaacgaacacaactgcggacaatgtgatgtatgtcttaacaaacatcattcaggaataaaacagggagaatttcaagaattggaacaacaaatcaaacagctattgcaggcaggcgccatgcctgcttcagaactactgaaccaattgaatagcaatcgtgaaaaagcggaaaaggtactctcctacctactttccgaagaaataatacaattaaaagatggaattctttctgtataaatcgtatctttgccattgatttattaaccttttaccccaacagaacatgaaaaaaatgcatttggcaatcatttgtctttttaccggttgtactatctttgcccaaaacatagaagtacagcccatccctcaacaagtttccaaacaagacggacaaatcaatttacctgaaacttaccaactcttgggagaaactgaagccaatccatatgccgtacaagaattaaaagatttattaggtggaaaacacccggccaataccggtttgcgcatttatataggagaaaaaggagacaagtccatccgcaagtttactcgtcagatccccaaccaaaaggaaggttattatctatccatcaataataaggaaataattctggcaggaaacgatgaacgtggaacctactatgccttgcaaaccttaaaacaattgctcaaagataaccaattaccggtaatagagatacaagactatccggccatacgctaccgtggtgtcgtagaaggattttacggaaccccctggagccataatgcccgtcttcgccaacttcaattttatggtgaaaacaaaatgaacacctatatatacggccctaaagatgacccttaccatagttctcccaactggcgtctgccttaccccgaaaaagaagcaaaacaattacaggaattagtaaaagtagctcaagaaaacgaagtcgattttgtttgggctatccatccgggacaagacatcaaatggaataaggaagaccgtgaattattattggcaaaatttgaaaagatgtatcatctcggtgtccgttcttttgccgtcttctttgatgatatttcaggagaaggtaccaaccctgtgaaacaagcagaactgctgaattacatagatgaacattttgtaaaagtaaaaccggatgtaactccccttatcatgtgccccacagaatacaataaaagttggtccgaccctgctaaaggatatcttactactttaggagacaaactgaatccatccatacaaattatgtggacaggagaccgggttatttccgatattacccaagatggtattcaatggataaacgaacggattaaacgtccggcatatatatggtggaactttcctgtttccgattacgttagagatcatctgctcatgggaccagtatatggaaacgatactcaaatagccaatcagatgtctggctttgtaactaatccgatggaacatgccgaggcttctaaaatagccatttatagtgtagcctcatacgcttggaatccaacaaaatataacagtgaaaaaacttggaaagacgctattatgaacattttgcccgatgctgccactgaactggaattctttgccgcccataattcggacttgggccccaacggacataaatatcgccgagaggaatctgtaaatctccaactcacagcgcagagctttactgaaagttacataaaaaataaaacttacactgaaaaagacttctctattctacaagaaaccttcagccaaatggttgaatcaagtgatattttagtcgcccatgctgataaaaatccgattatagtagaaatcatgccttggctttatcagttcaaactattgggtgaaaccggaaatgaagtactggcaatggtcaaagcatacgacaaaaatgaccaatctttatttatgcgtaaatacaagcacgtgaaagccttgcaacaacaaatgtttcaaattgaccagacatacaaccaaaacccttaccagccgggtataaagacagcaggaaaagtaatcaagccattgattgatcaaactttcgccaccgtcacgcaatgctataaccaaaaatatagcacactgctgaatgctgaaaccgactatatgccgcataaactaataagcgatatcagtcagataaagaacttacctttacaggtaaagataaaccgtattcagatttctccggcgctggaagttatcagatggcccggtaatggttcattgactatcgaactggatcaagtttatcccggagaaaatatagagatagatttcgggaaaccggaaatcgcaacttggggaagtcttgagatatctgcaaatggaaaagactggagtaaagtaaactttacacaagaaaacaaccgactgactgccagtttacaacagaaaccaataaaggcagtacgttttaccaacatgcagcatcaggaacaagaaatttacctcagacgatttattataacaatagacaaataaaacaactataaattatgggcttatttaaatccttattcggcggaaacaacacccccgaaaccgaaaaagagaaaaatgataaaaagaacttcgagattttaaaatacgacggcatccgcgcccaacgtatgggtaaactaccttatgccattaaatgttttgaagaagcagttgccatcaacgatgaattggaaacactcagcctgctagccactgcttatacacaggcaaaccgactagatgatgcccgtatcacactagaccgcatggctacaaaagatcctgaacaagtaaacaccttcctttcactagctggcatctgctatatgcaggaagattacgaaaatatgaaggatgcctgccaaaaagctttggttttagataataagaaccccctatctttctatttgacagcaaaagcagctatcggcatgaaagatgatatcaccgccatcgctatgctgactaaagctatcgtattgaaagaagattataccgaagcataccagctacgcgctgaagtactttggaaaatgaaacaagcaaaagatgctgccgaagatatacaaaagttgctcagcctcaatcccgacgacgaacaagccttgcttttgaaaggagaaattctagccgccaccaatgaaccggaacaagcacaagaatgttttaatcaagtattgtcactcaatccgttcaatgaaaaggcctatatcctgtcaggagaactatatctggtaaacaaagattttgacaaagcattggctgtatatgatgaagccattgaaatcaatcccaactttgccaaagcatatcatgaacgaggacgtatcaaattacttaaaggagacaaagacggatctgtggaagatatgaagaaagcaatagaactggctcctgaaaatgaaatgaatattagcggtcaatacaataattatgaaaacatgactaagaatgttccgttttaaaagcggaacatttcaattcgttttattgtttatttatatacaaaataagcaaaaaacacatgagcgtaaaagaacagtattggaaatattcccttatcaccattatactgggattaggacttattttatttataaaaatgtctcctttcatgggaggtattttaggagcatgcaccatttacatcatggtaagaaaacaaatgttttatcttacccaagaaaaacatttcaaaaaaagtattacagccattttactcttgatagaagccatcatgtgctttcttgtacctttatcattggctgtatggttactgatcaataaattacagacggtaaacgtagatacgacaggttttatccatacggtaaccaatcttgccgattggcttcataccaagacgggatatgacttactaagcacagaaaacatttcatccatagcctccattcttcctgccatcggacagtttctgatgggaagtatcagtagctttgccgttaatgctttcgtattggtctttattctctacttcatgctgattggcggaattcaaatggaaaaatacatctatgagttacttcctttcagcgatacaaacaaaaaaaatgtactgaaagaaattaatatgattgtcagaagtaatgcaataggtattcccttactggcagtcattcaaggaggaatagctacattaggctactatttgtttgatgtacccagcgcgctattgtttggcttcctgacctgctttgccaccgtcattcctattgtaggaacagcattggtatggtttccgctagccgcctatcttgctctttcaggagattggacacatgccgtcggactacttctttattgtggattaattgtaacaaacattgacaatctaattcgttttattctgcaaaagaagatggcagacacccatccactcatcaccatttttggagtggtcatcggactttccttattcggattcatgggtgtcatattcggaccgttattgttatccatcttcattttatgcgtgaatatctttaagacgcaatacttaaaataatcactttatatatagttgataagcatccgccagttgtttcatcgccttttcaatgatacaacgcggacttgccacgtttaaacgcataaagccaatgccttccttaccaaacatttccccgtcattcaatgccaaatgcgctttatctacaaagaattcattcaaatccttctggctcaactccagttcacggcaatccaaccaaactaaataagaagcctccggacgaatggccttgattttaggtgcatgttttttcaaaaattcgtcaacaaaatctatatttccttgtatatacgccaaacattggtcaagccattccgtaccatgactataagcagcctcaacagaaagaaaagcaaagacatgtcccatatccaactcaccggcatccatatagatacggaagcgtttacgcaaatcttcattaaaaataagagcatgcgaggcagatagtcccggcatattaaaagccttgctaggagacataaaagtaacggagttcattcgagccttttcactgacagtagcaaaaggacgatgcgtatgaggaggtaaagtcaaatccgcatgaatttcatccgagaagaccaatactttctcatcataacagatatcagctatcgctcgtaactctgcttcagtccacacaacgccacccggattatgaggattacataaaataaagagcttacaacctttaatttgttcacgaaaagcatccaaatccatacggtacatcccgttctcccatttcaacggatttatgaccaaagtacgctcattacgagtagtaacccatgcaaaaggatgataaacaggaggttgaatcattaccttatcccctttctgagtaaaacaattcatagccataccgatgcccggtacaatgccgggaacaaaatttatcacttccttggtcacgatcaaatcataacgctgttttacccagtttataatcgcattataatagctatctggtttgccggtataccctaaaacttcattttcgcaacgtttacgaatagcatctgttacaaaaggagctgtggcaaaatccatatcagccacccataaaggaatcaaatccgtacgtccccaaatatgtttcagcccttctactttctcagcagacgtaccgctgcgatctatcactttatcaaaattgtatttcattgtttctatttttaggaattgtcgcccaaatataggaaatttctacattgggcgacattaatattcccttattttttcaaggcttcaattacctgaggcatcattgtccaaacaaaattttcactttgtgctgtataaaaattaccatcaacaaccgatttttcatcagtagccattcctttacttacagccggttttgccaaaggatgcacagctaatctctttccctctgtaattccagcaaaatcaaacagcaggcctgcagcacaatgacctatcaggatctttcccttcccggcaaatgccttcaagaccgacatcaagtccacattataaggtttatccgcattttgagcaaatacgggaaccgcatccccacaggcaaaaaccaaagcatcaaaatcatcttcatgccctataagatttgcaatcacctcatcggccaccaattcaatgcccgagtttgttttaatttcctttgtttccgccactgcatacaccttataggatataccattttcaaaaaacgcttccaaatactggaacaaaccgaatccgttcaccggatttaccgctaaaacagctactttctttgccataatcttaacttattataagtgaaacaataaatttatctagtaaaacaatagttaccttgagtaagtttattacttttgtgatgcaaatgtaagtatccttcttcccaaaaacaagaaggcacctgtagataaggaacttacatagaggtaaccattgttgaacggcaagcaaatagagaatattaaaaaatgaaaaattttcatccggataataattgccctgtacggaatgtattgtgcaggctcggtgataaatggtctatgctggttcttatcacattaaatgctaacggaaccatgcgattctgcgacattcataaaacaatagccgatatctcacaacgtatgctgactgtaactctgcgcacactggaaactgacggactagtgagccggaaggtgtatgccgaagttccgccgcgagtagaatatgaactgacagaaagagggaaaagcttaataccacatatagaaggattagtagattgggctttacaacagatgccgggaattatggaaagcaggagccaaacaggcactgcctaaaaaaaattgaaaaaaagcttcttatttatttgtttttgctagaaatatattacttttgcagcgtattcaataacaataagaacaaaatgaaagcattatacaatacatactttttcttcttttattacttttactttagcaacaaagtgaagcgggaatttgtatgtgtacgttaaacaatgattaaaacaatgcgataataacaacgaaatcccgcttccggcagaagcgggatttttttataatatatatacgaatgaaaaagatagcaatacaaggtgtaccgggctcgtatcacgacattgccgcccacaagttcttccccggagaagagatcgaactaatctgctgttccacgttcgaagaagtctttgcgaacataaagcaggatagcaatgtaattggtatgctcgctatcgagaacaccattgcaggcagtttgctgcacaactatgagttactgcgcgaaagcggcatgaccattgtcggcgaacacaaactacgcatcaaacacagcttcatgtgcttgccggatgacaattgggaaacactgacagaagtcaactcccaccccgttgccttggcacaatgccgtgaattcctgatacaacatcccaaactgaaaatagtagaaacggaagatacggcaggaagtgcggaagccatcaaacgggaaaatctgaaaggacacgccgctatctgctccagatacgccgccgatttgtacggaatgaaagtattggaagaaggcatcgaaacaaacaaacacaacttcacgcgtttccttgtagtggccgacccatggaaagccgatgacttacgtgaacgttcgaaagtaaacaaggctaacatcgtcttctccctcccccacaacgaaggaagcctgtcgcaagtgctctctatcttttctttctataaaataaatctgaccaagattcaatcattaccgattataggccgcgaatgggaatatctgttctatgtagacgtaattttcaatgattatttaagatacaagcagtctatcgacgccgtttcaccattgacaaaagaacttaaaatattaggagaatatgcagaaggaacatcaaccatataatattcagccggcagaccgtctggcgaatgttagcgaatactacttcagccgtaaactgaaagaagtggcacaaatgaatgccgaaggtaagaatgtaatcagtttgggtatcggaagccctgacatgcctccttcggaagaaaccgtcaatgtgttgtgcgaacaggcaaagcgtcctgatgcgcacggataccaacctactgtcggcattcctgaattacgcaaagccatggccgactggtacaagcgttggtatcatgtagagcttgatccggcaaccgaaatccagccgctcatcggttccaaagaaggtatcctgcatgtgacgctggcattggtcaatccgggtgatcaggtattggttcccaatccggggtatcctacctacacctctttaaataaaatattgggcagtgagattgtgaactacaacctgcgcgaagacaatcattggcaacccgattttgatgaactggagaagatggacttgagccgcgtcaagattatgtggaccaactatcccaatatgccgaccggagcgaacgccacgatggaactgtatgaaaagctggtaaactttgcacgccgccataatattgtgattgtaaacgacaacccatacagctttatcctgaacaagaaaccactgagtattcttaatgtgcccggagccaaagaatgctgcatcgagttcaactctatgagcaagagccacaatatgcccggctggcgtgtgggaatgctcgccaccaatgcgcagtttatacaatggatattgaaaataaagagtaatattgactcaggaactttccgccccatgcaactggccgccgcacaagcttacaacaacagtgtggaatggcacgaagaagcgaacgtcaatgtatatagccgtcgccgccaactggcagaagagattatgaaagtactcggttgtagctttgatcccaatcaggtaggtatgttcctttggggacgcattcccgaatcttacaatgatgtagaagaactgaccgaaaaagttttgcacgaagcacgtgtgttcattactccgggctttatcttcggcagcaacggcaaacgctatatccgtatttccctctgtgccaaagaagaaaagctggcagaagcattggaaagaattaaaaagataatgtaacaaaacaaaatatcagattatggaattagatttaaaacccatcgaacttccgggaattgaaaagaaacgcccgatgattatcgccggcccatgtagtgccgaaaccgaagaacaagtaatggataccgccactatgctggccaataaaggcattaagattttccgtgccggcatctggaaaccgcgtaccaaaccgggaggtttcgaaggcatcggtgtagatggcctggcatggctgaaacgtgtgaaacaggaaaccggtatgtatgttgccaccgaagtagctactgccaaacacgtttacgaatgtttaaaggcaggtattgatgtgctttggattggcgcacgcaccactgccaatccgtttgccgtgcaggaaattgccgatgcactgaaaggtgtggatattcctatattgattaaaaaccctgtcaaccctgaccttgaattgtggattggagcttttgagcgcatcaacaatgcaggtttgaagcaactgggtgctatccatcgcggattctcttcttatgataaaaagatttaccgcaacctaccccaatggcatatccctatcgaattgcgccgccgcattcccgaactgcctattttctgtgaccccagccatatcggtggcaagcgcgagttggtagctcccctctgccagcaggcgatggacttaggttttgacggcttaatcgtagaatcacactgcaatcccgactgtgcatggagcgatgccgcccaacaagtcactcccgatgtgctggactacatcctgaatctgctggtcatccgcaaagaaacccaaacaactgaaaatctgggtgaactgcgtaaccaaatcgatgattgcgacaatgagattatcgaggtattggcaaaacgtatgcgtgtctgccgtgaaatcggtacattcaagaaagaacatgatatgaccattctacagacaggtcgttacaatgagattctggacaagcgcggtgcacaaggttcattgtgcggcatggattcagaattcattaaaaaagtattcgaagccatccacgaagaaagcgtaaggcaacaaatggaaatcataaataagtaaaccgatgagaatattaattttaggagccggtaaaatgggctccttctttaccgatgtattgagcttccagcacgaaaccgctgtatttgatgtagacccgaaacgccttcgtttcgtttacaacacctaccgatataccacactcgaagagattgaagaattcaagcccgaactggttatcaatgcggcaaccgtgaaatatacgctggatgcttttcaccaagtattgcccgctctccccaaggattgcatcatcagcgatattgcctcggtaaagaccggactgaaagagttttatgaccaatgcggattccgttatgtatctacccaccccatgttcggtcccacatttgccaaccttgacaaactgagcaccgaaaatgccatcatcatcagcgaaggcgaccatctgggtaaaatcttcttcaaggacttataccaaaaccttggtctgaacatctttgaatatacctttgaagagcacgatgagacagtggcttattcgctgtccatcccttttgtttccactttcgtttttgcggcagtgatgaagcatcaggatgctcccggtactactttcaaacgccacatgaagatagccaaaggagtattgaacgaagacgactacctgttgcaggaaattttattcaatccccgcacccctgcacaggtagaaggtatccgtacagaattaaatgagctgttggatatcatcaacaagaaagatgctgcggggatgcgtgcctatcttagcaagattcgagaaaagattaaataacgcatcagtataacatagaagaggatgtcaaagcttcaacaagacttttggcatcctcttttttattttatccgtaaagatggcttatcaacatacgacacaacagccacaccatcagatgctctgccgcataacaccaaccagacaggattgggtgccggaccgaaatgaatctccctcaacggtgcatcacacacgcagggcatttcaacggcaaacgtttctttatttctcccatatcatttcagttttttcacaaatgtactgacagaagctatcaaagtactgttcaccggcagagaaggattcccgtaagtaagcatctgctgctgtacggcctttgattcacaatctttcagcacatggttcatcttatcaatcaaaagcagttcggcagccgggcaaccctttttcagaagttcggcatcctccaccgatacctgaatatcatttttaccctgaacgatgaggaccggcactttgacggaagcaatcaccgtccggggattatacttgaaccaggaaatcaaataaggctggacagaagcccgatacaatgattgcagataagccggcacgtcactcacttccttgccgtttttcaaggacccgttaatggatgccacctccttccgcaccgcttccggattctgttgagcagccacttgcgcctctataatctcgtaggcaggacgccccgcaccggcaaccgagatatagcctttcaccttcggctggttctgacaggccagcattccaatcagcgccccttcgctatgtcctgccaccgtgattgtcgtaaaacgtttctctttcgccaggtaatcaatccagcccgtcacatcattcacataatcttcaaaacgaagtttcgcttcctccttacctgccgacgcactggttcctatcccccgcttgtcaaagcgcaaggaagcgatgccgtttgccgccaagccttccgccaaaaacttcaacgaattattcctcaaattgccaatggctgaattaccatccatatccgtaggtccggagccggctataataagcaccaccggacaggttttcaccccaccgggcaaaagcagttttcctttgatttgtccttccttggtgttcagcaccacattttcttccaaaggaagcacttgtgcccgacaacaaagaccgcacaggaaaaataaaccggctaaaataaaattcaagtgtttcatctattacgtattttaagattatccatttaacaaatatagtgattgtattgaataaagcgaatcaatatttgaatgttgttaagcatcagttttattttattcaatactattctattttatcttcaacatagatagaatcaagtcgttttgtcactaaaaaaagaaccgttatacacgcctacttttgctgggagaaaataaatctgtaactaattaaaaaaaggattttttatcattttccttttcttattcatccaaacaaactatctttgccatgttttgttccgcgtacctccgactgatgcgaggaagcggatgaaaagggaatcaggtgcaagtcctgaacagtcccgctgctgtaagctccatctacctctataaggggataggtttacttatccactcacgccactgcctgtatatataataaggtgggaaggcaagtaaacaggagtaagtcagaagacctgcaaaacgtaaagtcatcgaccgtcgctttcgaggaaagagcagcggtaagaatgcggtatttattcattaatatgttttttttaaatgaaaggaaataaccaggcttataagctatggctttgtctgctttgcagctttctcctattgccgcttgaaatacaggcacaggagaaaggagattccatcaccggaaaagtgcataaaatagacgaagttacggttacggcaagacgaacacctgccaaagtaacaaccggcagccctgtacaacttatcaacaaggaagatataaagaacttggggttacagaatatggcagatgccgtaaggcgttttgccggaaccaacgtccgtgattacggaggcataggcggtctgaagaccgtttccatccgcaatttaggagctgcacacacagcagtcagctacgatggagtagtcgtcagcaacagtcaggcaggacaaatcgatatcgggcgtttctccctcgacaatgtatcctctctttcattggcaatcggacaagatgagaatctgctgcaaccggcccgtctgtatgcttcggcaggagtactcagcattgaaacggagaaacccgtcttcgaaaatggtaaatcctccctgtcacaaatacaaatccggggaggagccttcggctacatagccccatccatacgcagatggcagaagctgggagaacacaccggtctgtcagtcgatgcttcctttatgcgtgccgacggtaattatcccttcacattggaaaacggaaaatacatcactcaagagaaaagaaacaattcggatattcatacatggcagggagaggcgaatctgtttcatactttccatgacgaaagtacactggatgtgaaagcctattatttttattccgaacgcggactgcccggtgctgtcattctatacaacccgaaggcagaagaacgtttgtgggacgagaatttcttcacccaagcccgttataagaaaaccttctcccccaaatggactttgcaggcgcaagccaagttcaaccattcttggaacaaatacgaagatacagacgtgaagtatgaaaacggaaagcagaccgacatcaaccgtcaggacgaatattatctgtccgccgccgtgctttatcagcccatcaaaggtctggaattatcgctcgcgcaggatggattcatcaatacccttcacaccaatatcaacgacagccccaacccggtgagatattcctcgctcacagccctcaatgcacgttaccaatggggacgtatcaagctatcgggcacattggtggggactttcattacggaagaagtaaaagcagggaatactcccgacgaccggaaacgcctgtcgcccaccctgtccgtttccattcagccatggaaagaagaacaattatacgtccgcgcaatgtataagaatacgttccgcgtacctaccttcaatgacctttattatctacgcataggaaatacctccttacgcccggaaaaggcacgcgaatacaatataggtgtcacttggaacggcaagccattttcgtttaccaatttcctttctgtcactcttgacggatattataatgaagtaaccgataaaatagtcgcctttcccagtacttatgtatggaaaatgcagaattacggcacggtacatatcaccggccttgatgcgacaatggctacttccatacctgtctgccctaacataaacgtaggattaagcggcaactattcctggcaaaaagccatagatatgacaaatcccgatgccaagaattataaagaccagctgccctatacgcctcagcatagcggcaatgcttcgaccaccatcgaaactccttggattaatgtgggttacagcctgacaggggtcagcgaacgctactatatggcacagaatataccggtgaataagatagacggttatgtagaacacacagccactttatggcgggaatttacaatgaaaggctgtcacctccgccttcaggcagaagttatcaatctcactgataagcaatatgatgttatcaaatattatcccatgcccggacgttcctggcgcataacgggagtattaagattttaaacaatataaatgtctaacttttaaaaattaattatgaaactaagaagcttattttttggaacactgtgtatgttaatgctgggtgtttcattcacctcatgtagtgatgatgacgatgacagaaaaaaaacgatgaaggttcgaaggtggaattgcctgaaaatcgtgtctacattttgaatgaaggttcttatcaaaagaacaatgccggcatcacatactatgatcccgataaaagaaacaatgtaatagatgacattttctataagcaaaatgaagccaagctaggagatacaggacaagatatgataaaatataataataatatttatgtatccatgtatggctctaaatatgtatgcaaactgaatgaagcttgtgtagaacaagcgcgttatagctttacagacgagcaaggacagcctcgctatatggctgctgaagacggaaaactttacgttactttaagcagtggtaatgtagcccgtttggatgctaacacattaacttttgaaaagatggtagctgtaggacaaaatcccgagcatattattgaagaagatggcaaactatatctggtaaactccggtttcggatatgacaatcgtttgtctatcattgatatcaagacttttgatacagcagagcatgtggaaattttccagaatccggataggatactagaagctaatgacaaaattttcatccaaggatatggtggtccgtaccctgattatgactatactgtagcaatctatgacaaagaaaacaaaacctacaaaaaaattggaccgggcacattaatggctgaatataatgatgtggtatatgttatctattcagaaacagactataatacaaatacatccaaccatacattatattcttataatgctaaaaccaacaaaaaagaagaaactagttttttacaaatgccagaagaactcaagactcgtatcttttatatgttgagtatcaatcctgaaaatggagatttttatgtcggtactaccgattataatactaacggagatatatatcgtttcaagaaagacggtacttttattgaaaaattcgagagcggtggtgtaagtcctagagcagccgtatttattgactaaccaatgaaacaattttctctctttattcacctgatgctttcagtcttgcttttttccgcctgcggcggaaaaagcaagagttcttctgtaatagaagcagaagaagcaatctctttgcgttatgcggaaaacctcagcctgtctgcaaccgaagactataccattgcccgtctgcgcaatccttgggatacgacccggatactgcatacctacgtcttggttgacaaagaaaagtccctgcctgccgacttgccggaagggacacttgtccgcacgccattgagcaaggccgttgtttactcatccgtacattgcggattgctcaaccagattggtgctttgaaaagtattggaggagtctgcgatttgaagtatatcaaactgcaagaagtgcaggatggctgccgcacaggaagcatcgccgatgtagggaatggcatgaacccggatatagaaaagataatcgacctgcaccccgatgccattatgctctcccctttcgagaacagtggcggatacggacgggtggagaaactcaacatccccattatcgaatgtgcggactacatggaaacttcggccttgggacgtgccgaatggatgcgtttttatggtctcctatttggtcaagcacaaaaagcggacagcttgtttgccgaggtggaaaaaaactataatgagctgaaagcattggttgctcccctttcatacgcaccgagcgttatcagcgaactgaaaaacggttcggcatggtatgttccgggagggaaaagcacctctgcacgcatctatgcggatgccggggccaattatgtgtttgccgataacgagcatagcggttctgttcccctagccttcgaaaccgtgtttgacaaagggcagaatgcagacttttggctcatcaaatataatcaggccattgacaagacttataaggaattggagcaggactatgctccatacaccggtttccgtgcattcaaggaacgcaacatttatggatgcaacacagggaaggtagacttttacgaagattcccctttccatcccgaccgattactgaaagatttgataaaaatattccatcctacgcttttagaagggtatgaattaaaatatttcactaaattagcggagtaaatcaccgtagggttatgtcaaaacgtggataatgctgcccctacagctgacgatgggataggccgggttagttttgacacactccctacagtgggcgtaaccccaaacagtatcaatgaataacaaaggaacaaaatacggtatcatactgctcctcctcatccttgcattgacaggagccaacctgttgttcggctcggtaaacatccctgccgaggcggtgtggcatatccttacaggcaatgaagtagaaaaggcgagttggagtttcatagtctgggaatcccgcctgccgcaagccattaccgccctcctttgcggaatggcactcgcagcatcgggactgatgttgcaaaccacattcaataaccctttggccgacccttccatactgggaatcagttcgggagccagtttgggagtcgccttggtcatgctggcaggcgcaggtacgattactgccggagtattcactttatccggattcctgtccgtcattatcggagcattcataggctccatgctggtgatgggaatcatcctgttcttctccactttgataaaaaacagcatcatgctgctcattataggtatcatgatagggtatatcacttcatctgccatctccctgctcaactttttctccacggcagaaggggtgcattcctacatgatttggggaatgggaaacttcggaggagtatctttgcagcagcttccctttttctccttggtcacagcggcggggctgctgattaccatactgctgataaagcctctgaatgccctgctgctgggaacacgctatgccgaaaacctgggaatcaacatccgccgtacacgtaacctgctgcttgtcgccaccggattactgacagcgacgaccaccgctttctgcggcccgatttcctttatcggactggccgtgccgcacattgcccgcctcatgctgggaacctccaaccataattctctgctacctgtcaccatgctgacgggaggagccattgccctgctctgcaacttcatctgcattctgccgggcgaagcaggtatcattccgctgaatgccgtcactccggtcatcggtgcgcccattattatttatgtcattgtgaaccaacgtaaaatccagtacttcaactgatggaaaagcaagctgtcatcaccgccacagacctgtgcataggttatcgtacccacaaaggagaaaagaaagtgcacgaacacctttctttcggactctatccgggagaactgaccagtctgcttggagcaaacggggccggaaaatcgactttgctccgcaccctgtccgcttcgcaaccttcactggcaggagatttgcaattactgggcaagcctttgcagcagtattcggaaaaggaacgttcgcgcaccatcggtgtagtcctgacagacaagacacaagccggagggctgaccgtgtatgaactggtagctttgggacgccagccgcatacaggcttcttcggacggctccatcccaaagaccatctcattatcaaagaggcattggatgccgtaggcattgcccacaaagccgaaagctacaccgccgaactttcggacggagaacggcaaaaggtaatgatagccaaagcattggttcaggaatgtccgcttatcatcttggatgagccgaccgcttttctggacgtggtgagccgcatagaaatcatgactttgctgcatcagctggcggtggagcaaaacaaggccatcctgctatccacccatgacatagaacaagccttggtactgtcggacaagctttggctgctgtccaaagaaacaggactgcaatgcggagtgacggaagatatgattctgaaccatcggatggacacgctgttctcacacagtaatatccggttcgattatgatcatggcatctactatccaaccgtgaatggaaagcaggaaataacggtggaagcgacagacgaaaccttattgcactggactatcaacgcactgaaccgtcacggatatacttgtctgcaaacccaaaacgctcctgccggtctgccccatctacaagtcatcgctcccgatgccttgtacctcacctgggacgggaaacaacggacattcacttcgttcgggaagttgctggaagaaataaaataaagacacgcatcaatcattccggattacgcgcaatacatctctgtaaatcaacaatataacgtgaaaaaatattctaaattcccctgaaacggttttccattctccgctatcaaattcgtaagcgtctccgcgattcggcttgacgtatatcggttgttctaattcctgtgccatagttgcggttacttccttgcaggagagcgtcataaggcgtatttttgcccatctgcatttgttgcttcacccaagtgaagaggcgatttcacttaggtgaacagccgttttcgcctaagtgaaacagttgcttcacccaagtgaaatatcaaatgaaacggagtgaaagatacggtaggaacaaacttttgttacatacgtaacaggattcgatagccggaagcataccgattgaaggagatttgagaatcttttacacagaaagtaactagtaatgagcacgttactgtgacggaacttttttgttctttatgtaaacaagcccaaagtaactattcaatccgcccctacggtgaaccattggatagttactttggacttttgcccctctcttttcttatcagatatctatttctaaaagctattctttcatcaaatagcctttgaaactttcaaagtctttttccatcggaacactttgtttggttcctttcataaacgcttgcagtttggcgggaatctccactttgtctccaatgataccttccacagtttccaggaatttagccggatgtgccgtttccaggaaaatacccgtttcgctgggggacaatccttcggataaagcacgataaccgcaggctccatgcggatcgagcaagtaaccggtttcccgatatacttcacccaccgtttcacgaatctgttcatccgtataagtcgcaccagagatatccgctgttatggcagcatgactgttaccgtacaatgccagtacacgggcaaaattacttggatctcccacatccattgcattggcaatagtagctatggaagggcgaggattgtattttccggtctgtaagtattggtagaaaatatcattccggttattggctgcaataaaacgcttgacaggcaagcccatgcgtttaccaaatagtccggcggtgatattaccaaagtttccgctaggtacgcacactaccagatgatccgcttttccttctttctttaactgcgcgtaggcatagaagtaataaaatgcctgtggcaggaaacgagccacattgatggagttagcagaagtcaacttcatgtgcgcattcaaatcagcatccataaacgcattcttaaccaatgcctgacagtcatcaaaagtaccgtccacttctaacgctgtgatattccgccccagagtagtgaactgcttttcctgaatttcactgacttttcctttcggataaagcacatacacatgaataccttccactccgaggaagccattggctacagcactaccggtatcccccgaagtcgcaaccagtacattcacctgcttttgcccttcttttttaatgaagtagcccaacaaacgggccatgaaacgtccacctacatctttaaatgccaatgtaggaccatgaaacagttccaaagagtaaatattatcctttacctttacggcaggaacatcaaaactcaatgtatcataaacgatctgcttcagtgtttcagcaggaacatcctcaccgaagaaagcatcggccacgcgataagcaatttcctgaaacgacagattctcaatctgatcataaaactcttgcggcaatggcttgatggcctcgggcatatacaaacctttgtcagaagccagccccttcactacagcttcttccagagaagcatcggaagcctggtgattcgtactgtaatatttcatagtaaacaatttttcaatgcgtcaatgtgctaatgtgccaagggctttgcatggagggttgccattggggcaaattagcaaactgccacattattttttcataaattcattcataaactcatcttctttcaatattccataactgccttccacacatgccacttcatcaaaggtctgcacacagtccggttctataccgggataatagataaggaaaggcacaggttcggccgtatgggtacggagttcgcaaggcgtaggatgatccggaagcacggcgatagccacaggctcatcccaatccttcactgcttcataaacaggtcttacaacacgtttgtccagattttcaatagtaaactgcttcaacttaaaatctccttcgtgaccggcctcatcactggcctcaatatgcagatacacaaagtcgtccgtcttcaatgcttccaatgccgcagccaccttattctcataattcgtattatataaaccggtagccccctctacagcaatacggcgtaatcctgcataatgtcctatgccattgattaagtccaccgctgaaataacagcccctttctttatggccggatacttcccggagagaggttccatctgcgggcgataccccggactccaaggccagatactattagcaggatctttgccttcggctatacgtttttgattaaccggatgatctgccaacaattcctgggaagccaggataagattatttatcaatccggctgtttcctgcgcctccggtacttccgccttcaccatgagcggacggaaaggctgcaaaggcacatcatggggcggggtgcagtccaattgtttatttcccccttttatcaccaacaaatggcgatattgtacaccggtatagaaatgaatccggtcagaacccaatttttcttccaaatatctaaccagcacatcagcttcttcggtagtgatatgtccggcggagtgattttttatcttctcatcttcgatgcagataatgttacaacgcatagccatatcgcccggttgcaactccaccccgatgcttgctgcttccaacggcccacggccttcgtacaccttcggtaaattatagcccataacagacatattcgccacttcactacccggatgaaatccgggagcaactgtaaccaacctcccggtacgtcccatagcggccaacttatccatataaggtgtactggagtattgcagcaatgttttgtttcccagtgattcggcaggccagtcggccataccgtcgcctaaaataataatatgtttcataagcctaaatattagcgatgctcatgatatcggcaaatactccggcggcagtcacactggcaccggccccatatccttgtatcatcatcggatactctttatatcgctcggttgtaagcagaataatgttgttgctgccttccagaccatagaacggatgtttgctgtccacttcctgcaaagacacactgcctttcccatcttccagtttggctacaaaacgccagcgtttgttttcatcctccagcttttgacggcgtgattcaaaatccgtatccaggaaaggtactttcttccagaactcctccaacgggccttcaaagaaatcattcggtacaaaaagatgtttttccacatcttcctgttccaatttatatccggcttcacgagccagaataaccagtttacgaatcacatccttgccactcaggtcaatacgcggatcgggttccgagtagcgctcttcctgtgccattttgatggtcttgctgaaaggaatgtccgcgctgattttgttaaagatgtaattcagcgtaccgctcaataccgcctctattttcaagatcttgtctccgctgtttatcaagtcgttgatcgtgttgataataggaagtcccgcaccgacattggtttcaaacaggaatttcacaccccggcggcgggctatttgtttcagttcactgtaaacggagtattcggaagaagcggcaatcttgttggcagctacgaccgaaatattattcatcaggaaatctttatataaagacgccacctcggcactggctgtacaatccacaaacacagagttgaatatattcatacctataatctcgtcatgcaacacctgggtggacgaaggcattcctttctctgccaactcttccttataatgtgacaggtctacgcctgcacgggtaaacaacgcatgatgtccatcggctatacctaccactttcagcttcaaaccgcgttcctgcatcaacttttgttgctgacaacggatttgctctatcaaactgcctcctaccgtacctgtaccgcagataaaaaggttcagcacctgatattcggacaggaagaacgaatcatgaatcacattcaatgatttgcgcagtgacttggattctaccacgaaagagatattggtttccgaagcaccttgagcacaagcaatcacactaatgccgttacggcctaaagtcccgaacagcttaccggcgatgcccggtgtatgtttcatgttctcaccgacaatggcaatggtagccaaattcatttcggcaacaaccggactgatttcccccatttctatttctttggagaattcctcattcagcacttcacaagccagtgccgcatcttgattacgcacaccgatagaagtactgttctcggaagatgcctgcgataccataaacacgctgatgccgttttgtgccaatgctttaaaaatccggaaattcactccgatcactcccaccattcccagaccggtaaccgtaatcaaactcgtatcattgatggatgagatacctttaatggctttagaaccggaattcacttcctgctttatgatagttccctcgccttgaggattgaatgtattcttaatcagaataggaatattcttatgacataccggataaatagtcggcggataaaccaccttcgctccaaagttacaaagctccatcgcttccacatagctcaactcattaatggtataggccgtactgattacacgcgggtctgccgtcatgaaaccatccacatccgtccatatttccaagctatccgcattcagtgccgcagctatgacagaagcggtataatctgaaccgccacgtcccaaattggtcacttcaccactgttcttatcagtagagataaatccgggaaccaatgccacttccggtaatttctggaaagtttctttaaccaagcgagtggtcagttcggaatccagaatatgtttggcatgttttttttcagtcttaatgaagttgcgggagtcataccatacagccccctttatcaacgaagctacaataatagacgacaagcgctcaccataacttacaatagtagccgacgttttagacgacaagtcctttatcagataaattccctgaaaaatatccttcagttcactcaacaattcattgaccttatccaataaaacagtacgctcattacctgccggaattacggtatataccatttcaatgtgacgattcacaatttcacggtattctttctcgtatgcggaatccccattggcagccatctgcgaagtattgattaacttgtcagttataccgcccaatgccgacacaactacaattacgggctcttcaactgcctctactatctgtttgacgcttaaaatgctgttcacggaacctacggatgtcccgccgaatttcataactttcatgcaattatctatttttattccagcttcttttgccattctgtcctccgagccatttcaagtccggtaaagaatctacttttgtttcacccagcatgacaacgaaaagaaactgtatctgtttacactaaaaaaataaaattaaaagcttgttttgcttacgtccgtaagcgtgtatcacgtagaaacacatatactatccttaaccccgaggggtcattgttgtggatgtggacattgtagttgtcatgtgccccatccctaatgtggtggttgtatggagatagtatatcgtcattttattattgttcttcttctgttttttatttgaacgatgcaaatataaaaacaatttcctacaatctatcacaatttcccatttttttgcgataaaatataagaatgctttttattaaagcagaaataagacaaaacttttttatcctgcccatgttgatatgcagaactatttccttacctttgtacaaattcagcctcaagttgcgctgttttaattatcccgtaagaatatggcaaaggaaaagactgtatatgtatgcaccaactgtgggcaggattcacccaaatgggtagggaaatgtccgtcttgcggtgcatggaacacatacgtagaagaaattatacgcaaggaacctgcaaacaaaagaccggtatccggcctggaatccgtaaaaagcaagcctgtcacactgaatgacattaccggaggggacgaacctcgaattgatatgcacgacgaagaactgaaccgggtattgggaggcggtttagtaccgggatcactcgttctactgggcggtgaaccggggataggcaaatccactttggtgctgcaaaccgtacttcatctgcctgacaaaaaagtattgtatatatcgggagaagagagtgcccggcaattaaaactgcgtgcagaccgtatcccgcataattcttccgactgcctgatagtctgtgaaacttcgttggagcagatttacgtccatatcaagaatacacgacccgatttagtgatcatcgactctattcaaaccatctcaaccgaaacgatagactcttctcccggcagtttggtacaggtacgtgaatgttccgcttctattttaaaatttgccaaagaaacaaatacgccggtcattctgatcggccatatcaataaagaaggaagcattgccggccccaaggtactggaacatattgtagacaccgtattgcaatttgaaggtgaccaacattatatgtaccgcattctccgcagcatcaagaaccgtttcggaagcaccgccgaactgggcatttatgaaatgcgccaaaacggtttgcgccaagtgagcaacccgtccgaactgttgcttagccaagaccatgacgggatgagcggggttgctatcgcctctgccatagaaggagtccgccctttcttgattgaaacacaggctttagtcagttcggcagtatatgggaatccgcaacgttctgccaccggatttgatttacgacgtatgaacatgcttctggcagtacttgaaaaacgggtaggattcaaactggcacaaaaagatgtctttttgaatatcgcaggtggattgaaagtgaatgatccggccatcgacctgtctgtcatcagtgccattctatccagcaatatggatacggaaatagaacgtgacacctgcatggcgggtgaagtaggactgagtggtgagatccgacctgtaaaccgtattgagcaacgcatcggagaagcagagaaattaggtttcaaacaaattcttataccgaaacataatttgcaaggaatggatacatcaaaattaaagatagaaatcattccggtaaggaaggtagaagaagcgttccgggctttgtttggatgagataaataagagaaaacttaatttgaataatgatataaaatgacaaaagaacaatcataccccccgacctgcatagactgcggcacacagaactgcaagttcaaagagcgcacttaccctgaattttgtctgactacccatttggaacaagaagatttggaatgggcgttgaaacaatataacgacaacaacaagataatggcagccagtgccgaagtggaatatgaaggttactgccgattaacccgtgtggaagaaatcatgactttcgcacgcaagatgggatataaaaaactaggaattgcctattgtatcggactggtgaatgaagcccgtatttttgcccgcatcctccgtgctaacggctttgaggtatattcagtaatctgcaaagtagccggaatagccaaatcctctatcggaatccccaaagaatgtgaaaaaatcggtgcggcaatgtgtaaccctatcctacaagcacgccttctcaaccaagcacatacagagttgaacgtggttatcggactatgtgtgggacatgacagtttattctacaagtactctaatgcctatactacaactttagtgaccaaagaccgtgtgacaggacacaaccctgccgccgcactatataccgccaattcttattaccgtaaaaaattaatgccggaaggcgaacaatccaaataagaaccatgatacaggaatttcaaataagagtcttgcctgaacaagcagccaacgaacagtcactgaaacagttcatcggacatgacaagggattggatatacgtaccatccatgcccttcgcatcttaaaaaggagcatagacgcacgtcaacgcaccatctatgtaaatttgaaagtacgcctatatattaatgaaatgccacaagatgaggagttcacccgtactatatataataaggtagatgggaaaccacaagtcattgtcgtgggagcaggaccgggcggactttttgctgccttgcgattaatagagttaggactccggcctgtcgtagtggaacgaggtaagaatgtacgcgatagaaaaatagatatcgcccgtatcagccgtgagcacaaagttgcccctgaaagcaactacagtttcggagaaggaggagcaggagcctattcagacggcaaactctatacccgaagcaaaaagcgagggaatgtgaacaaaattctgaatgtattctgccaacatggcgccagtacctccatcctggcagatgcccatccccacatcggtacagacaagttgccgcgtgtgattgaaaatatgcggaataccatcatagaatgtggtggtgaagtgcatttcgaaacacgaatggattcccttattatagaaaaaaacaaaatcacaggtatagaaacaaataccggaaagactttcaaaggacctgttattctggctaccggacattccgcacgggatgtgtatcggtggttgtatgacaatggtatagagatggaaaccaaaggaattgcagtaggagtacgtttggaacacccgtccatgctgattgaccaaatacaatatcataataaaaacggacgtggaaagtatctgcctgccgctgaatatagctttgtgacacaagtagaaggacgtggtgtctatagtttttgtatgtgtccgggaggatttgttgttcctgccgcaagcggtccgcatcagattgtagtaaacggcatgagtcccagcaaccgcggctccaaatggagcaactccggcatggtggtagaaatcaggccggaagatctggcggaaaataatctttttacagaagaattaaaaacgaaaagtgaagaattaaaagccactaataaaaatcatggtcaatggactaccgaccattgtccattaaccatgatgtatttccaagaagcattggaggcctcctgctggcagcaaggcaatatgcgccaaaccgcaccttcacaacgaatggtggacttcacccgcaaaaaactaagctatgatttacccgacagttcgtatagtccgggattagtttcctctcccctgcatttttggatgcctgcattcattaccgaccgtttgagcaaaggtttccaacaattcggaaagagcagccatggcttcctgaccaatgaagcagtgatgattggtgtagaaacacgcacgtcggctccggtacggatcctgcgagataatgagacactgcaacatgtcactgtcaatgggttatttccttgtggagaaggagcaggttacgccggaggaattgtttcagcaggtatcgatggagaaaaatgtgctgaagcagcagccacttatttaggagtaatgacagattgaacctatccgaaaatgatttacagcacatatgcgggcgcattcaaatgcgcccctacaaataaatgattggtgatgttgcctaaaagaagatttctttgtctttatgaatctgttttttataaaagatatgtatctttgcaccaaagaaaacatcatgcatcatcccgaaatagccatagtagacccaaataccctcacttgcctggggttaaaaaacattttggaagatatcattccaatggctactatccgtgtattccattcctttggtgagctgacggatgacacaccggacatgtatgcccattattttatctctgcccaaatctattttgaacatacttccttctttttacttcgtaaaccaaaaacaattgtattagcaggaggtgacaaccagcctcaattatccggtgttcccaaactgaatatctaccaagatgaaggttctttgataaaagacatccatcaattgcgccaatatggacatcaggcaagaaaacaagcagcagataaagcaatgcacatagaaaaaacggaacatgaattgtctgtccgggaaatagaagtattgatacttatcaccaaaggacttatcaacaaagagatagccgacaaacttaatatcagcctgaccaccgttatctcccaccgcaagaacattactgaaaaactgggcatcaagtctgtttccggtcttaccgtttatgctgtgatgaatggctacattgaagcagacagaatataaaatcctcatttattaggattgcacacatatcaggtttaccgttactttgcagccggaatcattctccatcatggattatacagagtggaatatataaattttccgcctggtagaaacttgtagcaactctggttatccgtgatgtatcaaataaaaccaaacaataaatatgagaaaaaacattttattcattacatcctgcctgctggctgcaacaacttttgctgaagatatcaacacgctgcctaaggacactacaaaagtcattgatatagaagaggtggtagttatcgcttcacctaaagaaaccggaaaattaagggaacttcctacagccgtatctttactctcccaaaaagatatgcaagcaaaccaaatcaccactttaaagaacgtgagttcactggtacccaatttctttatgcccgactatggttcaagactcacctcagccatttacatccggggaatcggatcgcgtatcaatactcctgcggtaggtttgtatgtggacaatatcccttacattgacaaatctgcatttgatttcaatttttatgatatagaacgtattgatattcttcgcggtccacaaggaaccttgtacggacgcaataccatggggggactaatcaaggtacatacccgctctccattctcctatcagggaacagacgtaaaactgagttatggaacaaaaagtaactaccgcagtgcttcattaacccattaccaccgttggagtgactgtttcgctttctccgccggtggttattatgagggatcagacggattcttccgcaattcgctcaatgggaaaaaagtagataatatggaagcaggaggcggacgaatacatgctatctggctgccttcagaaaacttaaaactagacttcaccataggctatgattataatgacgaagggggatacccttattactatacaggagctatagacggatacgacaaagagaatgaaaaatataaaaactacatagggaagatttcatacgatcaggattgtacttatcgccgtggactgttcaataccggtttgaatattgaataccaggcgcaaaagtttatcttaagcgctgttacaggattccagaatttaaacgaccgtatgtttatggaccaggatttcctgcctgtcagcatttataccattgagcagaagcagcgtctgaataccatcagtgaagagattacttttaaaagcaaaaacaacaagcgctggcaatgggttacaggggttagtggtttttatcaatggctacataccaccggtccggtaaacttcatggaggacggagtgaccgatatgatcgaaggaaacatcaacaatactttcaagaaaattcatttagacgatccccgtacccctgaaatgagtctggacgttttgaacaaccgtatccgcgtaagtggaagttttgacacaccggtattcagcaccgcactgtaccaccaatctacattcaacgacctgtttgtgaaaggcctttcagtaacagcaggtttgcgcttggaatatgaaaaaatgtctatgaattatttctcggatagtaatattgatttcgatttctttcttaaaatggcaatgcctccccttaatattccattcaggaatttgaatgccgcaccgctattggaaggaaaagaaaaaaacgactatgtacagctacttcccaagctagcttttaaatacgatttcagccctgcaaacaatatgtatgtaagcataaccagaggatatcgttccggaggttataacgtacagatgttttcagaactgatacaaaatgacatgcaacaaaaaatgattgaagccatactagacaaggcaccagaatctatggcaggtatgatagaaggaatgatcaagcaacacatgcccaactacggaaaagaattgaacgtacaagaaacaactgtctacaagcccgagtacagctggaattacgaagtgggatcacatctcagtttgttcaacggcaaactgaagaccgaccttgccgcattctacatggatacccacgaccaacaaatcgccaaatttgtcaatagtggcttgggacgaatgatggtcaatgccggtagtagcgaaagttatggagtagaggccagctttctggcatccatcaacaaaaacctgaatatgaatgtaagttatggatatactcattccacattcaaaaaatatgacggaggtactacatcatcagaagagcaaattgattatagcggcaattatgtaccatttgttccccgccataccatgaatgcaggcgcaaattatagtttctttttcgataaaagcaattggatgcaaagcctgactttaggcatgagctataccggagcaggaaaaatttattggactgaaaaaaacaatgtctcacaaagtttttacggaacactgaacgggcgcatttctttgcagacaaaagctttacagatagatgtatggggacgtaatttaaccaacaaggattatacaaccttctattttgaaaccatgcatagaggattcgaacaaaaaagcaggcctttacaactgggagtggatatacgttatcacttctaaccattcttgcaaaaacagaaagggggttcatcacgaactccctttctgtttccacatttaccaaatcaaatttattttttattctgtcacaccaagaaaagcaagaactttattattgctgtaaatgatacccatagcttctagaacaaacctatttgttttagtgtatgtacatagagaaaatgctgtttacaatagaaaactgcttgagcctttgtcaaaagaaacaaacaataaaattattcattgacagcgccgcaatgaggacacactcctttattctttatcttcgccccacaatttccacaactgaatttataccgggaagcatgctttatacgattaaatgaccatacagcatataccaataaacatggataacccaaatagtaatacgtagtaaatgtaaaaaacaaatataaaaagatacagcaggacatcaatcccaacaaataaaaacatgcagcttcaatatgtgtctgatgaaacaaatcatccaaagtagccaaccccacaagaataatcccccaaatattaaacatgaaaagagaaagaataaaaggtaagctaaaaggattcaaagaaggattataataaaactgctcccaagttcccggaacaaaatgctgaatactggcataaagcgtagctgctgtagctaccaaccaagaaagaactgtaggaaaaacgctatcaatatcattcaaccagattaattgcagcttctggcgacgaatagccctatgaatataccaaataccgaaaaagcctaatatgataaagaaagcgatggtatgagaattactgaaaaaatgaataaactgtgacactgaatccacaggaactactttctccaacaattccttttcatgtatccatcccattgtttcctggtcccgtgctacctttacccatacagaatccacactatcagcagcttgtatcataaactccgctaccaccagccgttctcctttaaaaacaggaagcacatcaaccaatggcagttgctgtaacataagcgaatctgaagtaacctcaaaattactgtttaatgtataatgccgttccatcaaataattgacagaatcccttttcttttgcggcatatccccactcagagtaacaggtgaaggatattggcaagccattaaaatagccaacaccaaaaacagtaatccgatgtacttacttttcagcataaactttcatctgacaattcttacaatcaaactctaagcggaaacgtctgttatccgagctaaccaaataataaggttccctataaggagaacgcactttatgccaagagggacaccatcccatactataacgcaaacaatgcttgcaaaacatcaataccgcttcttctgccggagccttttcataagccggagcaatacgctgcacgccatgattcctatagaaggaaacagcatcagcattcatcacatttcccaaataagtcaattcattcacaggaaaagcatgatgcgttcgaggcaacttataaatttcctgccgatagttaatacggcgcacttccagcagtttctctattcccttacggcgaagttcggcaagcatagaagctggaataaaccaattgtccgaccagtcaatcactatatctgacgcttcaaatggagtatttcctaactttccaagttgtgtacgcaagttatcttcctgcggagtacgggcacgttccttctccctttccagcaccacactggcactgtgatcatcttcatcggtcagagacagagtaaagccccgattattttcagccaattttaaaatgacagcaattctcctttcagctgatttacgcgacatcaacctctcaaattcctgatcaaaattacgataaagtatcgtacggggctttatccgaggcatctcttgaggaaataacttattattctccacccggtttatgcgaaatccctgcaacttaccagtctcatccaaaaaacagacgccatctccattattaaaagacttgattccggctacggtaagataattaccacgaatttccttcactgtccccatctcctcccctaaagacttgggagtatcaaaagaaaaaatatccttattcctgtcaaaaagaaaataattagtaaaaccacgactgaaactcttatccaattgaggtttgaactctaatttcacttttcccgatgaagcacggatatactctttacgacgtttgaaaacagtatccagcttctggcgataataagctgttacatttttaacgtaagatacatccttcaaacgtccctctattttcagggaagaagctccggcatccagcaattgctccaactcttcgctctgattcaaatctttcagagacaataaatgcttattccttactatagatttaccgttcgcatctaccatatcaaaagcaaggcgacagaactgggcacattctccccgattggcactacgtccgaaacaagcctgactaacataacattgtccactatagcttacacacaaagcaccatgtacaaatacctccaaaggcacatcaggacaagcatgatggatattttctatttcaacaagagaaagttcacgagccaataccacctgacggaaacctgcctcagccaggaatcttactttttgaggagtacgattatccatctgtgtgctggcatgtaacggtataggtggcagattcaattccaacaatcccatatcctgcacgatcaaagcatccactccggcacggtataaatcccaaatcattttttccgtatccttcagttcctcatccttcagaatcgtattcaccgtcacatagatacgaacattatacacatgagcgtaccgcaccaactcagcgatatcctccaatgaattccccgcagccgcacgtgctccgaaacggggagcaccaatataaatggcatcagcaccgtgatcaacagctgcaataccgcactccagatttttagcaggagctaataattctatttttcgttgtctgatcatcgtatctgatttatatcaaacggggtttcctgatatacataatagttcaaccaattagaaaacaacaaattggcatgtccgcgccaacgcaccaccggggcattgtccggattatcgtccttataataatttacaggcatttcaataggcaaccctttcgccaaatcacgcttatattccgtatcaagcgtataaggagaatactccgaatgcccggtaataaagaattcacgcccattacgagccatagccatataaaccccagactcatcagactcagctattaaagccaactcttttactttcagaatatcctcacggtgtatttcggtatgacggctatgtggtacaaaaaactcatcatcaaaaccacggaatatgggcaatccctgtacattgatatgatgacggaaaataccaaacattttttgtttcagcggatatttgggaactccatagaaatgataaagcccggcttgagccgcccaacaaatataaagagttgaggtaacatgagtacgcgcccaatcaaaaatagtagtaatctcatcccaataattcacatcctcatacggcatctgctctaccggagctcccgtaataatcatcccgtcatatttctcgtcgcgcatcaaatcaaagtcatgatagaatgctttcatatgttctaccggcgtatttttcgatgtatggcttttcaacttcataaatgatatttccaactgcaagggagtgttggaaagcaaacgtaccaaatccgtttctgtcgttatcttcaacggcatcaaattcaatatcacgatttttaacggacgaatatcctgtgcactggcacgtgaattgtctatgacgaagatattttcctccttcagcaattcaatagcaggtagtttatcgggtaaatttaacggcattttcttatctgttaattagttgtaagtgcaaaattaaaaaaatcccgccaattctccttattaaacgatcttttgaactaaattatttcctttccctgatcgttttcgatcaacaaaccttgattatttttagattttcactcataccttcacaacttctgtcttgattccactttttcccttctttcatattatttattaactcacctttttcttagaaaaaagaggacgaacttatatccataatcaaaaaagattaattatctttgagcgcaaaaataaaaaatattcttattattaacatgaaatataattaagtttcaagtggttgactcaagaaacaacctatatttttaaattttaatctttaaattcaaaaagtatgagaacctttaaatcattgatgataagcttatgtatgggtacaaccctatgcatgtgcttaccacaaaccacgacagcacaaaccgtaagttcaggagattcctggacatgggacaaaggaaccattgtgattgatactcctgaacgtccggccggccagaaaggcgtattaggcttaaccacccctaaaatggaggtagtccgcgtaggatttgtcggattgggaatgcgaggccccggagccgtagagcgcttcacttatattcccggtacacaaattgtggccctttgtgattatgaagcatcccgtgcagaaaaatgtcaggatatcctaaagaaagcatctatgccgaaagctgccatttattccggagaaaagggatatgaagaattatgtaaacgtacagacatagatttagtttatatcgccgcagactggttgcatcatttcccggtagcaaaatgcgcattggaaaacggtaaaaatgtagctattgaagttccctcggccatgaacctgcaagaatgctgggacttaattaacctgagtgaaaaaaaccgcaagcattgcatgattcttgagaactgttgctatgactggtttgaaatgaatacactgaatatggcacaacaaggtgtatttggcgaagtaatccgtgcccaaggagcctacattcacaatttaagcccattctgggatcattattggaaaaacggcaaagaagacaaactgggatggcgtttggattataacatgaaacaccggggtgatgtatatgccactcacggcctgggtcctgtagcacaagcattggatatccatcgtggtgaccgtataaccactttagtagctatggataccaaatctgttgttggtaaagatttagtggagaagagaaccggcgaagaatgtaaagaattccgtaacggagaccataccaccaccctgcttcgcacagcaaatggaaaagttattgaaatccaacataatgtaatgactccccaaccttacaaccgcctgtaccaactgacaggaagcaaagggtttgccaataaatatcccgttgaaggatatgctttggatgcagcacaactgactgcatcgggtgtgcaacccaaagtagacgatttgaactctcacggattcttaccccaggcagaaatggaagcacttgttgagaaataccagcatcctattttaaagaaatatggtgaaatggcaaaagaagtcggcggccatggcggtatggacttcatcatggacagccgtctggtatattgcctgcaaaacggactgcctttggacatggatgtatatgacctggccgaatggtgctgtttggccgaactgggagctatctctatggataacggctgtgcggcagtagccttcccggacttcacacgaggtgaatggaacgtgaccaaaggttacaagcatgcatatgcttcacccgaagacgaaaacgcaagcatggaaaaagcaaaggctttcaccgcgaaactgaaagagcagggagctaaagaatgggcgaaagaagctaagaagaaaaagaaataaacaggaataaacaagaaaaaatgtgccggaagtcactctgtcataaaaggcagcccaattcttcaggcacattttttatgccgtccgaacaacaaccgtttccggattttatcgagaatcaaaaaaaggatgtaaccggcattcttataatttccggccaaagcacttcgacagtgtcaaattcaatccgacacgccattttgtcaaagaagtatacagaaagggtgaaaaggaactggaacacgcagaccccacatacggtttcaagacgtcttcttccaagcacactcaggaagagcgattcggcatgctgatggaatatctaagggaatacaccttcatcacccgccaggaataccctgttctcttatatcctatgatagatttcatcgaaaggaaccctgccccgttctccccaaatgcctttgttcccatcccgtatgccgcaaggtataaccatattgatgcctgccccatggggcagcttcaatagtttcttcatccgcctgctgtcaaaaccttccagcggacaagtgtcatagccttcgtttgccatggcaatcataaaggtttgggcagcaagggcacaggatttatttaccgtcacacgcatatcgcattccgaaacttccagcatcatagggcggaacaggctgatggttctcgccaatatcaccctgaaaagccctagaagcccgaaaaaccttgcataaatgaaaggcatcagtttaccataatacagcttcctgtccctaatacgtttttcctgacgctctttcggactattacgcctgatatttccttcttcaaagtcaagcacaaatttagcacgctttttatacaaatcctgacgagtaacaaaaacaacaatttccgaagccgtagaagcagccgactgccctaaacaagcttctgaaactttcgccatcagtccgggattcgttatttgataaaattcccacaattgcatattggaactattgggagccagcgtagccagttcaagacaatgtttcaccttttccgggtctatcggtttatttttatcatacctccgcacagaccggcggaagttcaatacctcttctaaattcatttcctattcattttttatattttacttactgaaccgacaagataagttttaggggcgatgtcaactataacatcccccctacactactatatctcagcggatattaacatcctacaggttgttcttatagatattcgccatcaccttctggtattgattctcaatctgcatatacgcctgaagattcttataaatactttccgtttccacaaaatattcaatcaatgaaatttgtccttcggtcaatgcctgcttcaataaatccagcgaacggtacatcaaagggacatcatacgcattcatggcatccttcaactgctgcatctcattgaagagagacatcagagaagcttcaacctgatctttagcattttcttgcatcaattgtgcgctgatagcctgtgccttggctatctttacctttttacgattctgaaacaaaggcaaggagccccctaccacaaaaccattcatcgaaaccgcatcatccgtgttacggcgaaagccggcttccagcttcggtaaccatccttggcggtctaccgaaacctgcttctcggcggcacgggcagtggcggcggcggcctgcaagtcaaggtctgacgccatcacttcatccctcataacattgtaatcattgatttcctgtatggcaggatacgtggtttcagcaaactccaaaggcatgttaccgttcatggcaagcagagactgcaaggcagtgcggtgagctgcgctgttttgggcaacttccgtctgcacgttcatacgctccatcttgattttgttgacttccagtatattcgcatcaccggtcgtcagacgtttttcataaagtgcctgtaattcatctgcatttttcatacggatatccatcaatgtcttttcctgattcaacagaataaggtccagacagagattcttcgcattcagcagaatatcccggcgggcagcctgttgttgcttgtccaccgcttcgttctgcaaagtagcctgccggttgcgggcaatatactgagtaggaaaatcaaaaccttgcgaagcaacgaactccgtaccgtgaccaccttcggcaccattactgtaaaaagagctgtagctcaccgtaggatcaggtaagttgttgtttgtccggttttccatcttggtcgcatcggcggcatgtttctgtgccttgagctctttattgttctgctctatgcttttcaaaatgtgctcaatactctgagcctgcatcagcaagggagagcagagggctattataactaagattcgtttcatattatttctattatttcttctttcggttcatcagttcataaacaatcggaataatgaaagcgttcaggaaagtcgatgtcaaaagacctccaagaataactttcgccatcgggctttgtatttcattacccggcaaatcgccacggaatgccaaaggtatcaaagccagcgcggaagacaacgcagtcatcaggatagggttcaaacggtctaacgaaccgtgaagaatgctttctttcaaatccataccttcttcgcgcaacatattgtaatgacttatcaacaacataccattacgggtagcaatgccaaacaacgagataaagccgataatagccggaatgcttatctcacccgttgttatcatcaatgcaaataccccaccaatcaacgccaaaggcaaattcaacaaaatgactccactttgggctgcattcttaaactgggtataaagcaacaggaagataaccacgatactcataaacgaagtgagcatcagcgtacggctggccgcctgctcgctttcaaactgaccgccatattccacatgatatccttcgggaagcttgatttgcgcatcaatccgttcctgtatatcattcaccacgctgcgcaaatcacgaccgctggtattggccgaaatcacaatcttacgcttcacattctcacggctgatggtattcggtcccatggcagaaaccacatcggctatatagttgacagggattttctgaccgtcaccggtatcaatcatcaggttgcgcaccttctccatctcatcacgcacctcatccttggtacggacaataagattaaacgctttgccttcttcatatacctgtgaaacaacttcacccgccatgttcactgatacaaactcggcaaactccggtaaagaaataccgaatttggcaagcatctcgcgtttgggaacaatcttgagctgcggacgttcgatttgttgttccacattcaagtcggcaataccctccacactgctgatggcatcctttatctgattaccgatggcaaacatcttgttcaaatcattaccaaacagtttgatggcaatgttggccttggtacccgaaagcatggcatcgatacggtggctgataggttggcctatttcgatattcgcaccggtaatggtagataacttggcacgcacatcggctaccagttcctggcgggaacggtctttcaattcaaacggggcctcaatttcactcacgttaacccctaatgcatgctcatccagttcggcacgtcccgttttacgggctacggtctgtatttcgggaatagacatcagcaactcttctgcacggtgtcccatcttgtccgattctgccaaagagattcccggcaatgaactgatattaatggtgaacgaaccttcattgaaagatggcaggaaactgcgtcctaatgtaaaaaacataaccaatgccaccgcaaacagtccacccgtaaaacccaatactgcggatttatgattcaaggaccataacaaggcattgcggtaatgctttttcatccatacggccacaaatgcctctttgggcaatcctttgcttttattattacctaacagatagctgcacagtaccggagtcagtgtcaaagccactaccgtagaagcaaacaacgccacaataaaggcaatgcccaacggaaccagcatacgcccttccattcctgtcaggaaaaacaaaggaacaaagctgactacaataatcaaggtagagttcaagataggcatacgcacttccttcgaagcattgaacacgacttcaatcacgctcttacgttccccttcgggcaacaagcgattctcacgcaagtgcttccatacattttccacatccacaatggcatcatccaccaacgaaccaatggcaatggccataccacccaaactcatggtattgatggtgagtcccatatagtgaagagtcaatatagaaacaatcaatgacaacggaagggttaccaatgaaataaccgtggtacgtacattggcaaggaacaggaagagaacaatcaccacaaaaacagcaccttcatacaacgaatccttcacattgccgatagagctttcaataaaacggctctgacggaaaatatctgtagaaacgtgtacatcagccggaagattcttctgcaaatccttcaatgcggcttccaactgctctgtcagttcaatagtcccggtcttgggttgtttggtaacggtcagcagtacggcaggttttcctctctccgaagcagtacccagtttgggttcctgcgaaccaatcttcacatcggcaatatcctccaatgtaacgggcaccccttccaccgtcttgatgacggaacgtgacaactgagccacatcatgactggaaagcaccccgcgaacaatatattcgtttccatattcataaatcactccgccattggcattctgattcatgttacgggtaacgttcatcacctctgccaacgtaacattgtaatgtttcatgcgggcagggtcaagcaacacctgatattccttgatatcacctcccagcacggcaacctgtgccacacctcccgtagagagcaggcgcggacggatagtccagtctgccagtgtacggagatcgagcatggaagtagtatccgaagtcagaccgataatcagcaactcacctaaaatagaagactgaggtcccatggtaggtttacctacattctcgggcagctcctcgctgaccaaggacaatttctcactgacaatctgacgggccagatagatatcggtatcccattcaaattccacccacacaacggaaaagccattggtggaagatgaacgcacccggcgcacatgggtcgcaccgttcacggcagtttctacaggaaaggttaccaattgttccacctcttcggctgccataccattcgcttcggtcataatcactacagtcggcgcattcaaatcggggaacacatcgacttccgtatgaaaagccgtgtaagtaccgccgataagcagcaaaaccgacgccaccagaaccaatatacggttctgaagggaaaaatgtataatcttatttagcataggacggctgattaatgttcatgactatgagccggaatcgcattgctggccgacgctaatttcacctgataagctccctttgttaccacacggtcaccggctttcaaaccggtcagaatctgcacttcctttccgttgctcgctcccaaagttacctcctgtttcttatatccttcctcatccagttgcagataaacaaagtacaaaccttgttcttcggtcagtgccgtaacaggcaaggccagcacatcgggcatttccgacgagagcagatacacctccacatacgaaccgggaatcacatctccccgattatcaaattcgaaagttacaggcacataaaaagaagtaccaccggatgctttaccataagaaagcagacgccctttcaactcacccagctcatataccttattatcgtatggagtcttgaagtttgccgactggatgctatgcagataaccataatatttctcggaaacatctgcacgaaggaacagacgacggttctgagtgatactcaccaaaggctggcctaccgacacatagtcaccttcctgcaccagacaattcttgatatagccacctaaaggagctgtaacggacacacctgttttggtctggttctttgaaatagcctcgtatgccaataatgcattttcataactctccttaatggcattgaaatctttctgcgatattatctgactttttaccaacttggcggcacgttcatattcttttttggcggtttcatatgcgatacgggtacgttttacagggtctccgtccggcatattctcagcagagatattcagaatgggagcccccttgctcacactcataccgtccgttaccggatggcggaaagaaaccacaccggctacattggcgactactacgctttcatcgccttgtgctgcctgcacctgaccgctggtcgttatcacctgacggaatgattcaggccggattatttccgattctaccccggctgcttttgctttttctggagccagaattatctcatcggaatgtccggctgcagaagcttccgcttcatgattatgcccttcgtgaccttcattctcatggtcgtggttttctttttcatggtcatgcccttcgtgattatggtcatgcccttcgtggtcgtgattatgtgcttcctccgttccatgatcgtgtccttcgtgatcatgacccgatttactgttgcaagagcctaagaggaacaagcctaagactcccataaaaataagtttcttcatgatgatattatttgttcttactttttattaaatgcaaaattagtgtaaagaaaatgcaacaaagttgcggataaaaagataaactttctatctgttaagcaagaacatcgcaaggaggagcacgcaacccctttacgtggggaagacacgtagaatgcagtttttctaaatagtaattataaggtaatgtgttgtgttctgtcaaccgcaatgaaagcgccaatacatccgtcaccgtatataacagcaaacaaaacgaataatcaggagaaacactgtcttgggcccgatccggagttacacttttaaacttggtcacacatccggcattacatgtatgattctcatcagaactattattatgctgctgatgctgcacggaacattgacagccgcacaaagtcatatcatgctgcaaacaaagaatttcccggtgatgatgatgaggcagaacagatgctgtcaacatgataatgctgaccaacatcaatacccatgctatgtatcgtctccgtttcatcgggcacaaaaataggtgtttatcatgtaaaatccaaaaagaaagcatggtaaatgccgaattctcagcaattaccatgctttcttattatcttttacatacaaagcttaccaaatagagacacgtttttcaggagccaaatacataggatccccctctttaatgccaaaagcatcataccatgcacctatttgagggagtgctccgttcacacgccatctgcccaatgaatgtggatcagacttggtttgcaaacgaatctgctcgtcgcggatattgccagcccacactccggcgtatgacaagaagaagcgctgttccggagtaaatccgtcttttaccggcaggggagcatcttttgtcgcattcttgaacgcctggaaagaaacctgcaaaccaccatgatcggctatattctcacctaaagtcaaagaaccgttggcattgagtcccggcaaaacctggatgctatcaaagaaattcaccattacctgagcacgttcttcaaaacgtttggcatcttcggctgtccaccaatctttcaaattaccatccttatcaaactgacgtccctgatcatcgaatccatgagtcatttcatgaccgataaccacgccaatagctccataattaaatgcatcatcagcattcatatcaaaaaacggatattgaagaatacccgccggaaaacaaatctcattcgtggtcggattataatatgcattgacagtctgcggagtcattccccattcatctctgtcaaccggctttcctgccttggataacatataatccagttcgaattctgtagcacgcttcacattggcccaataagaatctttttcaatattcaaaccggtataatccctccacttatcaggatagcctacctttacataaaaagaattcaacttctcaatagctttaatctttgtgctgtcacccatccattccaaattccgaatacgttctcccaatgcggtctgcagattctttactaactgcaccatacgttcttttgcggctgccggaaaatatttctccacatacatctgacctaccgcttcacccagtactccatttacagtacttacagcacgcttccaacgaggttggttagcctgtttgccggatagtgtttttccataaaaatcaaaattttgtgccaccaaatcatcactcaagtaaccggcagccctgtctatcagactccattgcatataagcgatctgattttcaaccggcaagctattgataattttctcaacctctttaatcggctccacttgagaaacactcagttcagtcacccctttcacgcctataccattcaagaaagcatcccagtcaatgcccggaatctctttctttaattcatccaaagacattttatgataattggccgcagggttacgctgttccaccgcactgaaagaagcttttgcaatacgggtttcgatatccattacagcctccattttctttttagcggcagcctcatcaaaaccagccaattggaacatctttacaatatgttccttatacttattacggatattgacagtcacatcatcattgtccagataatattctttttcacccagactgatacccccttgatacaattgaaacaaattgctcttgctgtccatgatatcggcacccacatagaaactgaaataagggaatacaccgctatgagccagttccgccatcaaaggaactatttccgatttatccttcactgaagcaatcttttccaaatcagcttgaataggagttactccatccgcattcagtttcacactatccatagccaaattatagatatcccctattttctgacctattgtaccttgcgcattctgcccggcagcaatttccacaatcaatcctttcagttgttcccgattattttcagcaagcatatcgaatgagccaaaacgggaatattcattggtcagagggtgtttcttcatccatccgccacaagcatactgataaaaatcagctccttgaacagccgtagtgtccaaatttgtcaagtctatacccgaagtcatgacggcttcctttttactgtcgcatccagtagctactgccagagccaatacagccattggtaaataatgttttgctttcatttgttctatatatatgatacatactttaacttccctgcatctcttctaattccatagaaacggcctcccattcttctaccgtctgatccaagtcctttttcagtttctgatgcttttcatacaaagccatatccgatgcaccttcgggagtagccatatcagcttccacctcgccaatctcagtttccagcttttctattttctgttcacaatccgcaattcgtttctccaatttgcgaattttcttattcaattccttttgcgcctcataagataatttgttctcactaaccgtttcgggttcttcctttttagtggcagacacagtaggagaagccgaaagctgcaactcattcagactctctattttctttttctgtaaaaaatcataaatgccaccaatgtgttcttttactactccacctccgaattcataaactttggtcaccagtccatccaagaactcacggtcatgagaaacaacaatcaccgttccatcaaattccttgatagcttctttcaatacatcctttgagcgcatatccagatgattggtaggttcgtccaaaataaggaaattcaccggttctaacaaaagttttatcatggcaagacgactccgctccccacccgacagtacctttacttttttatcagaagcctcacctccaaacatgaatgctcccagaatatcacgaatcttcaaacgaatatccccttttgccacataatcaatcgtatcaaagacactcagattttcatccaacatctgagcctgattctgagcaaaataaccaatctgtacgttgtgcccgatggtcagtttaccttcgtatgggatttcgtccattatacatttcaccaaagtggacttaccttccccattctttccgacaaaagctaccttctcacctcgattaatagtcaaagtcacatcgtgaaaaacgatatgactgccatatgctttcttcaccccgtcacaaatgaccggataattgccggaacgcatggcaggcggaaacttcaaccgcaaggctgaattatcttcatcatcaatttcaataggaactattttttccaattgcttgatgcggctctgcacctgtacagccttggtagccttataacggaaacgctctatgaaatcttccgtatcctgaatttgcttctgctggttctcgtatgcacgcaattgctgctcacgacgttctttgcgcaataccacaaactcatcgtaagccactttataatcatagatatgcccgcaagatatttcaatcgtacgattggtcacattattaataaatgcacggtcgtggctcaccaatacaacggctcccgcacttgtcttcaaaaagttttccaaccattgaatgctttctatatccagatgattggtaggctcgtccaacagcaacacatcgggccgtcgcaacagcaacttggccaactctatacgcatacgccatccaccactgaactcagatgtaggacggttaaaatcctcccggctaaatcccaaccccatcaatgtacgttctatctcagctgtataattggtacctcccatcatcaaaaagcgttcattgtcatgggtgaatttctcaatcagtttacgatagttttctgaatcataatctgttctatccgccaactcctgattcattctctcaatactagcctgcaactcaaagatatgttcaaaagccatctccgcctcttccatcacagtatgtttatcactcagaatcatgacttgaggcagatagcctatcgtcacatcacgcggaacagaaacactacctgaagtaggcgcctgtattcctgccaatatcttaagcatagtagacttaccggccccattcttcccgaccagcgcaatacgatctctcttattgataacgtatgacacatcctcaaacagaggcgttactccaaactctactttcaaattatctactgaaaccattcgtttttatccttttgcaaaagtggcaacaaatatacggttttatatgtaaaaaagacaaaatacaagtaaataaaaaaagtcctcatccttaacaaataggacaaaagtattaaaacgtgttagaaaacatatttttttagttgttttatttgcaaaattcactaaaacacgtacctttgcaacgtgtttttcatagtattagatttaaggttaacaaaggttggagcaaggcgttgctcctttttttatgtctacattttcctcatacttaaatattgacttagctcaaccaagcaaaatttatctgtaatacaaaaaatgactgcttcattctcatgaagcagccaccaacaaaatacacgatgtaacacaactatgttttatacatatcagttatttaatatcgattccacaaggattgagtcccggaccaccaccacctgtatatcccctactttctcctgtgtcccatggagaaatccaaaaagcatataaatctccacaagtaacataaaacttcactttaactatcttgcctgaaagagcagcaagttttttacctgatttccaagttaccaattgtttagtattgttcaaatcattcatttccttacaatcctctctggaaaatcccgtaatcacattaccattttcatccattatctccacctgcaaatcctttgcttgtgcattcacaaaaaaatgattaccatcaaactttattttctcggtaacaagtaccccttctgtgtctgtatgcatggaaacgaacccatcacgacgtaaagttgccaacccagtagaagtaaatccatcccacatcactttattcttcattcttccactagaatacaaatacaaagaatcaccaacaatgagaggtacgccaataacagactgcatatttccccaattccatgccccttccgtttcatttactcccataacaggttcataactgggacgataaaaatgaaaaccatcccgactatatcccatccctatttcatttcttttctgaatacctaacttaccacagagatcattctctggtcctttccacatagcatagaaccctagcataacactttcataaggcatagcatcaaaattataaatggctggacgcacatcaggaaattcaggatgtggcagttccttatcggaaggagtaaaccacaaaactatatttttatcctttattcctttagccaatgaatgcgccacgctaactgccatctctggatcttcattttccaaatagcctctagagcgtccgtctgctttactcccctgccgtagactaatagcccatttttgagtaaacggattatagaaagcagtggtacgatcccccaccggtcctgattgcgcaactccttccgaccaatgaataccatcttttgaatattttaaaattattttccatcctccactatgtttttccacattgaagagtttgaaacgtttttctggttctggacacattttatcgagccaaactgtagccgcatcccgatcacaagtatctacaatattcgtacccggcactatatccatattcactttttcccaatgcttcccatcttttgactccgcataacaagtataaaagctttgacgatgtttgtgcatagatccggcaccagccaaataccacattttaaatttttgttcgctttcatcataccatattccatcactgaaaggagcagcataaggagcacattcaaaagtgtattcccactccttatccggagcaagtaccggattattctcatagaacatagccttatgggaaacacgctccatatctgtttctgcaattaaaaaatcatcaacgaataattggcgtcctagatttacagaaataacagtcggtttgtttgaaatataaggtaaagacatttcgcgacgtactccatcatcaatcatactaggaggccattgctcgggcagcacaatgccattatgcaatgttctaccattctctttcaccgttttatcattggaagatgacacacagccggcaaagcaagctgcacatataatataataaaatactttcataattattctatttttaattaccatcctggattatttttagtgatatatggattaccctctacttcatcaattggcaatggaacccattcattcttattttccttaaaccccatatattgagccctgctaaaccttttaaacaaaggatcagtattttccaattcgcgaaaacgctctactactttaccccaacgaagcaagtcaaagaatcggaagccttcataggtaagttctagaatacgttcatcttcaatagttctcatattagcttctgttacatgaggtactcctaccctatcgcgtactttgtttattgcttctaacggggttatgtttgcagtggctttccctcccattactacagcttcagcatacatcagcaaaacatccgaataacgaatcattctccagtttactccttgtgcacgtccattaaaaaaatgcccaccagcatcatctgtcggaggtaaggtccaatccaaccatttcctactacacattttatatcccattgccaactcatattgttcaccaaatgttccttcctttgaacccatttctgcttcccaatccttcccttcaagaaaagtaaccttcatacctttcggacgtataatctccgatacattatcattaaaaacaaacgaaccaaacatacgtggatcagtttctcctgtcactgtttttgacgctacaaatttatcatataaccaattgtgcataacctgtgcagaactattcgaatttctacttctattcattatacacattttacaccggacatcattgaacaacccactgtccacaaatcctgggttaaatcctgtattcaacactccgacaaattgtacttcaaaaatagattcatcattattttcatgtgccacatcaaagttccatgaatagtcatctaccaatctgtagtttccacaattaccattaatgatttctgcaaaagccgcagcagcctcattataataagttgtttgtgaagttccatatttgggttcaataccggatctataaagatatgacttacccaaaagtgcataagcagaagctttcgtcacacgtcctttatttttagcatcccaaaaattcttgtcaggaagtaaatctttagctttgatcagatcatctataataaaatcccaagcctcttcaggtgttgcctgaggcttatattcattaggagccttaggcaattctttaatcaaaggaatattcctataattgatgaataaaaagaaatgtgtaaatgcacgaagaaaataagcctcccccaaatatgcatcctgtaattctttattgctgaattctatttcagtaagactttcaatcatttggttagcttgggaagcagctgtatacattaactgaaaaggttgaaccaatgaataataagaaggggtaaactcttcattataagcacctggtactccataatcagctaccgaacacccctcatcactacgagtcaacatcaaaccaaatccacaagctcccaaattacgaggagtcgaaatatacccatagataccaagaattcccttattacaattttctagtgtagtataaaatgaattaacgtctgattgattaggattcaccgccaaatcattaaaaatatcttcacatgagcccatcattccaatagttacaaaactgataatgataactataattttacgcaacattattttcatacttattctgtttttagaaagttaaattgacaccaagattatatactctagaattcattgttgcttcatgaggactttcctgtgcttgccagaaaccatccacacctctgtcaaacaacacgtttgaactaacttcgggatcatacaagggatattttgtgatagtgaataaattttgtacccccgcatatattctaaatgattctatatggaatttttgcaataatttcttattaaaggaataaccgatttgtagattcttgcatctgaaataagaaccatcctccacatagaatgtacttggaagcgagtttatgccagaactgtttttactattcagtttaggagcttctgcattaggattttgcggagtccatgaattatagaaagcatcctttagggtagcactattagctcctccaaaataccaatcatatttcattaaagcaaaaatatcgttaccttgcgttccttggaaaaaagcagtcaaatcccaattcttataacctacatttatatttaaaccataagtaaaatccggatgaggattaccaatatccgttttatcattctcatcaatcttcccatccggttttcctgtcaatacaccattcacactaccattattatcctgaaaaataaaattaccatcattatcaaaaccttccaccacatatccccaaaaggtaccaataggcaagcccggtttagtaatagtaggacggtcattaaaagaaccactcatcatcacctctgccttaatgggttgtactccctcacccaaactctttactttatttcttaatgccgaaatattggcagtaacatccaaactccaatccttccaattattacgataacctaccgtaaattcaaaacctttattttcaacagatgcagaattaaagactggcaaatcccccccattagtcataatggtttgccctgacgatgctaatggaagtaatggagcaagtaagtcattattatctttccaaaaatattcagctgtaaaagaaattttattattcagaaaagccatttccaatgctacgtttttagatattgatttttcccaagtcaaattttcctgagcaaatttggttacataaccattcatcacactactttgaccaatctgattttcaccgaatacagaaggtattggaccataagccgtagaaaggaaagaatatgaatctataaaattagctcctaattcaccataactagctctaatcttcattttacttatccattctatattaaaaaaattctcttcatgtatattccaacccactgaaaccgaaggaaagtaaccgaccctatttcctttagcaaatttggaagatttatcactacgaatacttgcagaaacaagataacgctccttatagtcatagttcaagcgagcaaaaaaggagagtaaagctgaattgtattcttcacttgttatatctcctttcccattaaaaatagtaatattaggaccacccaaatctgtagaaccagaaccaatccccatagttctatagtattctctcatccaacttgtacctaccattgcgtcaatagtatgaccagcaaacatattcttataagtcaaaatgttatcaattgtataactaaatcgctgtccacgactttcagatagtgaattaatcgttctgctataatcaggatctgcattaccattctcatcccaattggagtcaaaagcaatggaccgagatatattatttgttgatatatagtcacctccaagtagtagcttataatccaatcctttatataaattcagtcctatattcaaactaccagtaacattaactgttttatttcttcgaacagtattggaataagatgcaaacggattagtaacttttccttcatttacataataatctttacctgcagatacataccttccctctacatcagtcattggaacagtaggaatccccatcaccatccttacttgaggctccttatttgtaaaagcagcagaaagagtttcactaacagtcaaacgtcctttcttaaacgttccattgacacgtgcattatatttcttaaaaccagaaaattccataataccttgctgatcaaaataccccaaacttgtattaaaagttgaatattcaccaccaccagaaattgaagcattcaaattatacataggagcatttcttagatatgcatcttgccagtcagtattaatatcaggattagtaggatgaatattttctggagcttgagtctggtttgttgaatttgcaacaatttgcttagtatattcgcgatgctcatttgcatctagaaaatcaagatatttagaaggagtctgcaaagaatagtttgcagaaatttcaacttttgctttacctttttgaccatgcttggtagttatcagcacaaccccatttgcagcgcgagagccataaatggcagccgccgaaccatccttcaggatttctattgattcaatatctgaaggattcaacgaatttagcccattattagaaaatgcaccatcaataacatataaaggttcagtagcaccaaatgtacctgctccccgaacaagtatcttgatatctgccccagcttctccccccttttgcaatatttctactcctggagccctcccctgcaaagcagctgcaacagaatgccccatctgtttactcagttcttttgcaggcactgtcgccacggatgctgtcaaactagattttttttgagttccataaccaaccaccaccacttcatctaattgttccaaatcctctttcagagttatattcacattcttttccccttccaaattaacagcaagagtcttataaccgataaaactaataataagagttgcattcgcaggagctttaagtaaaaacttaccatccatatcagtaatagtaccattagtagtccccttttccatcacattaactcctacgataggttctcccataacatccatcacaagccctgaaatatcttgtaattttttctcgttcaacatggactgttctacttccttcttccgaataatgatatttttatcttttatctcataagaaacattttgtccttccaagatttgctcaataacttcttgcagttgctcagcgtctatatcaacaatctttttcgtatctaaatccccagctatatacacaaatgaatatccacttttttcttttagctcagtcatagcttttttcaccgatactttattcattttcaatggtatattctgtgagaagatattcaaattaaggcaaagcaaagccccgaccaataatatggcctttctcttgtttttcataaattagtaatttattaattaaaaaattaaatgaacttagcttttaaagagaaaaatcattaactttgcattctctaaaagcgcactcacaatcgtaagtcgaaaaagagatttcatcaaggtgggaaaatccctatatcttcccaccttttctttttcatccctttcgtacccctattacagtattacagctctaattctattcatacttttaattttaaggttaaacaattttaatccactccctacttaatataaagttatattgtgtccttcaataatataatgaatcttacgggtcgcagataatgcttccaaaacttcctgaatattttgctcacgatgaacgaaatttccatagaacctgaaagtattcaaagtatcactagctatttgtattttcacattataactacgttctaactccttcacaacatctggcaacaattcctcatcaaaaaataaatatccattagtccattgtaatgcattggaaacagtagaatactccacatgcattctgccattctttttattcaagaccaccctttcattgggtaacaaaaaagcttctttttcttttttcaataaattattcaatgccacttttccttcggacaaagaaacaatggcttctgcatcatccggataatcccgaaaattaaatttcgtccccaatacctttaccagcaaactattcgttttcacaagaaatggaacttcttcatttcgtttaacttcaaaatacccttctcctatcaattctatttttctattccctactccgaatccttgtgaatatgttatacgcgatccggcattcaaccacactaatgtcccatccggcaaggtcaattttgttctggaaccaagaggagcctccacaatgatatccgaaaatacctcttttatacttattccacccctccaataagaaaaataagaaactgagaacaatacaacaataacagctgcataacgccaaaatttagacaaacagaaattttcacgttctcttttatcattcaacctctgattagcaattctatttttaaattgttcaaatgctttgctcttatcatatttaacatcctctttcacacttatggcagaaaaccaaatttcttgccgctgcataaaatacttttcattttccacagacgcagctatccactccttcagttcatgcacagcatttccatccaactcattacttaaataggatactattaattcatcaatatgttctttttctgctttcatctttgttgtttctaaagtgaagacgatttattttaaatacagggtagtcctaaaagaacttttttctgttttaacacgaaaaaaataaaatcaaagcaattaaatatttgctcaattcagtctgaaggaaagataatgcattctttatatgatacttaaccgtatttatagaaatacctaattcctgagaaatttcttcatattttttctcctcaaatctacttttttcaaaaacacatctacattcaaccggtagtttatctattgccatacggatttcatgctccaattcacgttctaataatattcccaaaggataattatccgactgcaaatacttttcttcagacatctcttccggtactaaaactgaaaatgaaatttcctttttttcagatctagatttcagatagtctatacaacgattacgaacagcctttatcagataacttctaatagaaatagtaatgtttaaagtttctctgatctcccaaaggtgaaatattacatctccaactatagtttccgataaaaaattatcgttcaaatattgatttgctacatgacataaaagaacataatgataatcatagatgtatttataagcatcttcgttgccatttttcagttgttctacaatcagtttctctgtgttttccattttatttcttttgaaaaaggaataaagttaacgggaacaaatttagaaattaattctgagtaactttataaaagagcaaaaaacaaatccgttaatcttattatcacacctcaaatggttacaataaagactaacggatttccctattctagttttaaaactatatccaacacctcagataaaacgaatctgaatcatcactccataaagattaaaatcgaaaagaaccttatcagcatccttctttagaaaacgctttttcccatcttgcctaatctccgaaactctgtttcccacagatttcaataccatagtcagtggttctgtaaataattgtgcattcatatccaaatgaggagttatgttatagccgttttctagcacattcaagcgatttttttctcgttcttttgttataagcaactacctctctaaatgtacccacccatatttcattttccatagcctttacctattcccacaatatttcaggattttgaaaagcattatatccctgcgatattccatgtatcattgccaactccccatctaccggagcttaccaagctttccacccatttatctaaagacgcaggagtcgatttcaacttatctcccccgatgtgatattgttcagtacatgtacctacccctgttcctatcaaatgtataactaatagcacacactctgtcacccttataaggtgccacataaacatcttgtgtgaacccgttatccctgatctcagcccctgtctgtttcaccaattctattcgaggcgatgattccggcatagaaacatgctcttcatatactcccggacggacaagtatagatattgttttcttgctcccaccaactgccgcattcactgcttcctgaactgtaaagaaatccccactcccatctttcgccaccacataatcataacgtcgcacatattttgccaaagccggcacttcttccatcaaagcgtccacaaccaacccggcaactatacgtccaccatatatattcaagtgagtattgtcaattttcccttccggataaaattcatattgtcctgctggaatccacataaacaattttcttgaattctcgactcccataccggtaaccaagtcatgggtcaatttattcaaatcaataaaaggtacattcatttctccggccacccgacggggagattccagatattccccatgggtatcaaccaataccggaccttctttttcataactaccctttatctccgtcacacctttaggaaggaaattacgacgaactatagaattgaacagtacaggatttcctcccttagcacgtgtttcattcacaaaacgtcttaaattatcatcaaaggtacttccgggctctgtatgtaatgtggctctaggtttctcatcattatgtccgaattgaataaatacataatcacctttatgaattttagaaagcactatgtcccaacgtccttcattgataaaactgagtgaacttcgtccattcatagcgtgattatccaccacaacctcttccgtaaaatatccgggaagcatttgtccccaaccacgctctatattaccattcttcagacttttattcgccatggtagaatcaccaatcataaaaatagtaatggggtcttttctctcagcaataaaagccgataacaggagtaaagcacataaaacaagtaatacttttaatttcatgtttttcatatacattttataagttaaaagatttaggcaaaagtaaataagaacaagaaaagaaaccataaaaaatgatacaagaatatagaaatttgttcaaaatcaatagttcaattactctttcagtaaataagaactaataaaaaaatgttcaaacaacatcaatttgccatttgaacattttttcaattcttcaagttcatatcgaaacattggaggttctcctaaatagacaaactcttccaaaaagacaaaaaaatgaatgtccaactgtcagaatgatgcaggcaaagaaagtaactgatacatcaatgtatgtgccatacgttcttgaccattggtattaggatgcaaacgatcatagcccgaatcatagaaataaataagttgttcttcaatcatcggattcatacctgtaaccgaattaaaatctattacaggaattccccacaaattacctgcttccttaatgccctgtacataagcatccacatattctccgcatttattctgatagctttcatccggttgtacattcttttcgccgaattccgctaaagaacgatgcaatggggtcaacaaaacaatttgtttatcgggaaacaattttttcaaatgactcaaaccaatattaatacggcctttatacgtatcattcgtcattataggaacacgccttttacgcgtttccagttttttagtttcaccacgggcagccatcacctgctcttctttctctgtaaaccaagtcccgacaggtacactgctattaaaatcatttgtccccatcaaaaccacgatggcatcaacctcttctccatgctcctttttcaattgttctgcctgacggggtacatcattccattgacgtccactcactccatacacataaggagtgatatccaaccattctttcaaaaaatcccaatacttttttatgttatctccataacaattgggatcagttatcgagtctcctatataaccaaccttttttccataccatggatgccggatataacctttattacatgattcttttccacaaagaaacgtttcctgtccgtgtaacagcaacggacatgctaataaaagagcaaatacaataaactgtctgtttttcataagtaactgttattttttcaatcagtaaagtgacatcaaagatataaaataagaaatagaaaaacagctatcacatacttttattttcatttgccctcttctatcattcataagacaaaaagtccgaaaggtcataataaacaaaactttacatttttaaattaatttgttaacaaggtgcgatatatttataaagcatgttataaaacggcgaaatacagactaaaaacttgctattataaacaaagtccgtatctttgcaatgtgtttttcatagtattagatttaaggttaacaaaagattggctgtctgggatagatagccttttttatgctttaaaacaggagaatttcttcataaaaattcaatatcccaacaataacattcttcaaatgccacccaaccaaacacaacaaaagtgaataagaaaaagcaatacgtatatctatccatcgaggcaatttatgaattacctagtcttaactaacgtttatcctatatattttttgatttatttcaataaaagaagacactctcatcactgagaatgtcccctatatttaaacgaaactttaaagagaattatatacttcaaatcttatcttctattccaccatactcgttgctcacggctatcatcaccattcaaatctgctttcacggcagcttcataattttcaagattaccttgataaatttcgctatcaaattgatggcgataagggatgtgatcaatcgttgtacaaaccggaccgacttctagtttcggaatatcaaaacgacgccagtcagaccatgcctcaaaaccatcagccatgaagccactgatccagcgctgaagagcaattttattaattttatcagcatcagtacccgtataagcaactgcttcctgtaccaaatattcatcaacaccttcggctccccattgttcaaatgatgccttcacaccggctgcataaagttgggcaggatcagcctgaatccagccacgttgagcagcttcagcctcgataagtagcatacgagaagcagtaataatagggaaagtagaggttacctgtgtaagcgaaggattataaaaacagcagactttattccacgtgttcacatctgcagactcaatacccaaaggcataccttggtatttatcaaaattcttcaggtcttcatctgtcacgcctgtctctgcctgtgtcttgccaaaaggaatcagcgaacaagtagagaacagacggttgtccttcaattccttcaactgatctacataatacttattaggaacaaaattataattatagtttacgccattataatataaatatcccacagtattggcctcaaaagtataattcaaattataggcattttcttcaataccgccatcagcgtaagcttgagcaaaacgcgagcgtccttcggcaggatccacatctgccagttttatagcaagcatcatacgggtagaagcattcagtttcttccatgcacgaatgtcaccatcgaacaggatgtcggctgtgctcaacgagccactttcattaaactgattatacgcttccctcaaatcggcatctaacttagcataaatagtttcctgtgaatcaaataccggagtaaaattttcctcacctgcctgaaatgcttctgtgtaaggaagtggccctagagcatctgtaaggtgcatatagatgaatcccatcaatgtacgtgcaaccgcaatctgattggcattatcaccaaactgcacaatggcaggtttacctttttcagtctcatcactattaaagtcaataatcttctggcagttcttcaacggataaagataataagaacttgtactcatagtaggtccgccaaacgcaccatactgattattatttttctcggacatataccccggatacatttgcgtccacgggtaataataatttgagttcatagagaagtatttcacataagtacaagcgtatgtaaacaacataccagtattagcctccgacggttcattgggatctttgttaatatcgccaaagtcagtcatatcacatgctgtgaatgttgctgcaaaactcagagataaaaataataatttaatatatttcataatgattcttcattttatggtttaaaaagcaagattaacggtaaaacctatcgaacgggttgcagcggcattaccaccctcaaaatatcccataccaatttcagacacatccacattaggacaagctgagtagatcaaccatggattggaagcattaattgccacactggcacgactcaggccgatatttagtttcttcaaagtctgtgacgggaaaacatacgacaatgacacttcacgaagtttcacgtaagtacggtcatacacccattcttcccatacacgggaagctgtggtataatatagtttagcattgacataggtatctaccttattgccattctgatccacaccagtcatgtggataccaccacctttgcttaccggttcacgaacattgacgccacggtcattaagctcagctgttttatcaagaataccgctattgctaccccacatattagtataggatacaatctgtccgcctacagagaaatcaatattagccgacagacggaaattcttaaaactgatactagtattaaaaccaccagtgaaatccggatggaagttacccagttcatctagtgtattctgattgtaagtaggtacatattcaccaccatacaacgccttctgcgaagcactcaattcatggaagattatattgccattgtcatcacgttcccatgtattaccggttatcacaccaagtgatttaccaaccatagcataattatacaaacgagttgtgaatgaagtccaataaatagaataagaatccactccatcagctagttccaccagtttattactattcttcgctatattgaaattcatttcccatttccagttcttagtggaaacaggcatcccgcccaaactcaattcaacaccccgattacgaattaaaccagcattcatcttacgagtggaataccccgattgcggagcagaggttacggagattatctgatctttgtcatcccgggtataatagttgaaatcaccccataaacgattattgaacaaacggaattccgtacctatttcatacgaagtggaaatagacggctcgatattataatttttctgagaagaaggttcatacattgtaacatgtgaaccataactggtatccagcgaataagtaggataaatattgtaagcattgagcgtagtacctacttgagccgcactagcacgcagtttccaaaagttcagccattctgcattcacccatttgtgagcaaggacagaagcggaaaggccaccataccaatagctgttatgattaggactcaatgtggaagacatatcgttacgaacagaagcgtcaagaaaataagtatcatcccagcccatggtagctgtggcataaacactacgttctttgtaatgtgttttctcattataggctaaagcaatagtacccgatgaagcagccaaattatagtaatcgtccaaagacaaatcataattcgtattggtgtatgcatataaattatcgtacgtataatcacgtgcttctgcaaaaagagctgcgtctaccgttagtttatctttaaaaaatgattgtccccaagttaaacgtccttgtacggtcaaatcaatcaaactgctttgatcctgacgataatttgaccggaaattaatagatcctgaagggcgttctcgttccaatttgtaaccacgtatgttaccatttacgcgtacccctgccttcaagttataaggaaggtccacagacacatcgccactgaatacattccattgataaatggtgcgatgattatattcatgaaataaagcatacggattatcatggaatgcagcactttgattattcacactgttgatattccatgtcctccatgatccgtccggacgtttatagtccttataatcttttaaattgacattggtctgtccccattgggtatattcctgcaaaacggtacgtgaaccgttatatccactttcggcagcattatgatcctgacgataagtatatttataatccaatgacacattcatccacggtgtgggtttgaaatttgtcttgaaccctaagaaacggcgaatagcatccgaattgggctgcacaccagtacgatagctattggtgaaagaaacacgggtattaaaatctttcacactctttgaaaacgaaacgttggttgtattggttacaccagtccgataaagatctctcaaatccaatccatgttgccaagtggctggttttccataatgaccactggtttcgtctaatgacaacggagtgacatatttcacagccggatcgtatgcagctccccaagaagtgtcctcattataatcgtacacataagcaccttgcaaaccgggaatatcaccactatacaaatcataaatatcctgagccctgttacctttttccgtacctccatatcctccaccaccatacagcttctgcatattgaaatgattatagtaagtttcggcctgcaatgtatgacttacttcaagcaaccctttctcactttgtcccgccttagtagttatgatgatagcacctgcaccaccacgcgaaccataaagggcagtagccgcgggacctttcaatacgtttatgctttccacatcatccatattgatagagtttttgttagtgatagcaccatctaccacataaataggttcattggccggattatccgactgggacgaagaaggaatggaacctgcaccacgcaaaataatagtacctgcatcaaaaccagaactggcaccacctataaaacgtgctcccgacactttaccggccatagcattacccaaatcggtctgtcgtgaaatagttagatcctcacctgccaccttttgtgtagaataacccaacgctttttgtttacggttcaatccttgagcagttacaaccacttcatccaacacttttgtgtccgacttcattgttacagtaatagtaccacgctgaattccaactcgctgagtaatcatacccagataagaaacaatcagcgctttggcatctgtaggaatattattgatagcaaacttgccatccacatccgtaattgctcccatagtagtcccttccactaaaacagacgcacctattatcggctcaccatcatccgcagaagttacaactcctgcaactgttttaggcgcttgagccatagagaagccgatacccaaccacagacaagctagtaacattaacactttttctttcatactcactctcttttaattaaacattatccaagttcttttggaacttagttctataaaagaggaaagtacaagaattcatttcttataaaaaacgcctaaatattagtcgttccaaacgata

SEQ ID NO: 3893 - DNA, 100415 bp, Unknown
  gut microbiota DNA sequence
agatgataaacatcccatacataccggcagttttacctgataattaaacagaacggggggctgcccaacattgaacagccccccgtttcccgacaaacagcattcagcgtttctcgtaatacttcacccagtccacccacattttcacaggtaactctttcggatccacagcaccaacccatgagccacccaactgcatatctatcaataaatagtaaggttgatagaaagggaactgcccttccttgtccgtatcaatgcgcggataagtataggtatgacgatgattgacagcaaacaccagactatccggataaatatctaccgaatagatattgtattcctcaggatttatcttattgatgcctccgtgaggcggattatcctttatacctaatatatgcgtataatatgaatgagtagtctgataagcaatatgatcatggttcaaccgttccataatatcaatctctcctcctttgggccactccgctttttcgggaagcatccatatagccggccatgcccccttagcggcttgcaacctggcacatacttctactcttccgcccgtaaacagtttctttcctttggtatatacaccaccggtcagataaggagccgtatcattcttctgagtatgattggctattccacgaagtatcagattcccatcctgcatagcataacatgaatcataataagacatatagttgttccaatcggatgttccgcgaggtatcttagtccataccgattcgtcaaaactgtttttttgatcaaagtcctctacccataccagcttccattctttacttttaaccgatgtcttacaagcactcatcaaacaaaccagccccatgcaggcccaaacaaataaaaggctttttctcatagtatttatttctatctgattaaaaaacaacgccgtatcaaacgaaatataatctcattcaatacggctaattatctattaataatgtatttatttcgccaggctataaaccacatccattatcttctggcctatttcatctgccgcctccatggttgcagcctcagaatacacacggataataggttcggtattactcttacgcaaatgtacccacttgtccgggaaatctattttcacaccgtctatgtcgtttatctcttcatccttatacagttccttcaccttggccagaatagcgtccacatccgtttccggagtcagatcaatgcgattcttggcaatgaaataaggaggataagtagcacgcagttcactgactttcttcccttcatgcgccaaatggctcaggaataaagcaattcccaccaatgcatcacgtccgtaatgactttcaggatagattactccaccatttccttcacctccaatcacagcatgagtcgctttcatcttggtaaccacattcacttcccctacagccgaagcattgtattcacagccatatttacgggtcacatcgcgcaaagcacgggtagaactcaagttagaaacggtatttccgggagtatgtttcaatacatagtctgccacggtcaccaatgtatattcttcgccatacatttttccatcctcacagatcatagccagacggtcaacatccgggtctacaacgaaagccacgtcacaaccgcctttggccatcaatcccataatgtcccccaggttcttttccaaaggttccgggttatgctgaaaatcaccggtcgcttcacaataaagcttttctacatgcttcactcccaacctttccaacaattcaggaagaataataccgccaactgaattaacgcaatctatagctacacggaaattggccttacggatagcatccacatctaccaatttcaaagccaaaacactatctatatgtttctgattgtaggtattgtcttcgcgataacttccgatgtggtctatatcggcaaactcaaacgcttccgcttctgctatacgcagcacttcatttccttcttccttattcaggaattctccatgctcattcagcaacttcaaagcgttccattgtctgggattgtggctggcagtcaaaataatgccaccgcacgctccttccatggttacagccagttctgtagtcggtgtagatgccagtccgatattcaccacatcaaaccccattcccattaaagtaccgcataccacgttcttcaccatttcaccggagatacgtgcgtcacgtcctactacaattttattactctttactgtggttgttttacgtatcagcgttgcataagctgatgtaaatttcactatatccagcgggttcaaaccttcccccacgtgcccaccaatggttccacgaattccggatattgatttaattaatgtcatcgtgctaattgataagttatttcatagtaacaaggatagacagaagcagaagcgtcagactgtccttcactgtgaggtacaatcagtctgatcttagaacgaccggaaatctccctgccgacctttatgtaattgaatggaatcaaccatcctgaaggtacataaggtgtaccccaaactgtatacattataccggaggtgaatgtagctgaaaaagattttccgctttttgtcagcatcatagcatccggataaaccatttgagaattcccatagtctgtattccaagacaaagaatctattccatccgaagtaatctgttcctccacataccggaccagaatctcataacgaccgtctttcaaacgctctccgtttccctcttccacaatctgcatataaacacctgtttccgagaaaaggacaaactggttttcatccacattggtcgtagaatcctgttcctggaactgttcaaagctgatcacattgatatcttcccgttcaataaatcgtttgatagcttctctctcttcttctttcatttcagcataggtctttccattattgcaagactggaagaccagccctaaaagaaacacagatgcgaacaatatacctaatttcttcattctaagttctgttattttcggacaaaattaataaataagcccctaacttttatattgtttgtatgcaattatactaaaataactatttttttgccagaagcagttcctcgtacttcaccaaagcctgtttaaacagatcgatggcttcatccattgttccataaaattcaccaccggatgcattcagatgaccacctccattaaaaaattcggcagccactttattacaagggaaagcacctacagaacgcagagatacctttatcatattcttttccgtatcctcacgcaagaatacggagaaaataatattctttatggaaagtggaatattcacaaacccttccgtatctccttttacatactggaatttactttgctcctcttttgtcagccaaaccaatgccgaattgaactgaggaaatacttgcatcttgtcgtacagcacatatcccatcaggcgtaaacgcccttcagaatacgtattataaactttacgataaatctcatccttatcaatgcctttcgaaagcagttcgctgataatgaaataaatctcacggtcattagaattataagtaaagccacctgtatcggtcatcatccccgtataaatacattcagcaccttccttggtgatatcctcaaaataccccagacggcatatcaaccggaaaaccaattccgatgtagaagatatttcaggatgagaaataatgattctacaaaaggcttccggattaaggtgatggtcaatcatcattttgcgtgccggcgactgagccacagcatccgccatcgcatcaatacgagacaatgcattgaaatccagacagcagatcacatccgcctcattcagcagcttattggcaaattcagtatatttatcgtaccggattatatccttggctcccggcatccatctcagaaaatccggaaaagcattgggaacaatgacattcaccgtcttttcctgtgattccaagaaatgccataatcctaacgaggagccaatggcatcaccatccggtgacacatgggtaacaataactattttatcagctctttcaaaccatttttcggcatggtctatattagcctgtgcaattacttttgataacatattcaatctttttcttttgaaatggcaaatttacaaattaattctttattcacagaagaatacggtaagaacctttcggagacatatcaatataatccaatcccaaacctctacactcgtcctttaacaaattcaatctatacccaccgagcgaagcatccagtatgaccgtccttattttaaatattttttgtaatggggcaatttttcctttaaaacctttacacaagtacatataatcaatatccaacaaactatcaaccgatctgctccgccagcggttatccaccaaaacacatatattcatacctttataatgataaatgctatcctgttgccaaacatctttttgaggggaaacttttacttgcgaatgggccaggattaactgaaaagactcctctttcatataatatagacaacctgaaaatcctataaaaagattaattccacacaaaacagtaatcaacgatttccgtgaaggagataacagataagataataccacaaacaataatacataaagaataccaacctgaagcaaagacaaatgtatatcgccggaatgtgatacaggcaaatcccccacccattgcatactgtcattcagcaaccgcaacaccccgttcaatccttttaccacccatatatgcaataccgtaaaaggagacaagataaaacttgctaccgatccataaattataacaagcactaaaggtgccactatcagattggccggtaaaaaataaacaggaaaataagcgaatttataaataaccacgggagctgtccctaactgtgccgccagcgaaactgccactatcccccaaatataacgaggtacagggtgacgcacccgccaataccgggaaatgacaggataaataaacaaaattgaaagtacagccagaaatgacaactggaacccggtatcaaaaagataaaaaggattgtaaagcagcataaagaatgccgctacagacaaggtattcaatgacaaagtccgttctcctgccgcacgcgccgctgtcattaacatacacatcaccaccgcccgtataaccgagggaggcaagcccactaaaaaagcaaatgtccataacaacaacacaataatgccacactttacccatcgcagcaggcaacttctatccagcggacgcaatatccaacacaataatccccacaaaacagctatatgcattcctgacaaagccaagatatggctcactcccgccacttgataagtttcacgtaaatcctcactcagttcctctttatatccaacagtcaaagccgacaatacggcaaattcatctcccgagaatccccacttccgataactgtccagtattttctctctccatacacctgcccgctgtttccatgtcaatgccgatttcttgcctgtccattgccaataccccggaaagattacggccgttccgctaatttgctgcctgaaaagataagccgcataatcaaattctcccggaatcacctctctttcaggagtcgagatacgtgtataaaagttcaaatggtctccacatcgtaaatttacagaaagactatctttcataatatagactagtatcatacgattaacaggaaccatccccctttcagacatttctttatctatccgcaatttacagagatatgtttttgccttttcttgcggaacatccactatcaccccttgatacatattcttccctgatgaccattcatagtccacccgttgccatttttgctgtagcaacaatgcccctacacaaaatagaaacataaaaaccatgcctccaaataaccatcgggaaaggtagccttgccatttcatcaatacaatcaagccaatcaagcaccccaatattcccgtaccagaaacaagcacaggcaaggcgccttgaaaaaaatgatcggatacaaaaattccggcgactagaggtatagtcaaccggaacatggaacaaggctttacagccgctatatttcgcactttggttttaagctcaaagagatttcagccgatgtatcatgtctgacatatcaggagctttgaacacagcatttcctgccaccagcacgtccgctccagcctctacaagctgtctgccggtttccaggttcactcccccgtcaacctctatcaatgcctgcgaacctgtattcgttatcaattcacgtaattccctcaccttatccagggtatgtacaataaatttctgaccaccaaaaccgggattcacactcatcagcaacaccatatccacgtcacggataatatcggccaacatagctacaggagtagaaggattcaatgtgacagccgctttcattccggcatcctttatctgttgcaccactctatgcaagtgtacacaggcttcataatgcacattcatcatcattgttcccaaatctttcacttctttaatgaatttctcgggattaacaatcatcaaatgtacatccaaaggtttttcagacaactcggctacatatttcaatacaggaaaaccaaaagaaatattcggtacaaacacaccatccattatatcaatatgcagccagtcggcatcactacgatttatttgttctatatctgcctgtagattagcaaaattggcagacaacaaagaaggggatatcagaggtctattcatggttcactgttcttattctttttatacagaacaaagataaccatattttatataagaacagtgaaaaagttcattttatttcggcaaagtaaaccgcacacccaactgtatattaaaattaaaaggatgttccttgcgaatcgtatttacattactgccgtcatcaaagtaataaacaactcccggctccgcataaatacccaatttctccgtaatcttaaactgcgcacctgccgctgcggacaaagaccattgcaaaggtttcactttgacattttcctcccctcccgaaaactgttcatcttttcctgcatttgatgtagaaacactgccgataatgctccgctttccagacacacatttttctaccgctccacctgccgaggcatacacttcaaaccgcttgttactccatatattccggttcactttcagaggaatacccacataatgcagtttctcttcccaaccataattgtttttttcggttcccgaacgtgtttcggatgaaagctgggtataagtcaccccggtttctacagcccaatcatcacttaaatcaaaacgaagggaagctccaaaagtaacaggcatacgatattttatatcagactgcgcatcctttccttccgacaagttattgaactgaaccagcttatcaatttcagcccttgtttccactccataagcgctattcattgttgcattccttgtgccattaggcaaaggcaaatatccatccatactagtcgaggatgaaaaggttccattaccggtagaaagtcctaccgaccagtttctgtccttctttctatgaggagccacgtaagcgtaattcgttttggcagccgaataggaagatctgccagcctgtttctgctgtttttgttccactataacagattcctctttctgctcttcaatataattttcctctatttgtatctcttccacctctttatttagcaaaacctcctgttcggcagccaatgcctctgccttagcaaccccaccaacttttacatgttgttttttcccagagcgggcagcaggaactaccaaggccataggttgctcaggagtgattgatcccggcaccaactcatcgggttcgtgcattacattcaactctgccgactgtttctccaaatagtttgcagaaggtgactgccaaaaccatacggtcaatgaagacacaaccactaacaaggcaacagctgctacagcctgccagcggcgccacatcggaattactttcggaaccgtatccagttccttttccaactgttcccaaagatcagcaggagccggttccgaatagccctccatccgggtgcggaaattttttatccatttatctttttctttcattcctatatcctctttctataatcatttatttttttcatcaataaggttttggctctgtataattgagatgatgaagtatgttctgtaattcctagcatttcagcaatctccttatgtcccttttcttctaatacatataaattaaagaccgttctatatccatccggaagctctttaatgaattgcattaaaacagattggggtatttgctcaaaatcatcctcatctccatctatcacatcgggcaactcttcgactatcacttcctgatttgtagaagctttcttacgaagatagcccagtgcttcatttaccataatacgtgtcagccatgctttcaatgacccctctcctttataagtaaactgactgaatgaacgaaatatattcaaaaatccatcatgtaagacatcctgtgccacttccctatcacctgtataacgaacacaaacggccatcaattgcccggcataacgctcatacaattgcttgcgtgcaaggttatcacccttgccgcaacgttccaccaattctgtttcattcattgtttgtgacacttctttattggataaatgataagactgcaaaaatactgcatccggaagaataaaatttttgcttaagcagatttaacatttttacaagcagtaaacttactatcttcgcatttaagccatagaaacaattctagaaacagagaatatgagaaaatataaagcgacagttattgttataattatggtaatgctgattccatttatacaatcttgcctggatgactatgatgatgacatctacgacatgcaggcaggaatgccttttaacgctgctttagcaaccgtagtgacccccagcgaaatacccggtgaagcaatgatagaaagcgataatgatggagtagcatacgtagtgaatcccgataaattaacacgttttgaaacaaataatccggggcaacgtattttttatacctatataaatgcagacaatccgaccggagatgcaagtaagaaaggaccttttatttctatagattacttgcagaagattttaaccaaacgaatggatacattaaaagaaaatgaggaagatatttacggacatgatggaatcaacctcatcactcccattatgggtaagacacacctgacccttatgttccaaatattaggtttcaactctaatatcaaacatcggatcagccttgtagccacagaaggaactattcctgacgcaaacggatatatggccgtagaattacgccacaatgccgaaggtgacagacaggaatatccgagttccggttatgtatccttccctttattggatgttcccggatataaagagggtaagctacaaggatttaaaataaaaatgaataccattaacaatggcgaagaaaccgttacagtaagttataataaaagtaaatctacaaactttccgttcatacagaaaggtatatccaacacaaaaattaaatgattcttaacaactccttgtctgtcttattgtaacgaaaaggctgtatccgaaaatctttcgatacagcctttatcatttattccaccttattattatccgaagttctgtagcctctcaaaaaatcagccacattcatacgtttctttcctgccagctgcaaagtaagcacattaataaaaccatcttttacagccacctgaaaataggtcttcatatccgtacggatatcgcctatattcatctcatgtgaagcaaaaactttctccgtttcatatatttttaaaacctgacgtgttccatcagccacacacagttcggtccatgcagccggataaggagacagcccgcgaataaagtcataaatctgcttcacacctttattccagtctatacggcaagtctctttaaatattttcggtgccggacgcaactccgtttcctgccggatcaaactttcctgaggaacaggtttcacacttccattcaaaatagcatccacggtttccaaaaccaaatctccccccaaatacatcagcttatcatgtactatttccacattatccgtatcagcaataggaacgcgcacctgttggataatctcaccggtatctatctcatgtttcaagaaaaaagtcgtaataccagtttccgtatctccgtttatcaccgcccaatttataggagcagctcctctatattgaggtaataaagatgcatgcaagttaaatgtgcccaaacgcggcatattccatactatttcgggaagcatacggaaagcaactacaatttgtaaatcggcttgtaaagaccggagttcctctataaaagcctcatccttcaatttctccggctgaagtatcctcagaccttgagaaacagcatattctttcaccggactaggttgcagcacactgccatgtcgtcccatcggtttgtcgggcatagttatcacacctactacattatagcctccttcaaccaatcttttcaggctctccaccgcaaaatcgggagtacccatatatacgatccgcaaatctttcttttccatatacttacattatttaatcttcagagaaatcaaccaacacctgccggtacgaattaaatattttggacttggaaacaaaccctttgtattttccctcttcattaatcacaggcaggttccaggcctttgtatcatcaaacttcttcatcacttcttccattgaatcagtaacattgatccgtgccggaggagaaatcataaatttttccaccttgaaacgatggtataattcctgacggaacataatattacggatatcatccaataccacaatgcccaaaagttctccattgacatccactaccggaaacaaattgcgtttagcctgcgaaatgactttaaccatttcacctaaatccatatcaggacgcactttctcaaaatcagtttcaaccacactgtcaatattcatcagagtcaatacggccttgtctttatgatgcgttatcaattcacctttcttagccaaacgcatagaataaatactatgcggctcgaatatcataatggtaagataagagctgacagataccatcatcagcggaaggaacaaatcatacccgccagtcagttctgcaatcagaaaaataccagtcagcggagcatgcattactcccgacatcaatcccgccattcccaacaaggcaaaatttttctccgggatataaggacctacatgcagttcattacagaaatgagcgaagataaacccggtgatacaccccaagaacaaactgggagcaaaaattcccccgcaaccaccaccgccattcgttgcactggaagcaaagactttgaaaagtacaatcatggccaaataaacgagtaacaaattatcgaacccataaaagatagagttattcattactgtattccagtcatgattggttacgccattcagcaataaattaatagtatcatatccttcaccatacaatggaggaaacaagaaaatcaatatgctcagcattgcaccgcctatagccagcttgatatacggattactatatcgacgaaatatattctccacagaattcatagcccgcgtaaaatacaaagaaaccaatccgcacgcaatgcctaacagaattgccgaaggaatgcgctccatcagaaacggttcatccatatggaacttgaacatggcatcgggaccggtaagaatataagaaacagtagctgccgtgacacaggaaacaagaagaggcaacaatgatgccatcgtcagatcaatcatcaagacttccaaagtaaaaaccaagcctgcaataggagccttaaaaataccggccacagcacctgccgcaccacaccccaccaacagcatcagggtcttatgctccatcttgaatacacttcccaaattagaaccgatagccgatccggtcagcacaatcggagcctctgcacctacggaaccaccaaaaccgatagtaatggcactggctatcacagacgaccatgtattatgccgcttgatgcggctttggcgacgggatatggcatataatattttcgtcaccccatgactgatgtcatctttcacaatataacgaatgaacaatccggtaagaaaaataccaaaaaccggatacaccaaatacaaccagttgactcctgtagaatcaaaattttcagtcagaaattccttgatccattctactagaaacttcagaaaccatgcggccaatgccgtaaaaataccagcaagaaaacttaatataagaataaagtgtttctcttttatcttcttttcgcgccataagataaagcgctgtaaccaacttttcttattttcgtctataattgcgtccattcctttttttactctctaataatcttcacttctccccctttacccagtttgataatgctggatggtttgggatgccccacttcatcttgtctatactccacaatatagtctacagcttgttttacttcttcactgatttcactgaagttggcaggtgaaggctgaccgctgatattggcagaagtcgacacaatagctttacgaaaccggaaacaaagttgtttggagaattcctcagccgtaacacgaatacctacactgccgtcctcagccagcaaattctcagccagattacgtgccccatcataaataatagtcaatggttttgtggtaaactcaatcaaatcccaagctaccgcaggtacatcactaacataaaaatttacttttaccgtactgtccaccaatacaagcatcgccttactgtcagcacgcttctttatatcataaactcgtttcaccgcctccggattagttgcatcacaacctattccccaaatagtatcagtaggataaagaatcactcctcccttctgcatcacttcacaggctctcttcaaatcctctctaaaatctccgttcatatcgttttttattatttggttctcattttaacaagttgcaaatgtagcaaatcctcttgataatgacgagttaaacccgaaaaaaagataccttgattgttttccgaaacagtcaaggcatcttgtccacacaataaggatactaattctccctttatcttctattttaaaacaaagtattcgtatcctccaccagcctgcccatagcccaagccgcccggatattcagttctctatccaaaatcaacacatcggcatccatatctttctgcaatgcccccttccggtcatccactcccataatccgtgccggagtttcagaagccatccgcacggcatcggccagcggaataccagcttttaccattgtccgtaccaatacatccatggttgctatgctacctgccaatgaagaatgatcagccattttgcatacaccatcttctataatcacattaggatctgttatttccattccatcagcggcggcatatgccaaagcatccgtaaccaaacaagttttttccactcccttcaacttataagccaaccgaagaatagtagcaggtaaatggataccgtcggcaatcaattcaatggtcattccgtctgtcagataaacactttccactgtcccttcgtatttatattcacgacatttatggaatcccggcataccgttatagaaatgggcagtatgagtaaacccagcttcaaacgcagcttttatcccctcgtattccgattctgtatgtgacacagccactaatataccttttgatttcaaatagcgggcaaattccaacgcgcccggaagttcaggtgaagcgtcccaacgcttgatgcagtcagtactttccaataaagaagtatattcctctttatcaggattcttcaatttcccggcaaactgctcacctgctcttttcggattcagataagggccttctacatgcaaccccaacacaggactgtccttctcgttcatcaaggtttcgcacacagttaccgccttacggatttctgaaaaaggagaagaagacaaagttgggaaaatactggtcgccccatgcttctgatgcgcttttatagctgcgcggaacgcctcttccgtacattcattaaaatcgtgaccaccaccgccatgagcatgcatacacacatatccgggtacaatatacatccctttagcatcaatcaattttgcaccgatcagtgccaggtcacagttagtcacttccaatattttattatcccgtatcagtacagagccttcgtccagccaaccttgcggagtaaaaatcttgccgttaataatttgagtcaacatgattagcgagtattagataatatttattcaacgtttttttgtaacaacaaaagtaaacacttctattgaaaaagaaaagtaaaacctttattatcttttttgtttcttcaatgagaatataggcaaaaacaaaaatattccaagtatagacataactaacccgcctatagtacctgctgccaaagggaaccagaaagcctcttttccatctcccaccataaaaggaataaatcccagaatagtagaaacgaccgtcagaaagataggcagaattttcgaattccatgccttggtgaaggcacgtaccggtaataacagaggatacctttttcttatcgcattatattcatttagaatataaatactggcatttactgtaataccgcaaagtaatacaaaagaagcaaatcccccctgatcaaaattcagtccgaaaagataaaacgtaaggaatacgccgatataggatatcggaataacaaaaatgatagccaaaggctgtttcaaggaattaaacaaaatagccgtcgtaaagaaaataatggcgattacaatcaacagcaatgcgtattgcttgttatctttcttattccatgaccagtaatcctgctcattttcggctgtatatcccataggcaatatcttattaaattcttccaagtctttcttcaacagtttttttccttgttcggaagaaccgatatattcatattgcagacaaagccggtattgctggttttctttagcgactttctgaggtgactgtcccttccggacagtagcgaaatcagccagtttataagaacggccatcaataaaaaagggtatattgaccaatccccatacatcatatcgttgtccctgaaccgatgaaagtttcaattgctccgtctgactgtcaaacaacacgttaccacaataaatatcccttccgaaaacagggcgcaaagcggcgaacagctgcgtggctgtaatatgctctttcgccatcctcaacctgtccaaatccagatagaactcgctataatcatctttccaccaagagaactccgaatttaccgtaacctctttaatacgacggtgtaataacaacttctctttcagctgttctgtccaataagaaagttcgtcataattatatccatacagtttcacacggaaacttcccgcactctcacgcacatcgttactgaagccctgatcctgcaaaccatatacactccagctaccacctcccaaagtcagtgccttactgattatattagctttcaaagtatacgggaatccgctccgctgattttcttttgtaaaataaatctggatattagcctgacgcgcattatagatatacgtctgaaactgcctgatttccttgaaatcgctcagataagtttccatcctcttaatcagcacattcatctgctccaatgtactgccattaggcaacgtagcataaacggaaagcaccacttcaccttcatcacgattgaaataacttccctcgtatactttttccgcaaaaagacggaggctgccacctaaagccttgttgattaccggctttaccttatccttgaaggtaggattatcaaataccttattataatattccacccatttaccttctccttccatcttctcgggcagcataaatacaggcagaccgaaccccagcagcaataataggcaagctatcaccctgaaacggcataaataataaatcaccccttgatagaaacgggtaaaatagacagtcaaccgtttcataaaagtgggtctgagcagaaaacgtcttctttttcttctctttttcttttccaaacctattttatcaatcatggacggaacaaagaataatgcaacaaacaaagatactgccagattgataatgaccaccgctgcaaaatcctgcaagttcagacgtatcttctcatccagaaagaaaataataaccaatgccccgatagtagtcagcgtggccgccagtacagaaacaaacgccttcagattgcggcgatgcagaatatggtctgtcatcactatcgtattatctatcaccaaattcaatgagatggtaatacccgccaatgaataaagctgcatttccagaccaaatgcataataaagaatgacggcaacagatatattaaccgccagactggtcacaatcaggaacagataacgcagatttcgtgttatcaacgctacaaacagcaataaaatcaatacggtcagtccggtacggaaataaatcttatccaattctttctgaatatattccgtagcgtcataactgatatgtacctcatagcccggaggcatcttctgttgcaactcacccataaggtgcttcacttccccacttaaatttaattgattggcagtttcctcggctgtgatatacaggtagacagaattcagcccgtttatccggtaataactttgcggtcgttcttccacatgccttacctttatcagtttatccagcgtaaccatcgttccatcttcggcttgcagttgaatggctcccggttcaaattccatttctttttcagtagatgtacgtaccagtctgatccactctctgccctccgcacctttttcaatagaacagatccccagaaactctttttcataatggcggttaatggcccgttgcacagcctgcagtgtgattcccaaacgcgaaagctggtcactgtcatactccaactgccactccataggtgtagctccattcagttccactttataaatccccttcaactgtcccaataccggcttgatattctcttccgcatactgctgaatcaaaataggattggcaggcgcattcagtgtataagtaataaaaggtctggatgccttatcatccgaacgtcgcgtactgatttgaggataactcaccccctcgggcagctgaggccaggtctgtctgatgatggtagacacttcaaagcgggtaacgtcaatatccgcatgcttgtccagttccaaagaaattgagccgctgccgttatccgaagtagagttcaccttcctgattccctttactctggccatcatcgcctccagtttactggtaacctccgcctcaataacccgtgacgaattgccgggcatactgaaagaaacagtcagaccgggcaaggaacgcgacggcgccagcttaaccggcaacagcggtactaataccacccctatcagtgacaggcagacaaatgtcactatcaaggtaaacgaggagaggttacgcggattactcatcgataaattcctgtattaaaatcaaacttgtccgcaagggaaaaaccggactcaaaatcgtgcagcgtcagtttacgtatcttataataattcaaccaataattctgcaaagccgaaatataatttttctgcgcctcctgctggcggttcaacgaaagagtaagactattcacatccgcctttccgatgataaaacgttggcgtgtctgctcgtatgccattacggcaagatccaaagcctcctccgcactcgcaatcaaactctgctgaatattaaaatcattcaccgtcataatcacctcttcctccacactcagttcttcctgacgggcggcaatcctcaccacattcagattatttctcgccatattatatttaccctttctcaccccccagtcaatcaaaggaatagaaacactgacagaaaccaagtcctgttgcaaaggatgcctgtaagcatctcccagtttatccgccacctggttaaagcccacactggcattaaagctggcattgaaacgggattctttctttgtcttgtccacattctgttccgcttccagcacattctgccgttgttccaggaaagtaggattattctctttggcccgcatcaacgcatcatctacgggaatcatctttcctgtgggacgtcccggtatatccaattcaatcacagtattcttatccaggttcagaaaggaagccaatgaaaacatagcgcgtttcaaagcaatctgcgcattctgcaacgtattatgcgcattcactttgtccagctgcaatgtcagcaaatcggcacgtgatatggctgctatcttatgacgctggagtccgatgctataaagggtatcactggacgccacattctcctccgccaagcggtaatccgcctgtgccatagccaacgcaaagaaataagtcaccgcttcttctgaaaccatttccgtgttataaatgaattgcttcttcaccttttcatacttcaacggctctattttccggtcccaacgaaaagcattatatcccaacaggctctgttgatatcccacacgcacagggatactggaatactgtgtagactttgagtcaccgaaattacgcataaagtccagttccgaatcaatatagaaagtaccgcccgtccagtccagattctgtttgatactcaatccacccgatgcgctgaacatctgttgttcacgatacacatccatatcctcattcgaatcataacgctgggtgatatagcgataatatttagccggagtcagatccagcgtaagactcggcaaacggttcgccttgtaagtacgatattcccaatatcccgacaaataaagattctgatatctgaaagcggacaaggaactatcattcgcaatctctatcgtgcgttgcaaatccagcttcaccacctgctgcgcctttgctccgagagacaacagcatacaccccaccatccatatgctaatgtacttcatttttgtcatgttttctataaataaaccaatatattaaaggaatgataaacaagctgaccaaagttcccaccaccatagagccaatcatggcaatagacaaaggcttctgcatctccgaccccatatccgaggtaaacagcaacggaaccattgcaaagacagttgtcagcgaagtcatgataatcgctctcaacctgcgcctgcccgctgtatgaatggcttccaccaaaggcatccccgctttccgtaattcattgatggcatccatttttaaaatagagtcattcaccacaataccacaagtcacgataatgcctatggcagacatcaaattcaacgtgtgaccgaaaacccataatgccagcaaagcaaaagccgtatcaataggaatttccatcaagacaatcagcggttgcaggaaactctcgaattgcgcgcaaaggataaaatacatcagcaacaaagaaacaaaaagaatcactgtcaattcccccatcattttttcattcgaaaagaaactacccgagaaatccacttcccattccttttcctcactaaccacctcttttacattccgcatcagttccggtgcatccttcacatcataaaaacttaaaggaatatattctccgttctttcccgccgtaatactcttcaaatcttcggcgggcactaccgtcaccagattattcaaaggaatatgattcacctctccgttaccatccgccatcgtccgcaccaaagtttcacttaatacactatttacactcttttcctctccggcaatactgataggcagatattgctgataagagcgtaaaacggaaaccttgttttctttgaaagccgtgcggagcacccgcgtcaattcatcatatgatacgttatacaacaacagtttttctttattgattatcagattcatctgattccggaaagcgatgcccgtcggaacattacccgccacccgcgtaatttccttttccaaccgctgcaaatgctccgcatccggtgcctgcgacttattcgccgtatggagttccgctaccacatccgcttctcctgtcacaaacaatttttcaaagattgtttcgggaggtgagaaagtaaccacagccaacggatatttctctcttatctccttctctaataattcctgcaatgaatagattccggatggcttttccgtcttgaaataaagttccgcttcggtagacgaaagttcactgcccccgttcaatatataatcctgcatacccacataagcagcatgctccgttacccggtcgtccacctgtttcattaaatcatccacccggcggttgttctcgtccacatggatattctcattccactctatccttgccaccagttcattctggtcaatctgcggcatacgctctttttccattacataaaaaagaaacacacacagtggaagggttgccagcgtgccggtcacacaaagctttttatgtgagaacacccagtcaatccctttatcataaaagctttccagccactcatttttcagcagattgtcaaaacgtctggaaagaaatcccttactgcggataccgaccttataaaacaacagatacaatacgggcagcaacataatacccgtaatataagatatcatcaatcccaccgtgatagaaaaagcctgatccataaaaatagctccggctatgccactcataaatatcaaaggcacaaataccgcaatggttgtaagggacgaactgagcatcggtgtgatcatttccgtcgtgcccacggcacacgaacgtttcagagaatacccccgttcacgatactgcgaaatattttccgttacaataatggcgctgtctatcatcatacctactgccagaatcaagcccgaaagtgatatcacattcagcgacacatgacagaaataaaagaaaaagaatgtgattacaatagaagtaaccatgctgatgccgataatcaacggtgaacggacatcccccaaaaacagcacggctacaataaagataaacaagaaacccaaagataggttctgctgcaaattcgaaatggtatagtccagcaattccgtctgattacggcttacgctgaattcaatatccggatatagagaagcaaaataatcggttgtttctttcagcttctctttcatgacatccatattttcatcgctctgcttgataatggccagcgtcaccgccctttttcctccggctacggaacgtcccatctctttttgcgaaacaatatctactttgcagagctctttcaactgcataatacgttcccccttgcggatatagatattcttcacatcctccggggtacgaagcagggtagctatgcgaatattatattcataataaccatccctcaccagcatacttcccggctctacattattggcggaaagtgtattctctatatcctccacactgatacctgtcatggccagtttatctttatcaggaacaatttgcaaaagccttccgggcactccggttatatccgccatagccacttcgggtaactgttcgatgcggcgtttcaccacattctccgccaattcgcacaactccagaaattgttgctcgtcggtttcctgataagcaccgtcgtttttcaaagtcatattgacataaagtacaggaatatccgttgcacttgctttgatagccttgggacgtgtcacttccttgggaagactgttcatagcggcatctatcttctcattcacctctataaatgccaggtcggtattcactccaaagtcaaattccagacggatcacacccgccccgtcacgggtttcactttttatttctctcagtccggccacttgcagcaactgtctgcgcacaggggtaaccaccgtattctccagttcgcgtgccgatgaattctcgcccgttacctgtatggtaatctgcggtatggcaatatcgggcagcaaagatacaggtagcgaaaagtaggtcaccaacccgacaataaaacaggcggtaaaagccatcagcaccgcaatgggccgttgcaataagaacttaaccatacctttaatttttaattaccctcaccggtgcttcatgagccagattcacatttccggtagttatcacctccataccttcttccagtccgtctgtgacagtatattcctccatattctccaatcccgtatgcacatagttccacatagctttaccctctttcagtgtaaataccacctgtttgccggaacgtagtacaaccgccgttttggggataaccagttgttcgcccacagaacgcttcacgcttacccttacattcatgccgtcgaacaatttattactcccgttcactcgcgcctttatccgtaccattccattctcgtccaccagcggattaatctcactgatacttccctggcgcacccctgctgccgatgcataaggagtaatctccaccttatcccccactttcagcaatggcagctcattttcaagtacggtgaaatccacctccatatttccggcattgattacccggcagaaaggctcggaagttttgggcatattatatctcttttcaaagaggttggcaatcactccatcgaaaggagcagtcaacgtagcttgttccatatcatattgagcagattcatattgagctttgctctgctcatacccgctttttacttttgccagttccagcacatcagcaggtatcaccttcagattatcgggagcatatccttgtcctatcaacacatcctgcatctccagggtagcctgtgccaaactatttttattctgtaccaacgtattgttcaacttaaacaaatccaattgggctattttttgacctttccgcactatatccccgttctttacccagatattcgccaccacttccgaggtacgaaaatacaggtcggcataatcctgtgccgtcactttcccgttactgatcaattcatgattgaaaacctgctttttcagcggcatcaccgtcacctcattgggtaaagaaggaagaactgtttccaccccttctttttccgttgtttcctttttttctcccgagcaggcagtgaaagaaacggctaataataagcctgatgcaaatatgtgtaatttcatggtcatattttgtgatatctataacaaataaaaactttttattttgaaaaaactaattttcgggtactttttttaataattcccgtgctttccgtctcatctgcttgatagcggtagattgaattttcggttctttctccaataccgtctgtaccatccgctccaatttgtcacaccgataaaaaaacggatccgcatatagattggccaaaagataataaggataaatccttccgggcaaccgatggacagcacgcataaaccaatattccgcactatcatagtgcttcatgtcctgttcatttttcccgataatatttagtatcatgggatcgccactcactttcaaggcctctttcagtaccttgttagacagttcgggttcatgcagtttatgcaaggcatggccatactcaaacataaagcgggcattccctttcatttctttctgaatttcagcatagctttccaccgcttgctgataagctcccgagtggtaaaacatacggcttttggtccattgcttacaagcttctacagtcttggatttctgctgatatttacagaaacagccatagcttccgattaacaataaaacagtaaataaaatgcgaggccaaactttctctaaaggaagaacacggataccgcaagctaatactaatataatcaaagccgaaacaaacgctggaaattgtaatggataagaagaaaacgcaaataccgctaaagatagcaatgcgccgcatagtccatagatgccttgtttatgacctatgtacatgctcccacctagtatcaacaacccgatgcaaagcacaggtattccccaggcaatggctacttgcagatattcattgaaaacatattcgggagcacctgccacaagttcctccgttgccgtataatttccggctgcaaaataattctcctgcgcttgtccgtaagcagccggaacactgttccatctgcatcctgtccatgggtgctcactgacagcttgggcagcaattttccacataaacagacggccgtctgccgaatcctttttcatttgataaatgccacccaatgctataccgcccaaaataaaggttactatggcaaaagacactgcctgcttacgatgatgcctgatataatgctgaatttccatcttatagtgtataccacaaacataaatggaagagaccgctgcggctatccatgccgagcggctcattccggcaggcaacacacaaagaatcaatagcatgacagctaaagcaacataataaggtatggttttcttaccctctttccgctttaaccattcatacaggcagatagggaatatcatggcaaggtagcctgaataaggaccgggattatagaacgaaccggtcaaggcatagagggaatggttggaataggtaaatccgtatacctggcggatgccccaaacggcttctatacctccgtatagaataaacacccatgaaacgacagccgacagacattccttaatccgtgccggaaaaagaaatatcaacagggcaaaagctgccgatgaaagaactccacaggcatacatccaccgccagtcatccgccaaaatatcggatgacagtgaagacgtaccacaacacaccacgctgaggcacagggcaaccggtatgcctgccaccaatgccattccatatttcgaccatttattttccatctctaccaccaaacttgtttcccgtcctcgtatgtaaaaatccgctcttctttcccttgagtatgattttttaaccacaataaagcgcctttaggcacatcatcataatgaagtttattgtcgactgctaattttcgccctaaactaatccatttcatattccaatagaacaattcatattcattatcgacacatatttcattactatcatgtattattgcattattacttccataatatgggtatttacggtaaagtataatactttctttttctgtactagcacacagctcttttatggttccatcttctaaaagaattataggaaaccctataggtttattattcaaccgcccattttggctgataaatgctaagaaaacgatcccctttccttcgtttaaataagttcttatttgattatctccccataaaattcctctcccgactgattcaaacaaaacacttccattcatcacctttgataaagcaacaggaacccagtcatgattattaaaagtacaaagactgattaattgtttatctttctgtgaaggcactctaaaggttaaatcagaaagaggcatagcatattcggatgtaacatcacatagtggaatatcatattttttcctataaatcttagaaatcttgtatacaacttcattttttccttcagggccatatcccacttctataaaatcaccagtagcatctttcaccacattccaacaatgcgaagaactcctattagcccatgccggaacataatcaatagaagcagggattccaatggcacgtaaagacaaagctaaaaatgccgccatatcatcacaagtaccccaacgggtctgtagcatttcagcataagactgtttataaggatatttagtcattcctatattataacgcattccacctaattttatgatacgaagggccaattctcgtggagacattaaagaatccaataaatgaccaaacttttgaaaaccttcctcgcgccaattcgataatggctcatggtctatacggtaaggcaaaatataatgacagaattcatcaaatgaacagtaatcttttatttttccattctcccatattttaaaagcatattcaatattttttattaaataatctcccgttataacttttatatcttcaatcttactaaaacctgccaactgtcgtttagaaatagaatcaaatccatgccaaatcttagaatatcgcacatcctaacttataggatcattttgtgggataatcttcaaaaagttcttatatctatccaacgaatcataagggagtattgaatatttaccaggcatattttcaatcaaaaaacaggcagcacggtatttcaagctatcatgtttaaaatgcttcaacactttttccaactccgctttattatgtttagcctgctgcaaagcaatatccaaatgacttactccattcgtacaagcagaaagaagaattacaaaaacaaaatatacaccacaaactctcatactactttatctttttaaatatcctgtccatacgtatttcatccgtcactccattcttagacttccatatcaatgtcgcctttcctacaatatattcctccggcaaaggcccccaatagcgcgagtcctgagaattataacaattatcaccacccatgaaataataattgtgcataaaaacataatgctccacttcccgcccatttaaataaaaatgcccgttacttgctattaatttatcttgttgctcccattctataagattgcgataaagcaaataatgtttatcatccatcacaatagtatccccacgggaaggaagataaaaaggaccaaaatctttaatactccattttaagatggtatcaccgggataagcaaaaaaacaattttcctgtatcattttctccacattcctcggtttctcccaaaaatgcgccaaactgttttgtgaaactatatttcctaattccttatcataacctctgaccctatatcgggcgtcccttatttcaacagtatcacccggcaatgcgatacacctctttacataataaagcatcaggttaaaccctatactgtcccatcgttccggataagggaaattaaagaccaatacctcattgcgctgaaattcactgaatcccttcaaacgatcgatgtgtagcggcttatgttgccgggcatcaccaaggctgaatatacgtggtcctttcaacattttattgacaagcacatagtcacccggtatcagaaccggctccatggagtcaaaaggtatggcaaatgaggcaaaaacaaatatctgtaataacaaccaaataatcatcattaacaaaccccctccggtcacacaaaccagcaagttatataaaacgcctatgtatttctttatatacctcattttaaatcttaaaaggttggaaatttctgccgcctgttctgcataaagaaaatatgttcttcacgcccacgggtcagatcgcgtaaccagaacaatgcattgtcaggcacaatccagtccaaacaggtagtatcagcccgctgttttcccaaactcttccatccttcagtaccggcatgacagaacaactcataaatatcacccggagaaataaaattgtcatcattccggggcatatactccaggcaatctataactgcgacacggcccaaatcaacaacaacctcccctcctttgtctaaagacagataataagaaagaggatcaccatccgccacgtgctttgccagcacatgcatatttcctttttccgtaggactcccccaaaccgctatcggagaaacagcctttccattggcataaaatgtcatttccgccagttccgcacatttatcattgtcagccttatatcttatgtaacggcacttaaccgacttattcagaaagattctattccttgctatcacgggagtatccgctatctcatataatgtctttccatcttcaaaatttttcgtcatacttccctcaaaagtacctcccaccacatggcccataaagctgcgcaaccaaccatataccggatattttctatacaaacgaacctttactgttttctcccaatccggaagaaacgtatttatttctccacctgcaaaccaaaaggggaagccggaaggataataattgcctttggtatatttaatgggaagatataccagttccgattctagattaggtatttccatcttgccgcttgccgagcgtgcacaggcacaactccaccaatgcgcttcgtggaaatgggccagataacaaacctcatcatcaggaataccggtaagtatgcgtaacgtatccggataatatgcataactgacatctttcatataagggtgatagaataaaagcggcattgatttccaatcatctcccagatgtgctgccttttcttcttgaaaaccatacatgggcctgtaaaccttgccacgtttataccctcccgtatccctactcccccttacagcctccgaagctatataccaaataggtacatcgcgccctgtcgtgtcacgaacaacattccacacatgtccccctctggcatccgtatcttccatacaaggaatgccgacagcccgaaatgcataagtcactatatccgccgcatccacgcaactaccatatcgatggctgaataaatatctgggaccgatatgaggcagttcaaagtcttcacaataaataaagacaggttcttgtagatgcctgcttaccaaattcgcggcctccaccacatcactgcctttatatatggaatctaataaatatccatatttcttttcataaagttcacgccattcttccagcggttcatcccctatacgataaggcaacaagtattcacaaaaatcttcaaatgaaagagaacggttccatggacgtttctgccaattatcaaaagcacggtctatattgtctatcaagtattcggctgtgataatatgggcatcatatattttaggaagattacgataggtataatgcccccaacgtctggcataagtctggtctatttgtccgaaaggactataataagtacgtacacgcttcacactatccatttcacctccctgttggtaggaatagcaatgaggcatattccgtatcaaaaatttagccgcttccaattttaaagaatcataggtataatgctgaagcagtatctccaattccaaacgattagaagtagcaaaatctaaagcatgtttcaattgtttctgctcaaaagaagagtgggcacaagagatacatactaatgaaaaaaggacaaggagtcttgctaagaacataatattattcatttgttaatttggtggaatagtataatttacccctgcgaaaacataaattaaaactaaactcaaaacacaccttattcttcccgctatctgatacaatctaaaacacaggaattaaattatgtacctgagtaaaactacatttcaaccagtctgaagaatcagactcaattgatatttttagtttcaataattagttacttcatcttattttcagaaaaggagagaataaggattcacacttacaataaaataaagatactatatttgtcatcgtactttactaaatagttcattaaattcaagtgctactacagaaggatttaaattttcctcaaaggattccatatccttattttcccatatataccccaaacaatataatttattatcattagacaaatactgagtattaaacaaataggattctgcagaaattccaccatcaattttgatgataacttcctcttgcaaattcttactaataatccaataataaacctctgggattcgttcaccttcattgttcaataaaacatttaaaaatatataatcatgattttccagataatttataatagatgcatagttagaacgctgcaattcttctataacttccatgcccgataattcatgtaatttcttaggcagcttataattaggaaagtccatagcatatgataagtccaatttcccattttctatcgtatacaaatcatgatttagcgactcatgaaacgtcaaccattctccatttcttccaaaattattctctaccatcggaagcatattagacttttgatgaagataatatgccacattggcgatattttcatctgtacaaatcattttagcatcgccatacgtggtgttgttacctacataaaaccaataattctgcctatcatctatggcaaaagaaaacgcaggataagtaacctccttcttgtctaagaaatctcccccaaaagtataacaaaaaattcctccatctgataggacctctaaaactttacttttctgattaacaacgacatcatagacgctagtatattcaccagggccatttcccctgtgtccgatataaccggaaaactgtccatcactagtaaagctaagtatagatgattctgaattttttgaatatacaatccaaccactgtcaactttaattatagatgaattacgatcgaccatactagaatctgaaaaactgagaacggttatatccttactcaaagtcaatttgctttgctcaagtgtgattgcttcagttttattaaaaatataatcaaatgtttttttatgttttacactacatgaaacaaaaagaaatgggaaaaatattaatatcaactttttcattatatagaatttaaagttaaaataagctccaatccaatggagtatatgaattggagctgtttcaaatttatatcataatactctcattttatctgcacggccttcgacaactttctgcagttcgtcttgaagtacacatataattcatgtttaatggtgcacaataccccatagtttggtatctatttgttgtcgaagattcaccactagccaacgcttccacattagccaaagccaaatcagacattacatccgattgctgagcattatacacattcattcctgctatcaaagcaaacgcaacaaccaaagttgccttcaaaatattcttcttcatcttatttctagtaaaaaaaattattattattcatattttcatcttattctcggaaagaactccaccgcagaaaaaacaaaaataccgcttgcttattctgattatttacactacttttacatcggacttaacctccttttcttttaggagagagccacagggtggaaagaatcgactttcggcaaagaaaatgaatttctttccatccgctttttactcccattgattcatacttcatcctttattcagcattccccgttaccttcaaacgaagtggagaattatctgcattgcaataaatggtaaccgtcttactgaaatgctcagccttttcggcttcataaatcacggtcagttccgctttttctcccggacgaacaccctccttattatagtttaccttggtacatccacaggaagtgatgacatcgtatatcaccagtacatgctgtcccgtattggtcagtgtgaacttgcgttcctgcttctccgactgaggaaatgaaccgaagtctatgcttgttacgtccagactgactttcgttatcggtgtttccgcttttacaacttcaccacctgtcaatactttcaaataaagttccttcacctttggattgtgaacaggattgcctatagccgccaccctgttgtctttatccaataggaatgtctggaaagtcatttcatccggaaagtggttcaatcggttaaaatcgtccttttcatcgaaacaaacaggatagacaaatgcatcacgacgggtaatataacgcagttctttcatatctttcggatggaaatagaagacaaagggaaccggacggttcaacgttgaatcaacttcctgcataaacagcttccagcgaagcaattgtaacttacaactagtacagcctacagaatcgatataagtcactaccttataatccgcatccgctaaagaaaagtccaccgtatccttcccttgaatagtaaaaaaggaatgggcaggaaagagaatttctttcccttcccattcctcaaccaaacgagcgattttatctttttctgattccttgcaggaggaaaaaagagcaaaaacacatagtaatagacaaaggtatctcattgattaatccaggccaaaaggtataagcacatattccactttgtctccggtactgcaagtcacattcccactgcccagacatgtatcatacccggattctcctgcagccaatgcttccacattatctaaaagaaactcactctctaccggctttccggattgcttttcccaagccattaccgccattagcataacaacgataaataacacaaatacttttttcattggtttatcattttttgtgtgaaggtagagaacatctatcgggcacgcaaattttttcccttaaattgatcttaaggtgaccttaaagttttcttaagattcaaaaaatccccatttcatcggaaggattattttaatgccctgatctccaaatcataaggttcatccaattaaatcatattctttttttaacttataagttccttttttataaatatgcgtatctttgtaatctctaacatgaacaagaaacatgaaaataccgacaaacttattcaagtttagctttattgcattgggatggattgtattcatcctgctatgttatgttgcttttaaagatgaaaaaacaaatgttctgataacaatgaaggacagcctacgtgaagcaatcaatattgattatcaagaacgcttaaacaagattcttattcattatcgccctttaggcagaaaggtaaaaggtgtccaaatagaatacggtgatagtctagaaatcatttattttgaagacagcacccatgagtcactggctacccaactggccaaccagtatgtgatgacaaggattatccccgtcaatccagacaatttcaataagatcttccaagaagaatgggaaaagaatggagtttccgccgctaagacgggaatcatttactgccccaacaagaaaaaggtattcagtgacaatgattcaatctctttccagaaagctcttgtcacccctgtacaagcaatagacgctaaaagaaccgccggcgtacaggcatgggctatgattcattggacagaaatagtaaaacataccactccaaaagtgttatggagtatcattgcttatttcattgtcttgatatgggtgtctctgtcatttctgaaaaaaccacaggaaaaagaaactcccgccaatccggactgcataccatgtgaagaaattcctgacaatccggactacatacaattgaggaaaatgactttaaagttggaaagcaagaaactatatattggcgaccggctttgccacatagcaccggcagatttcaatctgctggaactgtttatcaaaacgcccaagcatcttttgactaaagaagatattaaaaatgctttctggccgaaagataacaatcccgaaaataaaatatatagtcatatctccacccttaaatcctcactcaaggactttcccgaatatcagatagtgacagaaaaaggaggataccgactggttatctcctcaaacgaatgaatagctcctatttccaataataagcatacataaggtatacaatcttacttaaaatcaccaacccaccgcagcaggaacaaagcatttctcacagcggaacgagttgtttcattaaggtggaataatttatttcatcaaggtaaaactaaatattccaccatataaaactatttgttccaccatataaaattaattgtaccaaacagtggaacacactgtaatacacgggaaacaaagagattctcgttactatattctgattcattcattataggccacaggacaatgcagtgcaggacaataacactgtgacagacttttatctgtcacactctccgtcacgctatctgtcacatcttaacaacctgtttttcagcaaaataattagtactgtgacagtgtgacagataattctcacttttaaactctatgaaagcaaacttgaaaatcatccatattccttcaccctgaaggattttttttggctgaagctttccgggtacaaatccgtcattataatcagctaagaactaacatcttacataaggatgaaggatttgaaagaaaaaacgcatgaattctaaattggtataagcagacagtccagctcataaaacactagaacctttttaaaaaaggccctgttctttttaaaaaagatccggttcttttcggaaaacgaacttatgtttttccaaccatacactacaataaattatccgccattataggataacacggtgatttcttttcaaaacttcctctattccaattcaaggggaaatttcactatctgctcgtcagcattgacatccaaaccgaataacataccggcagcctcatctacataaataccggcaataggacgatccaatacataggttttcaccacatcgccctcgtgggtggatatacgtaatattttaccaccctgctgataggcatcggccaacttcataatatccttaaatttacgaccgtcataaatggtataaatgtattggtcagtcacctgcacatcataataacagattctccccgccggaagtccatacccttcaggactcactttaaattggggttcaccatccccacccaattctcctatatgcttttgtgaagccatgctataaatatcgagcctatctccaaactgagtgacagaaaccaatatcttcttatcaggactgaatgatacaaaactgttccagccttgagccacagcaggcgcactttctctcaacagttccggatcggacactggtatctgctcggatttacgaagcaattcgccggaagagagtgaagcccaactgaaacggttctcaccggaataatcggggataacaacagtagaggcatccttcaaatcaaaatcaagggaacggaacaagcgcttatccaacaaaatatccttttcctgtttgggagttttcccctcggctataccgctatattgatacatcctgcccttgccgtcatcaagcacccacaccgtgtcctgccctgcaaaacggatattcgccgcataaatggactcacccggaccttccccacgctttccaaaagaagactgatattgaaaatcgggataagtaaatacatgataatagtaatcggcattgtgcaaatccaatatcaccgccttgtcaccctgtacacgcatacgataggcataccggaacagagccgtatcaatgggaacaatctcccctttcagaacttctcccttccgcaccgcttcttctatgattgactcactggatacctgctgttggtggcgttgcccggtacacgccaccaacaaagggaataaaacgcataatagttgtttgtttttcatttgatttctatatttacttatctggcacaaagtaaacaaactattcataaaaacaagaagaaacaaccttagatttaccttaaatcttcattttagattcgtcatagacatctctttttcacgagtagattttcatttcttcccatttcatcgaagttcagatactttgccatttactaagtgcaaacatttcaaaacagctcggacagacatacccatagaacaagaaatacatcacaataaattccattttccacaaaataggtttatatgatgaaaatcactatctttgttctatgaatagattggttatagtaggatgtggacgacttgctgaaattataacaaacgcagttgtcaaaggaatgttgcccgactatgaattagtaggcgtatattcgcgtacggcatcaaaggccgaacacattgcgaataaaatgaggcaacacggaaaaatgtgtgcagcctgtcacactttaaaagaactgttggagttaaaacctgattatctggtggaatcagcctcgcctgccgcaatgaaagaactggccttacccaccttggaaaacggaacttccattatcaccctatccataggagctttggcagacacctctttttatgagaaagtcaaagaaacggccaaggcaaacgatacacgggtttacttggtatccggggccaccggaggatttgatgtattaagaaccacctctttgatgggaaatgctacagctcgttttttcaatgaaaaaggacctgatgctttgaaaggcacatcggtttacaaggaagagctgcaacaggaaaaacgcattgtcttttccggcaatgcaacagaggcaataaatgtttttccaaccaaagtaaatgtatctgtcgcagcctcattggcttccgtaggaccggacaatatgcaggtatccatacagtccacccctggatttacaggtgatactcaaaaagtggaaatcaaaaatgaacaagtacacgcagtagtagaagtgtacagcgccacatcagagattgcaggatggtctgtagtgaacaccctgctcaatatcacttcacccattgtattctgacaaattggccagcaccttctcgctcaggcggtcaaacgcctggcgggtacggccggttgatacttgcatacaatgcacatgcggatgggtaagcaatgccgtactccccaatgctcctaatgtatcacaaaaacaaagattatcttcctccaaccatcgggtaaacgaagattcatcccacgcaggtgacaatcctgtgttaaatagtatcttcctatttccaagtgccttgaactctgcctcatgcaacaaaaccgtattcttattcaagcaacagcataccacttcactccatgtcaaaagttcattcaaaggcataaaacgataacctttcgcaccggcttcttttttttcactacgggcataataagctatatccgcaccaaaaaacttcattgcatccgctatcataccaccagattttcctaagcctacaatacccactttcaagccggtaatctcccggggaatcccttcccacggcttctgaccgaatccatgaagacaacgcaccagttcgctgactacatattctattaccccttcatcaccatagtcacgaatacctgtcaccgtaataccgcgttcattagcataacggatatccacattcgcactttcgggagagtatagtgaacaacacataccgatataccggacattcggacatctctctaaaatataccggtttatttgtgatgtataacttaacaatacagcatccgcatctccgatccgagcaataatctcattatcccccgccggaatatcagagtacataacaacctcatctgcaaaagaatataacgctttttctgctgacagaaccagactgacaggttctattgctacaagtttctgaaacatagtatttttaatttgactggtaaagatagtaaaaaatgcggcaaagagacttttttcatccaagattgtttatttttgcatccaaaacgaaaaaattaaaagaataatgggagcaggaaaatggattggtggtattctgggattcatgactatgggaccactgggagctttggccggatttgccttaggctcattgctggatggaaacaacggactttttggcaatacatacgaaaaaggacaggcggaagccggaaactatgacgaaggccagcggaatagctttttattctccatgttggttatggcgtcttacatcatccgtgcagacggacgcatcatgcacagcgaaatggaatatgtacgccaattcttaagaatgaatttcggcgaagaggcagtcatccaaggagaacagattttgctgaatctttttgaacagcgcaaacagatggagcgtcaaaacccgatggcatttaaaaataccatccatgaatgtggtgcacagattgccgcgaacctgccttacgaacaacggctgcaattgttggactttctggtaaacatagccaaaagtgacggaagcgtatgctctgaggaaatagcagcattaaaagaagtggcacaatgcatggaactgtcgcccaaagaagtggaatccatgctgaacttaagcggaaactcattggaagaagcttacaaagtacttgaaattgacccgtccgccaccaatgaggaagtacgtacagcctatcgccgtctggcattaaaacatcaccctgaccgtgttgctacattgggtgaagatgtgaaaaaagcggcagaagagaagttccaacaaattaataacgctaaagaacgaatttataaagccagaggaataaagtaaaaaagaatatttcgtgaaaacaagaaggaggtgtgtccatcccttagggatttttgaccacctccaacaacaaattaaaactcactggtaaaatggaacttaatatgcttgaagtccatttgtgccatttgaagtacataattgctatcagccaagaatacatcccttccttcacgatccttggccatatactgatatttacgttttttgaaagcttccagttcttccgggtcatcactttccacccaacatgccttgtataggctgataggctcccatcggcattttgcattatattcattttccagacgatactggatcacttcaaactgcaactgccctaccgtaccgataatcttacgtccattaaactgattgataaataactgtgccacaccctcatccatcaactggtcaatacctttagccaattgtttctgtttcatagggtcagcattctcaatatatttaaacatctcgggcgaaaaactgggaattccacggaaatgaagtttctcaccttcagtcagcgtatcaccgatcttgaacgttccgttatccggcaaaccgatgatatctcccgcccaagcctcgtctactgttgttttacgctgtgccataaactgagtgggagaagaaaaacgcatcgtcttgtcatgacgtacatgataataaggagtattacgggaaaatttgcccgaacaaattttacaaaatgcaatacatgaacgatgattaggatcgatattagctgtgatcttaaagacaaatccggtaaatttcggttcatcgggttccacctcacgttcttctgtcttggtaggacgggggctcggagcaatttccacaaatgtatccagcagttcctgtacaccgaagttattcaatgccgacccgaaaaatacaggagccatctcgcctttcaggtactcctccacattgaattcaggataaacaccgtcaaccagttccagttctccgcgcaatttttcagccaaaggagcaccgatctggttgtctagttcttccgtattgatatcaacctccactttttctgttaccacctgtttggaaggttggaaaagattcagtttatgttcataaaggttatacacacctttgaaacggggaccgctttcaataggccacgtcagaggacgtacattgataatgagttcctcctccagttcatccaacaaatcaaacggatctttcgcctcacggtccattttgttgacaaatatgattaccggagtattacgcatacggcatacttccatcagcttacgtgtctgcgtttccacacctttcgcaccatccaccacaataatgacactatctacggctgtcaaagtacgataagtatcctcggcaaagtcctgatggcccggagtatccagaatattgattttataatcattgtaatcaaactccatcacagaagtggtcacagaaataccacgctgcttttcaatgtccatccagtcggatgtggcggtcttctttatcttattactctttacggctccggccacctgtatctgtccgccaaaaagtaacaatttttcagttagagaggtcttaccggcatccggatgcgctataatcgcaaacgtccgtcttctttctatttcactattcatattttattatgcatttaattctttgatacatgcttccagactctcttcccaatgaggaatctcaatgttataagtagttttaatcttggtcttgtccaatacggaataatggggacggggagcctttgccggatattcatttgtatgcaggggactgaccttacaggtcgtgataccggcaatacgatggatagccttggtaaaatcataccaggaacatactccttcatcactgaaatgataaactcccggaaccactcccttataaatggctgtaaagatagcacgtgccagatcacgggcatatgtcggtgtaccaatctgatcaaagaccacacccaaagtttccttttcctttcccagacggagcatcgtttttacaaaattattcccaaaagtggaataaagccatgcggtacggataatcattgtttttttgcaatactccaatgcattcgtttcaccggccagcttggtcttgccgtaaacagaattgggacaaggaacatccccctcattataaggaagatgtttcgtgccatcgaacacataatccgttgatatctgaataaactcaccccagttggcttcagccgccttcgccagatagctcactgcgttcttattcagcttggtgcataactctatatcatcctctgccttatctaccgccgtataggccgcacagttcactatgacatgaatattattctcttttacgaaagtcatcaccgcctgctcatcacaaatgtccaattcggctacatccgtaaaaaaacaagtgtattccttgtattcagccgatagcacacgcatttcatttcctaattgaccgttggcaccagtcaccaatatattcttcatttctatttcatttattagaattccaattctccttttttatcctctatatagtagtttgacaacatagccagcaatgtcgagattgcttcttgtgcctttcttgtttcctcactgatttctttcttttgcaatttcaacaataagataccataaagcgcctcaaaacaagtttccagttcaggctcctctttatccgcacctttagcgcgtaactctacaatataaggcaatactttataataagcagaattataataaggaaacttaggggaacgcaataactgcaaatgaaggtcggtaagccaagttataatgtttttattaatctgcaaatggcctttttccataatcccttcatgacgcatcatctcaatcaaatccatataccactgggtgagttccgctttctgctcttccgttaacggataaggagctatgatggtgctttttatcttttccatatcacagccgttggcacggattaaatcctctatctgccacatatatataagatactcggctatattcttttcttttaactgcctggaaacgaacatactttttaaattaaaattgataattaaaaaattaaaaaaccaacgtatgatacacaagatatgtttctttgtcagtacatcgtttttcctaaaatagtataaatgaaacctgcgactgaaatcagcatcactacaataccaatcacacggttcaaaatccaaatgccgcgtaaattaaaacgggtgcgtactttattgacaaaatacgtaattccgaaccaccagagaagagcccccaatacaatagccaaataccccaccagttgaaagcctatgggactgcccggcatcacaaaagaaaaacgggcaaacaaacctataaacaggaatataatgagggggttggagagagtcacaaaaaaagcagtaacaaaattatgaagataactgcccggggtagaagatacaggacggatagactggacaggattactacggaaagtataaataccgaaaaagaacagcatgatactgccgataatttgtaacaaaacttggttctttgccaagaaatcatccataaaactcatgccataacctgtaatcaaggcatagcctatatcactaagggcagctcccagaccggtaacaaatccataccatcgtcccttgttcagtgtgcgctgtatacaaagtaccccaacaggacctaacggcgcagaaaccactacaccgacgataagccctttcaccaataaatcgagtatggttacttgttctatccaattcatgctgcaaagatgctacttttttacgaaagtacctatatttacgctcaaaattctttcataccccgtctcttttatataactttgcaccttattaatagacccttgatattagaactagttttcaattaacaaaacaactataaaagtgctatgattctatttttcagaacacccactaaaagtgtaatagcaacagaagtcagccaggaactggcttctgaggatattcagaaattaagctggctttatggtgaagccactgtagagaacgaagagaacctgaaaggttgcttcatcggaccgcgtcgggaaatgattactccctggagtacaaatgctgtagaaatcactcagaacatgggtcttacaggtgtcttacgcattgaggaatatttccctgtaaaagacgaaaacgccgagtacgatcctatgctgcaacgtatgtataagggattgaaccaggagattttcacagtcaacatcaaaccccagccgattgttcacatcgagaacctcgaagaatacaatgaaaaagaaggtctggcactttcccgtgaggaaatggactatttgctgaaggttgaaaaagatttgggacgtaaattaaccgattccgaagtattcggcttcgcgcagatcaattccgagcattgccgccataagatattcggcggaacattcattattgatggtcaggaaatggagtcttccttgttccagatgatcaagaaaacgactgctgaaaatcccaacaagattatttccgcttataaagataatgtagcatttgccgaaggaccgatagtagagcaattctctccggccgatcattccacttccgattatttcattatcaaagatatcaagactgttatctcactgaaagccgaaacacataacttcccgacaaccgtagaaccattcaacggtgcatctaccggtaccggtggtgagatccgtgaccgtatgggcggtggcaagggctcatggcccattgctggtactgccgtttatatgacctcttatccccgtactgatgagggacgcgaatgggaagacatccttcctgtccgccaatggttataccagactccggaacagatcttaatcaaggcttccaacggtgcttccgatttcggtaacaaattcggtcaaccgctaatttgtggttctgtactgacattcgagcaccaggaaaacggcgagaagtatgcatacgacaaagtgattatgctggcaggaggagtaggttacggtactcagcgcgactgtctgaaaggacatcccgaaaaaggaaataaagtcgttgtaatgggtggtgataactatcgcatcggcttgggtggaggttcggtctcttctgttgagacaggccggtactcatcgggaatcgaactaaacgccgttcaacgtgccaatgcggaaatgcaaaaacgtgcctataacgtagtccgtgcattgtgtgaagaagataacaacccgattgtttccattcacgaccacggttcggccggccacgtgaattgtttatccgaactggtagaagaaaacggtggattaattcatatggacaaactacctatcggtgaccagactttgtctgccaaagaaattatcgccaacgaatctcaggaacgtatgggattgctgattgacgagtcggctattgaacatgtacaaaaaattgctgatcgcgaacgtgcgccgatgtataccgtaggtgaaacaaccggagacgcccgctttgcctttgaacaggccgatggggtacgtccgttcgatctggcagtagatcagatgttcggttcttctccgaaaacctacatggttgacaagaccgtagagcgccattatgaaaatgtttcatacgaaacttccaaattaaatgaatatatccgccgcgtacttcagctggaagctgttgcttgcaaagattggttaaccaataaagtagaccgttccgtaaccggtaaaatcgctcgccaacaatgtcaaggtgaaattcagttgcctctgagcgattgtggtgtagtagctctcgactatcgtggagaaaaaggtatagcaacttctctaggccatgctccccaagccgccttagccaatccggccgcaggctctgttttgtcggtagccgaagcactgactaatatcgtatgggccccgatggcggaaggattggacagcatttccttgtctgccaactggatgtggccatgccgcgcacaggaaggtgaagacgcccgcctgtacactgccgtaaaagccctttccgatttctgctgctcattgcaaatcaatgtaccgaccggaaaagattctttgtctatgactcagaaatatcctaacggtgaaaagatcatcagtccgggaactgtcatcgtttctgccggcggtgaagtttcggatgtgaagaaagtggtttctcctgtattggtaaatgatgaaaagagcactatctaccatattgatttcagttttgacaagttacgtctgggaggttctgcttttgcacaatcactgaacaaagtaggtgacgatgtaccgactgtacaaaatcctgaatatttccgcgacgcattcctggctgtacaagaattagtaaataaaggtctgattatggccggtcacgatatttctgccggtggtcttattactacactgcttgaaatgtgcttctcgaatatggaaggtggtatggaaatcagcctgaacaagattaaggaagatgacattatcaagatattgttcgccgaaaatccgggtattgttatccaggtaaaagataagcacaaagaagaagtgaaaaagatcttggaagacgcaggcataggctacgtaaaattaggtaaaccgactgaagaacggcatatcctggtagaaaagggagatgcgacttaccagttcggcatagactatctgcgcgatgtatggtattctacctcttacttgctagaccgcaagcagagcatgaacggctgcgccaaaaaacgtttcgagaactacaagaaacaacctttggaatttgtattcgacaaatcattcaccggcaaactttcacaattcgaccttaaccccgaccgtcgtactccgacaggtatcaaagcggctattatccgtgaaaaaggaaccaatggcgaacgcgaaatggcctacatgctctatttggcaggatttgatgtgaaggatgtaacaatgaccgatctggtcagcggacgtgagacattagaggacatcaatttcatcgtattctgcggtgggttctctaattcggacgttttaggttctgccaaaggatgggccggagctttcttgttcaatcccaaagccaaagctgcattggataacttctatgcacgcaaagatacattgtcattgggcgtatgtaacggctgccagctgatgatagaattaaacctgattaacccagacttcaccaagaaagcgaaaatgctgcacaatgattcacataaattcgaatccaagtttgtaggtgttactgttcctatgaatagaagcgtcatgttcggttcgttaagcggaagcaagcttggcatctgggtagcccatggagaaggtaaattctcattgccatatcatgaagataaatacaatgttgtattgaaatactcatacgatgagtatcccggcaatccgaacggttcagattacagcgtagccggtctggccagtcctgacggtcgccatttggccatgatgcctcatctggaacgctcttgtttcccatggcaaaatgcttattatccggctgatagaataaagaacgatcagattactccatggatggaagcatttgtcaatgctagaaaatggattgagatgaacaaaaaataaaaacgatttgttatatttactaaaaaagcggtgagtcatactgattaccgctttttttgtatataacagattttgatatgttaagggaaattacgaactttgtaaggattttgcctcctaataatatgagaagaattcttttacttatatgcctttttgttattttggtaacacctgccgttgctcaactataccagtatctggatactcagaatggtttgagcagccgtagagttttatctatacgaaaagataaaaagggctatatgtggtttctcactcacgaaggaatagacaggtacaacggaaaacaatacacacactatagcttaacagccaacggaaaactattgaacttttttcctaacttgaacactttgcaaacagatacggcaggagtggtttgggagataggaaaaaccggtcatctattcaggtacaattccttacaagataaatttgaactagtttgcgattttgccagtaaggacaaaagcaacagcggactgccgctcaccgcttcatttcttgactccaaagacaacaatatattgctttgcactaaaaacaaacaatatcttttcgacatagatacccatgaacttattcaactggaaagtcctatcaaggaagaaatcacatatattgcaaaatctacgaacaaccaatattttctggcatccagccacaagatttactgtgcaaaactgaatcatggccgattagaaacaatcaagcatccggaactggataattttcatatagtgaactacatctattttcatccggaaacccaaatgctagtaataggtaccttgctggatggtatttatctatacaatatccatagccgccaactgattgatgtacacaacggactacaagacattaatgtcaactctatcatagcaagtaaagaaaatgaaaacgaggtgctaatagcaactaatggcgcaggcgtatataaattaaacttgggcacttacgaattgacaaattttctaaatgccgaccacaaccattccaataaaatgaacggtaatatcattaatgatatctatattgatgatgatcaaaaattatggatggcagtctatcctataggaattactgtatattccgagaaatatcccggatataaatggatacagcactcttacgacaatcccaactcactgatagataaccaagtgaactatatattggaagattctgaaggagatatttggtatgcgaccaataatggcgtatgttgctaccgtccttccaccaaacaatggacgaatttattatcaacttatcagcatgacacacctaatcaaaatcatgtatttatctctatatgtgaatcccggccaggaattattttagtaggaggatatatgtcgggaatgtacaaaatagataagaaaaacatgaccacacaatattttattccccagacattaaatgatgacaccataaaaccggataaatatattcgttgtatttataaggattgggataatctgatttgggccggaggatattacaatttaaaaagttatgatatggatacaaaggaaatgcattgttataaaatggatttccctatcacctatatcaccaataaggacgcccacaatttatggataggaactatcaatggattgtatcagttcaataaggtcaatcaagagctcaaagcggtgaatctagactccgaactaggctgcataaatactatttatcaaagtaaaaagaacatcactttcattggtacacatggttccggtatatggatttacaacaattatacagaaaaagtaactaattaccatgtcaataattcagctctgatatctaataatattcattgcatactgtctactttggaagacgatttgatcattagtacagaaaaagggttgacccgtttcaaaacaaaagaaaaaatattctctaactggacaaaagaacaagggttgatgtctaccagctttaatcaagctgccggagtacatacacgcgataaaaaatttattttcggatgtggagacggagccattgaactggcagataccgtcacgctgcctcatcaattcaaatccaaaatggtatttgataatttccgactgctctatcagaaagtaatgcccggtgaaaaaggttcccctttaaaaaaagaaattgatgatacccggcatatcatactgaattacgaccagaatattttttcattggatgtgtcttccatcaattatgataatccctccaacatcgtctattcctggaaactggaagggttttatgatgaatggacttcactcacgaacaataaccgcatacgttacactaatatcggtcccggtaagtataaattaagagtgagagccatcctgatggatgatcaccatttgttagaagaacgttcacttttcataaccgtaaccccaccttggtgggctactttttgggcaggcattctttatctgatcatttttatactggtcggagtaattgtcttacgttatttgtggcttaggaaagacagaaacaattcaaaagaaaaaatccggttctttatcaacacggcgcatgatatacgtacaccgctgactttgataaaagctcctttgggagagattcttaaaaacgaaaacctgtccgaacagggaagaatcaatatcaacctagctatacaaaatacagacaatctgtctgagttagccagtaatctgattaattttgaaaaagaggaactgtatacctccactgtatatgtatcccgatacgaattgaacaactatatcaaaaactatttggaacagttcaatttatatgcccgcaaaagacagataaatatcatatttgaaactaatttcgaaagccaggaagtatggctggacagaaacaagatggattccattatccgtaacctgatgacaaatgccttgaaatatacctgtcaggggggcaatgtcactgtgcaaactcagaaaaataaaagtcattggttcatcactattacagatacaggaatcgggatccccgccaatgaacaaaagaaaatgttcaaaagcctattcagagggaataatgccatcaatctgcaaatcacaggaagcggcatcggcatgctgcttacctacaaactgataaaaagccatgccggcaaaatatcaatgagcagtatagagaatgtaggaactaccttcaaactggcattccctatcaaaagtcggaaatacaactaccgtatattcaaaaaagctgatgtaattgacccgctgcctgtcatcgaaggcaatccggaagaactggtgaaagagatcaaaaacaagccggtcaaaacacatgccgcttccattctgatagtggaagataatatggaattgcgtactttcctattgcatacactatcggaagattatcatgtgtctgatgtaggaaacgggcaagaagcactggattttatcaaagagcgacaacctgatctgatactgtcggatgtaatgatgcctatcatgaatggaaacaaaatgtgcaatatattgaaaagtaatattgaaaccagtcatatacctatcatattgctgaccgcattgaacgataaagaaagtattatcaaaggcttacagaccaaagccgataaatacatagtcaaaccatttgacatggaagtactgaaagcaaacataaccaacgttctggcgaacagggaaatcatgaaaaagcgtttctcacaattcaaattcaatgcagacgaggtatcagatgatccgacggtcagtttggaacaggaatttcttttaaaagctaccgacatcataaaaagtagtataaacaaagaaatgaacgtagaaaacctatgtgatgcaatgaatatgagccggagtagtttatacaataaaataaaggccttaaccaatgattcgtccagtgactttatacgtaaagtacgtatgaacgaagctagcattttattgaaaagcaaacgttataccgtatccgaagtttcggatatgatgggattcagtgatcccaaatattttacggatacatttaagaaatactacggagttccaccaagcacttatatgaaacaaaattaaaaaaatgaatttctatttacaatcatttcttatcttcctaaaaataggactatttactattggcggaggatatgctatggttcccctaattcaagatgaaatagtggacaaacgaaaatggattgacaaagaggattttattgatttattagccctcactcagtctgtacccggaatatttgctgtaaatattgccatatttatcggatataaattgcgtaaattccgtggagcattggcaatggctttaggcacaatactcccctctttctttatcatattggcaattgccttgttctttcaacagttcaaacaatacccaattgtagagaatatattcaagggaattcgcccggcggtagtagcccttattgcagctcccactttctccatggcaaaatccgccaagataaaccgttacactgtctggataccaatagtatccgcattgcttatctgggtattggacgtgtctccagtctacattatcataatagcgggcgtgggaggttttatatatggcaagtacaaacataaatattcatccaaatgatttttctatatttattctacacattctgtaaaatagggctcttcggtttcggaggaggctatgccatgttgtccatgatacaaggagaagtagtaacaagatataattggatcagtgccagcgaatttacagatatcatcgctatcagccaaatgacaccgggtcccattggcatcaactctgctacttatgtgggatatactgcggtattgaatgcaggctacaatgaaagctgggctatattcggttcttgcatagctacttttgctgtagtttttccatcgttcatattaatggtaatcatcagccggttcttcttgaaataccaaaagcatccggttgtagaagccgtattcaaagggttgcgtccggcagtagtaggtctgctggcagcagctgcactcgtcttgatgaatgctgaaaacttcggcagttatcaaatagatttgtatcaattcatcatcagtataattatttttctagtaacctttataggtacacggaaatacaaaatcaatcctatattaatgattatactttgcggagtggcagggttcctgctttactgagaataggacgattatgggaaatcatcaaaaaaatccgtatgatcggctccggaaataatcatcaactctttgtcatcactgattagataaagccgcaatagatggattacagatgttataaccttttcctgatttcaacataaacaatatagcacccggaaaacaggcggcatacaaatcaactgccactgccccggaattctttattcatcgataggacgtgaatataatacccaggcagtggcagtaaaaataaaatctaaaattaaagaaacactcccgcttcttacagttttactttctttttagtacccttcgactcattgtgcaaacgatccaacgctgtcactacatactggtacttcgtttttccatcgttataaggtaatggataaaaatggtcacgggtaatggctacaatatgggaagcatcatccaaattgattttttcttttttatcaaagcgataaaccacatactgtacagctttgtccatctcgtcctttgccttcggagctgtccagaagagtaccggaccttcatacgtccataccatcttcaccttctttactttacctggagccttatcgtccataaaaggagattcaggaatcaaagccggataacgatgatactccttctccagcatagtgcggtaattgccggcattatccaccactgcagcagcataccattgacaacttccctgcacggtaggaagcgaccgttgcaacttcattttggcaggcatctggttttgtaacggattacgggcatccgccttgttcaccgtacgcatcacatcctgaccgataaataacggacgcgaagcggcatgttttgcccaccaatgtatcaagttgtcataatcggcagcaggatgacctatttcccaataaatctgagggatattataatctacccaaccattattaatccacatcagcacatctgcatacaaatcatcataattctgaagaccgcgtgtatcacttccattcggatcatttttcttgttgcggtagataccaaaaggagaaacaccgaacttcacccacggcttacactcgcgcacagtttcgtgaatttcctttatcagcacattcacgttgtcacggcgccaatcggctttattactgtatccgcgaccatattgcgcaaaactgacatgatcaggaaaatcttcgcccgggttgggataaggatagaaataatcatccatatgaatggcatccacatcataacgggtaacaatatcgcgcacaatcttgcaaatgtatttacggttttcgggcaaagccggatcaaaataaagttgaccagcataattcacgaaacgttccggattcttattatacggatgaatgggtgataaggcagtagttccctttgtcttggcacggtaagggttaatccaggcatggaactccattccacgcttatggcattcatcaatcatgaactgcatcgggtcccagtaaggtgaaggcactctgccctgcactcctgtaagaaagcggctccacggctcataagaagatttatacaaggcatcggcttctgcacgtacctgaaaaattatcgcattaatgcctgcgccctgcagactgtttagttgatttattaacagccgctgtatcttctctgtcggcattccctggaactgtccattcacacactgaatccatgcaccgcggaactcacgtttaggataacgtgtctgagcactgacaacagaagtaaaaagtagtgctatcaataaaagaagaatagtttttgctctcattttgttattcttgtttaatacgcttgcaaagataagaaaacttataattatctttgcatattaaaccaaattcaataaagaatgtcagaaagtaactatatatccataaaaggagcaaaggtaaacaacctcaaaaacatcgatgtaaacattccacgcaacaagctggtcgtcatcacgggactatccggttccggaaaatcatccttggcttttgatacattatacgctgaaggtcagcgacgctatgtagaaagcctgtcatcatacgcccgccaatttctgggccgcatgagcaagcctgagtgtgatttcatcaaaggtataccacccgctatcgccatagagcaaaaagtgaacagccgcaatcctcgttccaccgtgggtacttccaccgaaatatatgagtatctgcgactgctctatgcacgcgtggggaagacttattcccccattagcgggcaactggtgaaaaaacatagcattgaagatattgtaaactgtatgctttcctttcctaaaggaacgaaatacacggttctcactcctatgatgccccgtgaaggccgtacactgctccagcaactggaaatggacttgaaacaaggatttacccgtatagaggtgaaccgtgaaatagtccgtatagaagattttctgcaacaaacagctgccgaagataaaaaacaaaacatctatctgctggtagatcgcatgacagccgatgatagcaaagacagtatcagccgcctcaccgattctgccgaaacggccatgtacgagggagacgggaattgtctcctccgcttctactctgctgacggaagtacgcagctgttctctttcagcactaaattcgagaccgacggaattaaattcgaagaaccgaatgaccaaatgttttcattcaattcccctctcggcgcttgtcccgaatgcgaaggcttcggtaaagtgataggtatagatgaacatctggtgattccaaaccgtgctctgagtgtatatgacggagctgtcctttgctggcgtggtgaaaagatgggggaatggctacaggaattcattcatgaagctcccgcccacgatttccccatcttcgccccttattatgaactgacacaggaacaaaaagattatttatggcatggacctagaaataaggcctgtatagattctttcttcaaaatgctggaagaaaaccaatataaaatacaatatcgtgtgatgctggcacgatacaggggaaaaactatttgtcctgtctgccacggaacacgcttgaaaaaagaagccggttatgtaaaagtaggtggaaaatccatctctcaactggttgacttacctattcacgacttaaaagaattcttccgcactctagaactagatgcacatgacacagccatcgccaaacggatcttaacggaaattaccaaccgcatcaacttcctcatggatgtgggtttgggatatcttacactgaaccgtctcagcaactcgctctccggcggtgaaagccagcgcatcaatctgaccacctcattaggcagcagcttggtaggctcactctatatcctggacgagcccagtatcggattacacagccgtgacaccgaccggctgataaaagtacttcgtcagttacaggagctgggaaacaccgtagtagtggtagaacatgatgaagaaataatccgtgctgccgattatatcattgatatcggtcctcaagcaggacgtttaggaggacaaatagtatatcaaggcaacatgaacgatcttcaaagaaacagtaacagttatacggtgcgctatttgttgggagaagaaaacatagagattccccgatgtcatcgtccgtggaacaattatatagaaataaaaggcgcgcgtgaaaacaaccttaaaggcattgacgtaaaatttccactgaatgtaatgacggtagttacgggagtcagcggttcggggaagagtacgttggtacgtgatgtcttttacaaggcattgaaacgcgaatatagtgaagctagcgaacggtcgggtgagttcatctctttggaaggagatgtacagctggtgaaagatattgaatttgtagaccagaatcctatcggaaaatcatcacgcagcaatccggtaacctatgtaaaagcatacgacgaaatacgaaaactctttgccgaacagcctcttgccaagcaaatgggatatactgccggatatttctcattcaataccgaaggcgggcgctgtgaggaatgcaaaggtgacggtacggtaaccgttgaaatgcaatttatggcagatttggtactagaatgtgagtcttgtcatggaaaacgtttcaagagcgacacgctggaaataaaattccaagacaagagcatctatgacattctggaaatgacagtgaatcaagccattgaattctttgccgaatacaatcaaaaaaagatagtgaagaaactaattctattacaagaagtgggattgggatatataaagttaggacaagcctcctccactctttccggcggcgagaaccaacgcgtaaaactagcttattttctgagcatagagaaagcacaacccactatttttgtattcgatgaaccaaccacaggtctgcattttcatgatatcaagaaactgctggaagcatttgaagccttaatcagccgcggacataccattatcattatcgagcataatatggatgtgataaaatgtgccgaccatgtgattgacctaggacccgaaggaggaaatatgggaggaaatctggtagttgcgggcactccggaagaggttgcagcatgtgcggcatcttatacgggacagtttttacgtgaaaaactggcgatggattctcctgattgattttttattcaccgttgattgtccaaactgacacaaattattaaatatgattatacgcaatataccactagatgataaatgggaatttaaaagtgatttattccgttctataaatttagcattttgtggtatgattgcagaatcattttactaaaaatctgttttaatgttttccacattgtcaatctaaacgaaaatatgagtaaatttagaattgaattaacaaccttataaatcaacagaatatgaaaaaactttttttactactcttgctgttccctttcctattgggatgttcacaaaaagagaaagaattcaccgttcttcaatggaacatttggcaagaaggaactgtaattcccggtggttacgacgctattgtgaatgaaatagcccgtcttcgtccggacttcgtcacattgagcgaagtacgtaattacgaaaacaccaatttcactgcccgcctagtgcaatcattaaaggaaaaaggagaaacctattactccttctatacctatgatacaggtctgttaagccgataccccatcactgattcattaaccgtttttcccgaaaagaatgaccacggcagtatctatcgccttacagccgatatgaacggacagaaaatagcagtctacaccgctcatcttgattatttggatgacgcctattataatgtacgcggatatgatggctctacttgggaagaaatccctatccccactaccgtagaagaagtattaaagagaaatgtagcctcacaacgcgatgacgccatcagactattcattgaacaggcaaaaaaagatcgtgcagccggctacaccatcattttaggaggagattttaatgaaccttcacatcaagattggactgaagagaccaaagacctgtatgaccatcatggctttgtaatcccctggacagttcctgtcctgttagacgaagccggattgaaagacgcctatcgagaattctatccagatgtattaaactatcccggcttcacttatccttcggataatccggcaaagcccgccgacaaaataacctgggctcccaaagcagatgaacgcgaccgtatagattacatttggtattatcccgaaaaggggttgaaagtgaaagacgccgccattttcggtccgaaaaattccatagtccgtgcacagcgtattcaggaaacatctaaagacaagtttatagaaccatcgggcgtatggcctacagaccataaaggagtactggttactttccaatatcccgccaaataatatcgtttttcccaatatttctgttatctttgtccaataacctaatttattatcctatgaccaaatgtacacataagcagttaatgaccgcctgtatgttagcaggcacattgatattgggagcatgtaccagtactccccctgtaacaaaagaggtatccattgtacccataaccaaccatctggaggaaacaaacggtgcttttgtattgaaaagtaatacctccatcggtgttattgacgccgaactaattcccgcagccgagtatttggccgatatgctttccagtgccacaggctacgaccttaaagtaaaagaaggcgaaggaaccatcacccttgccttgggggatgttcaaggaaaagaaggtgcctataccctgacagccgagagcgataaggtcaacattacaggtaactcttacggaggtgtcattgcaggtatcgaatccctcagacagctgtttcccccgcaaatagaatctaaagaaattgttaaaggtacagactgggccataccggccgttaacattcaagatgccccccgctttgaatggagaggcatcatgctggacgtatcccgccatttctacacaatagatgaggtgaaagaattactggatgtcatggccctttacaagatgaataaattccactggcatcttaccgatgaccaaggatggcgtatcgaaatcaagaaatatcctttactgacggaaaaaggagcctggcgcaaattcaattcccatgaccgcgaatgcatacgtcagtcaaagactgataacaatccggatatggcaattcccgaagacaagatacgcatcgtagaaggtgacaccctatatggaggctactacactcaggaagatatcaaggatgtcatagcatacgccaaaatacgaggcatagatattattcccgaaattgatatgccgggacacatgctggcagctgtgagtaactatgaaggtgtttcctgttttaacgaaaccggttggggaagcgtcttctcctcacctgtttgtccggggaaagactctgcattggagttctgcaagaatgtttatgcagaactgatagcccttttcccctataagtatgtacatataggaggtgacgaagtagaaaaaaccaattggaaaaaatgtccggactgccagaaacgtatgcatgacaataatctgaaaaccgaagaagaactgcaatcatggttcattcatgacatggagagattctttaacgggaaaggcaaagaaatgataggctgggatgaaatcattgaaggcggattgtctaaaacagctaccgtaatgtggtggcgcagctgggtaaaagatgcagcgaccaaggcaacggcacaaggcaaccctgtcattttcactcctaacggacaattttatttggattatgcagaagacaagaattctatggcaagcatttataatctggatacgacagacaacctgactcccgagcagcagtcgctgattttaggagtgcagggaaatatttggtgcgaatggattccttccaacgcacgtatgcaatatatggccattccacgtttgctggctattgccgaattaggttggagcaaaccagagcaaaaagactggaatgccttcaaacaacgcctgtctgatcagtttgaacgtctcaatatcatgggtatcaattaccgtatacccgatttggaaggctttaatgccgtcaacgcctttatcggtgaaggaaccattaatgtaacttgccttgaccccactgcggaaattcactataccactgatggcagtactcctactttacaatctcccgtatatgaaggtcccatcaaagtgactgaaaccacagactttactttctgcaccttccgccctaatggaaagaaaggtgacatagccaagacccgtttcatcaaaagtgaatataccccctctgtaactgccgctccttccaatccgggtttgaaagctacatggcacgaatttaaaggaaataaatgcagtgaaatagaaaaagctccggtcaatggtacttatccagtggaagacgttatgattcctaaaaaagtaaaaggaaatatcggactgattatcaaaggatatttcaatgctcctcaagacgatatctacacttttgcactcctgtccgacgatggtagtacattgaccatagacagtgaacagatagtagacaatgacgggcctcacggacctaaggaaatagtgggacaaaaggcattggcgaaaggatatcatccaatggaattacgttatttcgaccaaaacggaggacaactgaaattaaaagtaacaggtagtgatggtaaagaaattccgttcacgcatctctatgcgcattaatctcacataaaaagtttttccaccacagattatacagatttacatagattgaatttcaatgaattctcccattcaataatctgcgtaatctgtggtggaattacatcaatcagaagtaaactccgaaccctatcttgaagcctaatttactaaattctgaaatatcactaaaactcaagtcataatatacagacggctcaatagtcacatttctgcccaagaaaaaagcatatccgacttccggtgtcaaacaaaccagattctttttaaatcctacacaagaaaggtgcttatacgccattcccaatcctccataaataccgcaactggaaaaataataacgtccttgtgcaccaatactggtttcatccattccatgttctacataattgcccttaaaattcagcaatacagccacattatcggctacaaacgcaccaccggtcaaagcgaaaccaaaatttgtaccctcattcttgctatgagataggtcaagccctgtcaatgaagcattcacataccatacctccttctcaaattgagcatgtgcactcagtgcagtcattaccaacagcatcaagctgactaaaattttcttcataatgttgtcgtttaatagttattttttattttccaaatcacgttcacgtctttcctccgccttttctttcttacgaaggacaatccataacaacgctattatcatataggataaacctactgtgagatacttttccgtatcacttatttccgtattacgcggaataaaataaacggccatcgctgtagtataaaccaacaaagcgacaggcaaccaaatcgattttctatattttttcataaactatgctgttttgtttcctataccaacttacaaaccctatagcggctaccaacgtgcaaagaccaccgattatataagatacataatcagaaagtgccaatccttcgggagcaatgcaaatataagtagaacatacagccgtcataaacaaggcaggaaacaaggtaatataataattctttttcgcacgtaccagaaaaacagtgaccgcccacaaagtaaacacagacaaagcctgattacaccaggcaaaataacgccatatcatatcaaatcctgccgcatcacgctgactgtacaacaatataccgatagttaccgcaaaaataggaatacaaatcaataaacgtttcgctatacttttttgttccaaatgcataaaatcggcaacaatcaaacgagctgaacgtaaagcggtatctccactggtaataggagcggcaattacccccagtacagccaataaacctcctatcgtacccaaccattccttggttatgctgtccacaataatcgaagcattactctcctccataccattttgatgaaaaaaacaagtagcggcagcagcccaaatcaatgccacgatcccttcggtcaccatcgctccataaaaaataggacggccatacttctcattcttcatacaacgtgccatcaacggagattgtgtggcatgaaagccactgattgccccacaagcaatagaaacaaacatgataggaaaaattggtaatccggcagggtgggtattatgcagcccgtccgtaatttcgggcaatgccggatgattccataacaacatcaccaaaatccccaccgccataaacaataaagcaatggcaaacaacggatatatttttcctataatcttatctaccggcaacaatgtagccaacatataatagacaaatacgactataatccaaaaagtaacatccatatactccggagtaagtttggcaagcaatccggcaggtcctgccacaaaaaccgctccgactaatatcatcagcacaaccgtaaaaccgcgcatcaactgctttgtgggaaggcctaaataacgaccgataatttccggcaaactctcgccatcatgccgaatggaaagcattccggacaaataatcgtgtaccgtcccggcaaaaatggtacctaaaacaatccacaaataagacgccgtaccaaacttcgctcccattatagcaccgaaaataggtcctaagccggctatattcaaaaattgaatcatgaaaatcttccaagtaggaagtggaataaagtcaacaccatccgccatggtcagggcaggtgtcttccttgtcttgtcaggaccgaacacacgttccacataacttccatacaaaaagtatccgcctacaagaaccaataatgcaataataaaggttatcatattctattttttgttttgttggggcaaaagtaacgaattaattgattacttcgtatctttgccctaaaattaaagtaaatgcgaacattctttataactttattactagtcatagtgagtttatcacctgttttctcacaacctaaatatgaaatccgtgccacctggctcactacgctcggaggaatggactggcctcgtaacaaggcagtaaacgcatcaggcatccggcgtcagcaaaaagaattatgtgatatactggatcgtctgaaagccgccaatttcaatacggtattgttgcaaacccgtctgcgcggagatatgatttatccttccgccatagaaactttcgccgaatcactgacaggtagcacaggagggaatcccggatatgaccctttggctttcgccatcggagaatgccacaaacgcggcatggaactacatgcatggattgttacgattcctgccggaaacacccgtcaagtacaattgcaaggacgtagctccgtagtacggaaaaaccggactatttgcaaactttataaaggtaactggtacttggacccgggaaatccgggaaccaaagaatatctgtcatgcatcgtaaaagaaataacttcccgttatgatatagacggcattcatttcgattacatccgctaccccgagcaagccgacaactttcccgacaaggacacctaccggaaatacggcaaaggtaaggagttgaaacaatggcggcgtgataatatcacagatattgtgcataggctctataccgacatcaagactatcaaaccctgggtgaaagtcagcagttcccctattggcaaataccgagataccaaccgatatccctcccgtggatggaacgcttatcatgtagtttaccaagatgctcagaaatggctaaaagaaggtattcatgatgcgttgttcccgatgatgtattttcagggaaataatttctatccttttgcattggattggaaagagaattgcggtaaccgctggatagtaccaggtttgggcatttatttcctctctcccgacgaacaaaattggccgttggacgaaatagtccgccaacttcatttcacccgtcagataaaactaaacggacaagcctacttccgcaatcgttttctattgaacaacaccaaaggcatttgggacgaactccaagagaatttctataccactccggcattgattcccccaatgacctggatggacagcatccccccatccactccggccatgccttccctgcaactgttgccggacggcaaaatgcacatgagctggcagatttccacagataacaacggaggtcttgtcacctatcatctttatgcctcggatacctatccggtagatatcacagatgccggaaacttactggaaacctatctcacccatacggaatacgaatatactcctatttcaccttggcgacaaaaacgttattttgccgtaacagctgccgaccgttttggaaacgaaagtgctcccttggaactgaatgcaatttcagaaacggacatgcctttactaaatgacggagatattctcaccctgcctgaaataaaagaggcaaagacagtgaaaatatttactgttaccggtgaagaaataaaatattttgtttatgcaccccaaatgtccatagcctcattacccggcggattctatacagtatatatcttgaataatgcaggagcacaaacctttgtcggaacaatcgtaaaataaacacatagcaaaaagtaaatttgggcaaagcgtagcgaagtacattcaaagtgttattctacgtgaagaaaggcagtgccaaacccaacggaaacctgcctctgatgtgttgtatcacggtggacgcggaagttgtaacaaaatactcaaagatataagcatacaatgcggtttcaaggttcgtttgacctaccacgtggcaagacattgtgcattgtctttatcgctcaaattgaatgggttgcaaagattggcttcttgataggtaacgatttagaaacgagcgaagttctgtattctgccttgttaaacccaaagaacgctgacttcaaatgcaaaggtagtggattagtttggattattatcattcttgtcctttaatcttttgatttctttatcaaaatcactttcaagcaaatccatttcgcgtttgcgatagatggcaaattccttttctgccttttcaatcgcctgtttatgtgaaatacgtcccttatcaatcaaaacctttcgtttatgggtaataatctgattatccaatgcctctatccaatctttcatggtcatgggattcatttccaatgcctggaactcggcaaagtccaagaaaccggaaacaagcagattcaaacgctggagttctatttctgacaaatagttcttggcaatcttcacatcatccttagtcacatagttgcctttgaagttcgtcatacccacaaacggcttctcattatccacacgattgtagataacttccgctgccgtattttcgtgaacggcataatggagcttgttttgcacggtggcaaaaaacatctttgtcatctcgtcccgtgggtcatagtccgtggctgtggcatatatgtccgtaacctgttgatagaagttacgttcactactacgaatatccctgatgcgttgcagcaactcacggaagtaacgattacccccttgcttcaaccgctcatcatccatagcaaatcccttttggatatattcatgaagccgttgagtcgcccaacggcgaaaacgggttgcaacctgagattgcacacgatagcccaaggcgataaccatgtcaagattgtaatggtcaatgttacgtctcacctgacgattgccttcctgacgaactaacaagaatttcttgttagttgcttctgtgaataattctccgtctttatagatgttatctacatgttggctgatattctgttgtgtagtacaatatatttccgccaactgattctgtgtcagccacaaatcttcatcggaaaagcgaacagacacacgtattatctcattatcgtcttgatagagtattattttgttattctcactcatgattagcgattgtcttttttcttggaatttgaacgataaaggctatcagtgatgatacctctaaatatatcttcattaagaaattctaaagtacgatttagctcaacaacattattggtcggtaacactaactcattgttcccattaatttgtgcattgattccatatttctttaaaagacttgttttcgttcgaaacgtctttcgcataaaagtagcaatgttgtttgtgctagataataattttatgagtcgacgagtttttatgtttgcgatatgttttatattctctgcatttacatctataccttttatttcgccaaatgattcaatttctgtatttgtggcttctgtaacaaaatctattagcgaaaatatttgatttgcaattgtataactttgaaagtacaatttcccattttcatatattgcatgaattttatcttctacgataaaggcagaagtattcattttagcaaaaatgtttccatgctcatcttgcagttggcttcttgccatgtctgtaaggctgatatagtcttcttcattgtatttgacaacgctaatatctgtattttgaacggtaatttttgccattgtaattgatgcattgagtttcaatcacaaagatagctataatttgtgaggttgcattctttttatatggactatctacaaagataggatgcagttttttttgatagtaggcattattccccgaataattttattaactttataaatgcaaagagttatttgacagcatagcaccgcaaatcgctgatattcgcacggttgctaaatcgttacctctgtttctcaaatactacgctaaaagtttattcttcaatcggttgcatcaaactgatgaaaatctaaaataaaatgcaaactgcttctttggcatgacacattatgtcgttgcagatgcccggctctcaaaaagtttgtctgccgggcatatccatctttgtcgttaagttataatctgataaaactttacgtactgttattttttgtttccgcactgcaatgtttttgtctcgccaccgtatcatactgatatacaacgacatgaagtgacagaattttctgtatccccacaaagtgtttttttcgtttttccttgtagaagccagcttgtcagatgccggttgtcatattggatacgtaatcctggtatatttacggcagtatccgtgcaagaagagtgcaccatctgtaccatcacccagatgaacaggccctgtcattcgggtgaatagccgttgtcacctgtgtgaaactgccgcttcacacaggtgaagcaataaagccataaagctgttttcatggtaacatactgccggcaaggtacatctattggagttttgccgctatgggtatggtgggcgcaatgtggtacattgaccggcgattaccaaccgtttcggggtctttacagatattttcacaccggaacatactgataattaagacgatgaggtgacgggggaattttatatttcacgttaaattaggccgtgttttcttttatagtctttaagatctttgatatggatggggggggtggtggtactatgcgtctttctttataacgctatattggcaaggcattgtaacatataaatagtgtatgatattaatgcctgttcgatatacatattaaatttactcgtctaaaaaataagagcatagcaataaatctaaaacaggaacggcaataatatgggaacagaataaatcccttctcctcttttattttcataaaactcaaggctataagcaaaataataactatttttgcacattcaattgaataaaatatataactcatgagcaatcaacgatacatgcagcgcggtgtgtcagcatccaaggaagatgtgcacaacgccattaagaacattgacaaaggtatttttccgcaagctttttgtaaaatcatccccgatattctaggcggagatcctgaatattgcaacattatgcacgctgacggtgcaggtaccaaatcatcactggcttatttgtattggaaagaaaccggcgatttaagcgtatggaaaggcattgcacaagatgcactgattatgaacatcgatgacttgttgtgtgtaggtgcagtagataatattctggtttcatcaactatcggccgtaataagctactcgttccgggtgaagtcatttccgctatcatcaacggaacggatgaactgttggccgaacttcgcgaaatgggtgtaggcgtatacgctaccggaggcgagactgctgatgtaggtgacttggttcgtaccatcatcgtagattctaccgtaacatgccgcatgaaacgtaccgatgtcattaacaatgccaatattcgcccgggtgacgtcatcataggtctggcatcttacggacaggctacctatgaaaaagaatacaacggaggcatgggcagcaacggactcaccagcgcccgccacgacgtgttcgcaaaatacctggccgagaagtatcccgaaagctatgacaaggcagtacccgaagaactagtgtacagtggcaatttgaagctgaccgatgctgtagaaggaagtccgctggatgcaggaaagctggtactctcacctacccgtacctatgctccggtagtgaagaaattactggatgcgctccgacctgaaattcacggaatggttcactgctcaggcggtgctcaaaccaaagtcctgcactttgtaggaaacaattgccgtgtagtaaaggacaacctgttccccgttccccctctgttcaaaaccatcaaggaacaaagcggcaccgattgggaagaaatgtacaaagtatttaatatgggccaccgcctggaagtttacctctcacccgaacatgccgaagaggtgatcgccatcagcaagtcattcaatattgacgcgaagatcgtgggacgtatagaagaaagtgacaagaaggagctaattatcaaaagtgagtttggagaattcaaatactgacaagcaatattataataacgcttccaaacctgctacattgaaaaaaagatttttttatggcataggagcaataatatgctcattagttacgattgatacaatacgcgagttgtatttcatctctaccgcatggggtcatgaaacaacttggcatgacatactatatacagtaagaaaagtacttgccatacttgggtggatattactcacttggtatgtcgcaaataaatgtttagaaaagaatggcagaaaacaataatacattacttgagaaattagacgggttagtagctcgctttgaggaagtttccaccctcattacagaccctaatgtcatagctgaccaaaaacgttatgtcaagctcaccaaggaatacaaggacttgaatgacatcatgaaagcccgtagagaatatatacaatgcctgaatggactggaagaggccaaacaaatcatgactaacgaatccgacccggagatgaaagagatggcacgcgaagaggcaaatctctgcgaagtccgcatcccagaactggaagaggaaatcaaactgttactcgttcctgcggatccgcaagatgaccgaaatgccattctggagatacgcggtggtacgggaggtgatgaagccgccatttttgcaggcgacttgttccgtatgtactccaaatactgcgagacaaaaggttggagactggaagtatccagcgccaatgaaggagcagcaggaggttttaaggaaattatctgctccgtaaccggagataaagtatatggcactctgaaatatgaatcgggcgtacatcgtgtgcaacgtgtaccagccaccgaaacccaaggacgtgtacatacttcagccgcatcagtcgccgttttacccgaagccgagccttttgatgtggaaattaacgaaggggaaatcaaatgggacactttccgaagcggtggtgccggcggacagaacgtaaataaggtggaatccggagtacgcctgcgctacaactggaagaaccccaacaccggaatagtagaggaaatcctgatagaatgtaccgaaacccgtgaccagccgaagaataaagaacgagccctttctcgcctgcgtacctttatatatgataaagaacaccaaaagtacattgacgacattgccagcaaacgaaaaacaatggtatctaccggagaccgatcggcaaaaatacgtacctacaattatccgcaaggacgtatcaccgaccaccgcatcaactataccatttacaatttggccgcctttatggatggcgacattcaagactgcattgaccatttgactgtagccgagaatgccgaacgtttgaaagagagcgaattataatttaaatatcgtaaaccataaactgtaaacatagcaatgaacaagcaacaattatttgaaaatatccaaaagaaaaaatcattcctctgtgtaggcctggacaccgacataaagaagatccccgaacatctgttaaaagaagaagatcctatcttcgctttcaacaaagccatcattgacgctaccgccccttattgcatcgcctataaacccaatctggccttttatgaaagcatgggcgtaaaaggatggatcgctttcgaaaagactgtatcctacatcaaggaaaactatcccgaccaattcatcattgccgatgcaaaacgtggcgatatcggaaacacttcggccatgtatgcacgcacattctttgaagagctggacattgactcagtcaccgtagctccttacatgggtgaagacagcgtgactcccttcctgagttacgaaggcaaatgggtaatcctgctagcgcttaccagcaacaagggttcccacgacttccagctgaccgaggacaccaacggcgaacgccttttcgaaaaagtattgcgcaaatcacaagaatgggccaacgatgaaaacatgatgtacgtagtaggcgccacacaaggacgcgctttcgaagacatccgtaaaattgttcccaaccacttcctgcttgtacctggaatcggcgcacaaggaggttctctagaggaagtctgcaaatatggcatgaatagtacctgtggacttattgttaattcaagccgtgccattatctatgcggataaaactgagaattttgcgactgtagcaggacaagaagctcagaaagtccaggcacagatggagaaaataatgtgccaataaaacaatgtgctaatatgcaaattaccaggtagatacatagcgtaatacattggtttaagcatatcagcacactgaataattattccccatgagtgaccgaaaaattataaatgaccccgtcttcgggtttatcaacatcccgaaggggttactatatgacattgtatgtcacccattgctgcaacgtcttacccgcatcaagcaactgggcctgtcctctgccgtatatccgggagcacaacatacccgtttccaacactcattaggcgctttccacttaatgagcgaaacgatcaagcaccttaccgccaaaggtaacttcatctttgacagcgaagcggaagccgtacaagctgccatcctgttacacgacatcggacacggtcccttctcccatgtgctggaaaacacattggcaggaggcgtttcacatgaagaaatctccttgatgctgatggaacgaatgaacaaggacatgaaaggtcaactcaatcttgccatacagatattcaaagatgaatatcccaagaaattcctgcaccaactggtcagcggtcaattggatatggatcgtttggactatctgcggcgtgacagtttctataccggtgtatccgaaggcaatatcgggtccgcccgcatcatcaaaatgcttgatgtaaaagacgatcacctggtagtagaatccaaaggcatttactccatcgaaaacttcctgatgtcccgccgcctgatgtactggcaggtatatctgcacaagacctccgttgccagtgaaaaaatgctggtcaacactctgacacgagcaaaggaattagccttacgtggcgtagagctgttcgcctcacccgctttaagattctttttataccatcctattgataaaaaagaattttataacagcccggattgtcttgaaaattttattcaattagatgataatgacatatggactgcactgaaagtttggagcaatcacagcgatgtggtattgtccactctgagtcgtggaatgattaacaggaaactattcaaagtagaggtaacctcctcttccatcacaaaagcacgaaaagaagaaattcttttaagaataagtaatcaactgaatatcaacaagaaagaagcaaaatacttcttatccatatccagtatagaaaacaatatgtataaaaaggaggatgacagtattgaaatcatctataaagatggaagcacccgcgatatagccaaggcttcggatatgctcaacatctctcttctctcccgaaaagtcaaaaaatattatatatgttacctgcgttccgaaaacgacggacattaaataattagcgaattgtacggatatataaaaaaaaaatgcgtaatttgcataattaatgatgtgtttacactaacatgtaacacgcaagtaacaaaactgaaacatttagaacataaagaattagacagtattatggagttctcagctaaacaaattgcggaatacatccagggaattattgttggcgatgaaaacgcaactgtgcatacttttgctaaaatagaggaaggcgtgccgggagcgatttcttttctttcaaatcctaagtatactcattacatttacgatactcagtctaccattgtgttggtaaacaaagatttcgttcccgagcaagaagtaaaagctaccttaatcaaggtagacaacgcctacgaaagtctggctaaactactgaccctctatgaaatgagcaaacctaaaaagactggtatagatccgctggcatacgttgcccccactgcgaagttggggaaggatgtatatatcgctccgtttgcctgcgtaggcgatggtgctgagattggtgacaacacttccctccacccgcacgctactgtaggaagccatgccaaagtaggtaataattgtacactttatccacatgccaccatctatcacgactgcttggtaggaaaccactgtaccctgcatgcaggctgcgtaatcggtgctgatggattcggattcgcaccttctcccgaagggtacgaaaaaattccacaaataggtattgccatcatagaagataatgtagagattggtgctaatacctgcgtagatcgtgccaccatgggtgccaccattgtacataaaggagtgaaactggataacctgatccagatagcacacaatgtggaagtaggaagccacactgtcatggcatcacaggtgggtattgccggttccaccaaagtaggcgaatggtgcatgtttggcggacaggtaggactagccggacatattaagataggtgacaaggtaggtatcggcgcacaagcaggcgttcccggtaacgtgaaatccaacgagcaaattctaggcactccggccatcgatgccaagaatttcatgaaatcatcggccgtatacaaaaaactgcccgaaatttacaccacactgaacgccatgcagaaagaaatagaagaattaaaaaaacaactaaataaataaaccccatgttgaaacagaagacattaaaaggcagtttttctttaaatggaaaaggccttcacaccggagtaaacttgacggtgacattcaatcctgcaccggacaaccacgggtataaaatccaacgaattgatcttgaaggacaaccaataattgatgccgtagcagaaaacgtaggtgatactacccgcggcactgtgctgatgaaaaacggaataaaagtaagtacagtagaacatgctttggcagctctttatgcagctggtatagacaactgcctgattcaggtaagcggtcccgaattccctattctggacggcagtgccaaagcgtatgtagaaaatatacagcgtgtaggaatcgaagaacagaatgctgtcaaggattactatatcataaaatcaaaaatcgaattcagggacgaggaaaccggatcttccatcattgttcttccggacgaaaatttcagtgtgaatgcactgatctcttatcagtctaaaatactgtccaatcagttcgccacactggaagacatggctaaattccccaccgaggtagcttccgcgcgtacctttgtattcgtccgcgaaatagaaccattgctgggtgccggactgatcaagggaggcgatctggacaacgccatcgtaatctacgaaaaagagatgagccaggaaaactacgacaagctggcagacgtcatgggggttccccacatggacgccaccaaactgggctacatcaaccatgttcccttggtatgggacaacgaaccggcccgccacaaactgctggatatcatcggcgacctggcactgataggcaaacccatcaagggacgcatcatcgccacccgtccggggcataccatcaacaacaaatttgcccgccagatacgcaaagaaatcaaacttcacgaaatacaggctccgtcctataactgcaacgaagctcccatcatggatgtcaaccgcatccgcgaactgcttccgcaccgttatcctttccagctagtggacaaagtcgttgccattggcgccaaccacattgtcggtgtgaaaaacgtaaccgccaacgaacccttcttccagggacacttcccacaggaacctgtcatgccgggtgtgcttcaagtagaagccatggcacaatgcggtggtctgcttgttcttaattcagtggacgaacccgaaagatactccacctacttcatgaaaatagacggtgtgaaattccgccagaaagtagtgccgggagacactttattgttccgtgttgaattgttggctcctatccgccggggcatctccacaatgaaaggatatgtgtttgtaggcgagaaagtagtctgcgaagccgagtttatggcacaaatagtaaaaaataaataaccactaaaaaaacaacatgattagtccattagcatatatacatcccgaagcaaaaattggtgagaatgtagaaatcggtccttttgtgtttatcgacaagaatgtagttatcggtgataacaacacaatcatgcctaacgccaatatactgtatggctcacgcatagggaacggcaacaccatttttccgggagctgttataggcgctattccccaggatttgaaattccgcggtgaagaaacgactgccgaaataggtgataacaacaccattcgcgagaatgtaaccatcaatcgtggtacagcggctaaaggcaaaaccatagtgggcagtaacaacctgttgatggaaggagtacacgtagcacatgatgccatcataggcagcggttgcatcataggcaatgccaccaagatggcaggtgaaattatcattgatgataacgccattatcagcggcgccgtattgatgcaccaattctgccgggtaggcggttatgtaatggtacagggcggttcacgtttcagcaaggacattcctccttatattatagcagggcgcgaacccattgcctacgcaggaatcaatatcgtaggactccgccgccgcggattctctaatgaactaatagagaatatacacaacacctatcgcattatttatcaaaatggcatgaacgttaccgatgccttggaacaagtacgcaaagaaatacctatgagcaaagaaatagaatatattatttctttcatagaaaattctcaaagaggtatcatcagataacaaagttttttataactttactgcacgaaaaaaaagttatatagtatatacagtataaatatatgatttacagatttacactaatctctgatgaagtcgatgattttataagagaaataaagatagactcggaagcaactttctttgatttgcacgaagcaatattgaaagcggcaggatataaagatgaccagatgacctctttcttcatttgtgatgacgactgggagaaagaccaggaaatcacactggaagatatgggaagcagttcggaagaagacagctacatcatgagagaaacccgcttgagtgatttggtggaagatgaaaagcaaaaattgctgtatgtattcgatccgttggcagaacgagtgtttttcattgaactgtcggaaatcatcaccggcaaagaccttgacaaagcagtgtgttcgcgcaaagccggagaagccccgaaacaaaccgtcgactttgacgaaatgatggcaaaaagcaatagcggaaatctggatatagacgagaatttctacggcgaccaggacttcgatatggaagactttgatcccgaaggatttgatatgggcggtgcctcctcaccggacccttatgagcaagaaaactattaatcttaacgggggcggacgttacacgtccgcccctctctttttataaacaccatgcctgacacccttatcgtccttatcggccctaccggtgtaggaaagaccgaactaagcctttccattgccgaacacttccggacttccattgtttcggcagactcacgccaattgtatgcagacctgaagataggaactgccgcccctacccccgagcaattggcgcgtgttcctcattattttgtcggaacattacagctaacagattattacagcgccgcacaatacgaagcagacgtactggcacaactggaaatcctataccaaaaccatgacactgtaatactgaccggaggttccatgatgtatatagatgccatttgcaaaggcatagatgatatccccactgtagacaatgaaacacgccagctgatgctacgacgttacgaacaggaagggctggacactctgtgcgccgaactaaggctgctggaccccgagtattacaaaatagtggatttgaaaaatcccaaacgagtaatacatgcattggaaatatgctacatgaccggaaaaacttatacttctttccgtacccgtactcacaaggaacgccctttccgcatcatcaaaataggattaacccgcgaccgcgaagaattgtatgaccgcatcaaccgccgcgtggacatcatgatgcaggacggcttgctggaagaagcccggcaggtatatcctttccggcatctgaactcgctcaataccgtaggatacaaagaaatgttcaagtatctggacggagaatggacattggaattcgctatcgggaaaatcaagcaaaattcccgcatttactctcgtaaacagatgacctggttcaaacgggacaaagacatcgtgtggttccatcccgaccaacaaacagaaattatgcaatatattcattcagttaaccactaattacaatcatgaaaaaattactaaccttcatcatggcttgtgtcataagcctgggtgcaacagcccaaatctcggaaaaagcatttgagaaatggcatcagaacaagtattccatgttcatccacttcggtctttattccgaactgggaggcgtatgggaaggcaaccccgtcacccgaggatacagtgaacaaatccaatcgtttgcgggaatcttcagtaactggtatggagataccgccctgcgtttcaatcccaccctgtttgatgcagacgctatcgtgtcactggccaaagaagccggtatgcgctccatcatcattaccaccaagcatcacgacggtttctgtatgttccgtacagccaccaccgactataattcatacgatgccacccccggcaagcgcgacttcataaaagagatggcggaagcttgcaaacgtggcggaatcaacttcggcatctatttctcactgatagactggcattttccacaagcctatcctatctccagccataactgtgatttcatcaccccacagcatcatgaattcaccaaagcccaagttaccgaactgttgaccaactacggtcccatctccgaactatggtttgacatgggttccaacactcctgaacaaagcaaggaactgtatcaactggtgcacagattgcaaccagactgtatggtaagcggccggttgggcaacgatcagtatgacttcagtgtcatggcagacaacacataccccgaaggctccttgcagaccgcatggcaaacagcagcttccatgttcgatgaaacctggagctaccgttcctggcagaaaaggggggacgttcacaccaaagcgatggaaaaactacgcagcctgatcaatgtagtttcccatggcggaaacttcctgctgaacatcggtcccaaaggtgacggttccgtagtaccctttgaaagagaggtgctgaaagaaatcggtatctggttgaagaaaaacggtgaagccatttatggcacagaagcctctcctttccgtgagcaattcgaatggggaaccattacccgcaaaggcaataacctctacctcatcttatcaggcaaccgccctgccgatggtaaaatcactttgaacgtaccgggatgcaaactgcaaaaagcagacattaaagctattcagaaaggacaggagatgatcttcacactgcccgccgacgcatacggaaaagacatccaagtgatttgcgccacgttcgaccaaccggtgaaaccgcaacctatggctgcacagcgcactcccaattatagttattcctgtttcgattattacagcaactaccgcagtacggtgagctatcaatggagcatcaacaaatccaacctcaacgcattggaatttacctatactccgcaggagaacggtaaggaattactggttgaagtagatggaacaccttacacagtaacccttgacgcaggcaaggcacaggcattaaacctgccttccaagaccgtatggggtcagcgttacttctgcggaccgggcagcggattgttcgatgctcctgccaccatccatactgatccggacaaagcaccggtaagaaaaggacaatggaaagaagtgaatgaggaaaaagccatgttccccagcaatattctggaaagttacttcctgatgcagcaggtagaatcgcccaaagcacaagatattctagtagatgtaggtgccggaaacggtatcgaaatctatctgaacggcaagtcggtaatgaaacacctcaacccttaccgctgcaagttccgcgaggaaaaggtgctgctaccgcttcaaaaaggcagtaaccaaattgtggtaagaatatacaaccgctttgaaaaagaaacaggctatctgctgcgcccatcagcggaacaggttatctacaagcagaaattcactttgccgcaagtggcaaaaggaaaagttcatactgttgttgtaaaacaaaataatctgccatccatccataaggacacagaattatccaatctgaaggtagaggcaaaataaaacttttcaataaataaaaaatgaaatacctctccccggatgtttctgtcatgaaatgtccggggaaagttttatataaagaaaacatcattctagaatttaccaatagtactgacaggcctcatgcatgaagatcataatattcataaagtacccttcatacagtctgttccgatattatgctttcctcctgtctgcctgataattcagaattacccccagtactatcagtacagaaagtacaatccatgcaacattcaaaaagattcctttccattcctgccgggtaatgaactgtgaatacaaaggtcgtataatcggagcttgaggatggtggagtttacagcgggaccgatcaatggctttctgataatcatctaaatcaaaaatacaacgctcataacatacaacggcttgtcctttctcatgcctcaccggaataacccatgccttaacttcccgctcctcatacttatgacggggcaatgaatcggtaaatgcaggagctacagagaaatgatattgcttctgttccttacgatagcggtgtctgcccatacttcgtgtcacctcacgagtgacagtcacactgctctttcgggcataatccacctccagagtatcgaaagtaaaatacagagcattattctccaaattatataaatcggtaacagcatgataacgcaccacttcatctgccgaatgaaaaagccagttctgtaaaggaatattaaaggccatacttgcagctgccatcaatataagaaaaggaattttccatcttgaagcaacgataaaagcccctccggcgagagtgagtaacggaggtaaagcatacgtcgtaatttgtaaccagccccccggattaaaaccaagagcaacagtgaacaaaattcctgctaaagaaggaatgaaaagtaataacaatagcttaacgacccagtttttcattattcaatattagttttgtcttgccaaagatagtaatataaatccaaaaaaagaatctgtaaatgcttacagatccttttccactttattcttgcaagacaaacacggtctttatttctctaatgcttttattaattctctttttacggtatccactcctgggaaaccggtgtatttttgaataacacccccttctttatcgacaataatataagtcggaaccccctgtatgctgaactgcctgctcaggtaattccactgagctgccgttacccggtaatgctctccatgaatatccggaatcatgttatcccacgtttctttgggcgagttctctccggcaataaaaacatatacaatatctttaccttcaagatctttcttcatcggtttcatctgtttcatagccattttgcaaggaccgcaccaagtcgcccaaaaatcgaccaaaaccaccttacccttaaatttagaaatgatggaataaaataaatcttcatcttttacttctccggattcattaacggtataacccttctttttcttattagcttcaatcgtttccaaaagacggttgttcatctttgtcagtctgccgagataataagggtcactcatcttccgtatctcctcaaaatcatgtacagtcaatggagtgaagtcactgattttctgagcatatttcatcattttctgcaagtcgaaaaaaagtccttggtctgtgcccaaatatccggctataatctttttcaaaatatagtcttgctgcatagaactgaattctttaaacaattcatcgtattttattcgcaattcgcccattttttcctgatagacagatgtttttccggtatctgtatcagccttgaactcacgtattatcttagcatcttcagcagaaactttatcggaagagagaataaacgcaaatatatcactcaactcatcatccatcttcaccctcagatagcccattccccttaccaaatcagcataaccattggcataaagcatgacaggcgagttcagtatattcaactgccggatatagtcatagaaatcatcactcaattccggttgtttaaacttttgataagcttcacgagccggtaatccactgcactgcacataagcataggctaaattagaacttacacgggtcaatgtcaaagtacaaagcaaatcattctgagccaataaaagctcccggtatgcctgacttcttttcttatcggaacagatagcggatttggtttcttcatattttttcaaccaataagctttatactgaccggcagtcatattatataaatcattcatattccaatgaaccattccccatacatccatcaaatgttcatcatcggttatcatttcatcattcaaagccgccatggtacctgaaaaatagactttctttccaccagcacgcttgcctttcaacaatttgctttcagaacgactcaactcacgcaagttgacagccatatccaattcaccaccgggaaccaaaaagacgtcaaaataaatatcacgtcccacagaaaaactgaccgtagtcggagcacaaagttcaatctctgtccgaaatgttccgtcttcattcacctttatttcagtatcctcaaattttgccgtcaacaaatcacaaatcctacaagaaaacggaagtgcatagtgcttctcatagtctaacaaacgaccggttatcactgatttgccatctttcaattcagccttaggcaacggttcagcgtaattcaatttctgtttcttcacatcatccgataaatccaattccggtaatttaccatccaaatggattccccataccttgaaacagtcctcacaatcgctctcaatgaaatcaatcactttcactgtagggggcaataacggaaaaataagactaaaagaagcttcaccgctatcgggcatccaaaatttttcgcccaaggtaattccattaccggaacgaatcggatacttctctccattatcagccaacaaataactttcattacttatctgaatccaattatgaggacggaaaaaggcttttacatccaatacggttgccgtatccgaaaccaccactctgtctatctcgatagtagaagagctacgagcgatgaaaggcggctgtttaaccaccctgtcttttgcctgcaaaaggcagcaactcaccatagcaagcagtaaaataccaaagtttttcattgtatcttttttttaacatacttacttatttcccaagttcctatccaaaagattctttacttcttcgtatgcctttgtatatccacgggccaaagtaataccatccggagagattaacataagaatgggaactcctgaaaaataaaggtctttcactataaagccgttgccctcatcctctgtgtaaactgtagtccacggatggcttagcaatccctgtacccgttcatctttcttaaactcttcagaacttccctgcaacgatttcaacaaatcatcacgggtaaatcccaatacctccaaacctttttcatgatatttttgatagagatccgttattttaggatttacccaaaaagtaccaggacataatccccaatgataaatcaacacatatttgcctttataatcagacaaagacaccttccggccgtctttatctgtcactgtaaactccgctggcgcaaagcctacttcaatattcttcaatacaagcaattgcttgtcaagtatttgtccaaaatatgaattttgaacctctggagtaaattgtgccaaacgctcttttacatccttataagtagcatcaaaaacaaaagcggatgcatacataaaagcggcatattccatatcgttcactttcaatgccagactatcacgaacagtcttcagcattagcggacgatgatattcattatacatttgcccgtattttgccacactatcattttgctttgtatcctgatatttcagtatctgactgaagatatcaatcatttcagtattggaagacgcagtcaggctatcatacctagccaccaacgaattgtcataaaaaccacccgaatgacgaaccgcacccaagtaatccaaagaccctttcagttttatatcatcacctacgcgagctataatctcagctccgcgaatacaactccgtaacggttcacccactttaggctgatgcgtcaataaataaaaagtagtatgttccataggaataaaagccgagaaaatcccctccttttccaccaatatggtatctgtcccgtcttctttccaatcgggtaataaaaaagttttaagaaaaagagtatctccaacctgaagcccttccaaatgaccggatagtttaaagccatcggtctgcatagtttgccggcatgacactagagccactgcaaagagtgccaaagctaaaattttcttcatatattcttacttttatataaatgacttccgttattttgcatgacgaagtgccaacgtatcttttttctctacaggaaatgactttgtcggaatatcacctctaaagaaaccttcctcctttatttttttgatacgtttccatgcctgctggtaaagtgttatgcggtcttccaccgggttcccgtcttcgtccaaggcataacgctgatcttcgggaactgtagccatgtatttcctataatagcgaatggcattcttctcatcttctttccaatcatagagacaggctattttataaagaatggagtttttctttgtataaatatataacttctccaaggcttccacctctttctttgtatcccccgcataatcgtaacattctaccaacccgtcataaagacgtaccatcatactatcagaaggaacggctatgcggaaggcttcttccatatattccacaccctcctttttccaggaagtgcgtgccgaagcttttgccagataatagagcacattcacatccatcggatttttttgataagcttctttcagattatcgtatgcaccgtaaaaccagttatccccataatgggatacacctaaatagtaaagagtgagaaaactacgatcacccagttcttttaatgactcatagcgttttaccgccgttccgtactctttcagcatacaataagccttcgcattctggcggttcacatctatattggtggtatcggacaaacgataaacttccgtcacatcaacagcatctttaaactgctgattgttattaaaaataccggcaatgcgtgccactgtctgggcatccaacgaatcacgccgataggctatgttataactgaggaaggcactggcgacatcctgcaatccctcgtatgcctgtcccagatatttgtatccggtagccgacaaggaatcgcgttccaaccagccatgacaagccgtacgcgcttcttcataatcttcggaagctaataaagagcgtatgaactgcaaccggaaaaatttattttccggttgcaaattcattgccttctgataacagttggccgcccgacgggagttacccgtcaatttgtaacactcggcaaggtcgatcaaaacttttgtgtttgtgctgtctttcaagataagagagttcaatacccctatggcttccggataacggttcatcgctttcagcgcctgagctttggtaatcagcaataaagaatcctggcaatcgggttctatcagcgtaactactgtctcataatcataattatccattgcctgacgaattccatcattcacctgggcaaacaacgaaacggggagcatacatagcagcagtgttacaaattttttcatatctttattcttattgtttctttgtggtaatcaatatcacgccattcttggctttggctccataaatggcagtacctgccgcatccttcaacaccgaaatagattcaatgtccgaagcattcattttttccatttgactataaggcttttctatcccatcaactataagcaatggtttctccttccaatctttcaacgaaaaagtttccttacctatccgcaatggattttcttgaaaaacagtgtctgtcttcaactccaaatgacgtgcttcatttgatttggtatctttaccgtctagtctgaaagtgacgggaaccgtatatttcacacgcacaggctggcctttctgcatacccggtttccatttcggcataatggaaatgactcggatggcctcaccgtccaaatccggatcaatgctcctgacaactttgggattggctatattaccatctttctcaactacaaattgtacaataacctttccctgtactccagctttctgagcctccactggatatttgatattcttccccaagaatttcaaacattctcccataccacccggaaactcaggcatctcttcaacaacctgaaaaaccggaacttcatcagaagcttcttcaccacctccataacctactacaaccacttcctgtgtcttagttgtgatttctccctccaaatacacttttaaagatttaatttttccaataagtttctctgtaatagtcaattcctttgttttcatatttatatatgaaacactcaaagtagccccaacaggcattgaaataacaaaatttccatctaaatcagtgatcgtacccgaagtggtacctttgataatcacactagcacctacaaccggagcatttgtacttttttctaatacctgcccttgcacttttatttcctttgcaggatgtttttcgggacttttaacctcttcggttttcataattgccgttaaatcattaactttgatggctgaaatctcatctaactcactagagatttcggggcgggcaaaggctgccacggcaatggctgccaatggaagcacatacaggtacttgagtcgtgcccacggattggatttcttttttaacatcatagtaatacgttttttaagtgaactgtgattgaagctgttggccatagagtagagccttgtgccgacagctttttttattaataacaactgatatttctttgcatcaataccttgtgcaatcacgctttcgtccgcttcgaactcgtgtatgttctgtagttcctgtttcaataaccaggaggcaggattgaaccattggaaaaagatgcagatatccgctataagtaaatctatggaatgtttcttccgtatatgggcgtattcatgcgtcagtatttcctcaccgttttccttcaggtctttctcagagatcactacaaacttcatccaactgaacggagcgatttctttttggtgggttatcagcatgataccattttcctgacggacaagggtgctaccctttatcagcctcagcatacgggtcagcgaccatacattacgtaaaaagaagaatacaatacccaacaaataaaccatcagcagcgcttcacgccatgtaatggcagatacgggagcagcttctacagcgacagtctgattgagatcggccataagcaacagttcttcccacgtcagcaagtgctgactgacctccatcggttctttcatggtcacttccacaaagggaatggcacaggacaatatcagtattcccaacaaagcaatacggttaaaacgatggaatgtttcacggctcagcaacaggcggtaaaataaataaaataccgccagacagactgccgactttacaatatatacaaaaaatgctcccatagtatgtatctttaattattctctttatccggattattcatgcgccttttccacatcccggataagctgcttcaattcatccaaagaaatctcctcctccttcaccagtgaagaaaccgctcctaaataagagttattgaaatatttactgataacccctttcaacgtcttcttcttaaaatcatcacagcttaccaccgcataatactgataggtatttccaaatacctcatgactgagaaaccccttttcctccaatcctctcacaatggtagacagagtattgaaatgcggacgcggttcatcataaaaatcaagtaactgttttacaaacaacgggcctttttcccaaaaataacccataatttcttcttcctttgctgtcaacattttcataatctttcttttgattatcacaaagaactaaaacttttagttataaaactaattttcatagttaaagtaaactaaaagctttagttacctgctgtaaaacagtatatcccgttttcacctgctgatgcaaacgggatatacttatcataaataatccacctataaggagactacagatctctatatacttatacttccctgaacaatctattattcgtcaatgaccggtttattttccgtcagccttttcaaacggagaagtgcctccatataataataatcagcataaatgatggatgcatcaatctctgctccggcaggcaagtgtcctgtggaatgaagcaggaaagcaggtttacttttaccacactggtatttgtcggaactcaggctggtcagcatttttacagccgcctgtttatattccaatgctttttcagccggcagataaccggacaattctaataaagcagaagctaccacacaagcagcagaagcatcccggggaacatcaggaatggacggatcattaaaatcccaataaggaacataatcttcgggcagatttttcagatatacatccgtaaccttttgtacaaaatcgaggtaacggacatcttttgtttcccgataaacgactgtataaccatagatagcccatgcctgaccacgagcccacatactgtcatccgaataaccttgatgggtcactcccttgataaattcacctgtcagggtatcatacactgctacatgataagaggtataatccggacgaaaatgatatttcatcgtcttatccgcatgagccacggcaatgtcaaacaaataaggattacctccattcttggctgcccagaaaagtatttccagattgatcatattgtccatgatggtattatgaccgccaaacattttcacattgcgaggccatgaaagcatagtacctacacggggattgaacaatgctgataacgaatcagccgtattgattataacttgcttatattccggattaccggtcagacgataaccattaccatagctacaaaaaaccaaaaaacccaaatcatgatcgtatgcaggaatctccgagagaaatttcaaagaagcagtaaacttttcggcctcttcctttattttcggatcttgtgtatattcataatcataccacaagatgcccggccaaaaacctccgcaccattcttccttactcactttacgatagttccagtcatactggccatccattatgttacgaggcatcatagtgtaatctacctcccgcccttttccatgcataacctccaaagtacgatgtacctggcgatcacaatattccaaagccctgttcacctccagtttgttgtctacttcagtacaggctgaaagtagacataaccctatacctactaatagattttttgtattcataattatcctttctttttttacttatcgatacgaaaccaatcggcatctacccaacctctttccttgccataaggagctgtgctgaataatcctactttcgctcctatccacttaccttgacgagcagtaaaaggcacaccggccaatgtatatttcctgccgtccagactgtagctgaaataacagatacctcccccagttactttcacctgcaaataaatatcacgctcataattgggatagagcccggctccgaaccagcggcttacaggtaattccgcaagatgggtcactgtttcaggagaccgttgctccgcatccttgcagaccacttgattcaatataaacttatcaccttcttttactacacccagatagccataatcccaccccatcactatcagtccggactgctgtccgtccgctttcgcagaaactttcagtttggcagtcgccgtaaattcttcggcagggaatttttgtaacaagagattcggcacctcccaaaaatttacaaaatccttggacaaaatatgtccatatatacgaatgtaacccaaatcagaggtaaagccaaacgtatcctgataattggcatgccattcccattgcaagcccaattgccttgtgttgaattcatcactctcaatcggtgtctctataggataaatcctgcctacatccggttttttatagcgttttacaggttcgccgcatccatcaccgtccttgtcctccccaattacgggccaatcattttcccacttcacaggattcaagtgcaagactctgccatacatggctttatcttgaaaattgataaaccaagactcgcctgtacaggtttccacccatcccccctgatgagggccatttatgtccgtatctccttggggcataacaatttttgactcgtatgggccatacacattgcgagagcgaagtgccaattgccaacccgtcaccacccctccggctggtgccaggatgtaataatatccgttgcgtttataaaacttaggtccctctatagtatgatttacaccatcattgccatcaaaaaccaatacaggttcactaataacttttgtaccttccgcattcatctcacaaaccgtaatcacactattgaatgcggcgcgactgcccgcccacgcatgtaccaaatacacttttccatcctcatcccacaacggagtaggatctatcattcctttcccagcctttaccaagaccggtttttcccattcacccagcggatctttggtctttaccatgaaaataccccagtcgggatctccccaatagataaaaaactcaccgttgtggtaacggatagaaggagcccataccccttttccatgttgaggagcgttaaagaaaatggtcggctctatctccttcaaggcatagtttgccaaacgccagttcaccaaatcctttgaatgaagaatgggcaatcccggggtgcagccaaaactggaagcggtcatataaaaatcatcacctacggcacaaacatccgggtcagagtaatccgcatgaataatcggattaatatacgtaccgtccttctgatcggacacccataccttcgatacatactgagcatctgcctgttgccatgcaccgcatactaaagccactataatcactatttttttcattcttacctattataaaaatgccctgaaacaatcattcttaccttaaaaaacatacccctttaaacttaaaaaatcacctaaccttcatttgttaacctaatctgtctataatacggacaagaaaaccaatacactcaacgaaagtggttatttttataatacttgtcctttatactttttatattcttttatttcctgatccgtcactggcacgagttgcatggccgcaccgcctcctggcttcaatgcaaactgcatgatttgagaggaatccaccaacagacgggtacatttcacctgagtacgggtctttatcttatctcccccatccgtataaatacgggccagataggtctttcccttatctaaaaatgaaagatttaccgattgagcagaaccttcattattagtcaaagctcctacaaaccactcattacccttgcgacgcgccatagttatatgcttacccggagcaccttccaatacttttgtatcatcaaatacggtttgcagattctcgaaccattctatttcgggctccccttgatagaatgaggggcggtcataccagaagatagtttgtaaaggactgtaaaaaatcaatgaagccgccaactgatgagcatgggtgttcttcagacgtttgtcgaaataacagatggtataatccgccgctccattaatcatacgggtaaaaggcagaatcgtattatgcgtagcgtcgggaaattcctcattcccccgtatcccttcctgagtgagcaagttaggataagtacggctgaaaccggatggacggaactcatcatgaatattaatcaacaatttgttttcggcagccagacgaaccatatcatgcagccaagtagcccaacgatgactggcatactgtacgaaaccggatttcacacctacaactccccacttatgcagcaatggaaaaagctcacgcatctgtttcatcagggcatgctgattgacatacacccatacacctacccctttttctttaccgtatgcgatgacacgcggcatgtccagtttggaaaccacctttgtggcatctccgtcatgagaagtacaaggcatataccattgccagtcgaacaacatataaggaatatgatgggcggcacagaaatcaattgtggctatggccccttcggtggtaatagtcgtttcacgcataatctttccgggcctgatccagtccgtatcggttatctcacaaggaggattcagattctggatgatatcattgtgttccagcaattctcccggtttatcggctgccatgataactttccatggggtggcgtaataagtgacaatatccacaggactgtacatgaccgaagtcagtgtattctgtttagtcggagaagctaccaatttagtaagacaccagtcatctacatcggcatcagtcaaagccacccacagcccgttggaaagttccacagtcaaagcccgttccaccggctgtttaatatcgttaatggcaaggtgctcaaaaggcgcttgcgcccattgctccgcccacgccatcgcaccgggggaaaatgtatattcagtcagatcccccaccactttatgaaaaatggcctgtggatgttcagggaaaaaataacggaaagcgatgccttcatcgtacgcacgcacttcaatattcaaacgataattggaaccgtcttttttggaaagatacatgattgcctcattatacgcctcgcgaaccgtactacgttctccatacagaggatgccaagacttgttgacagcaggctgatagatcacactatccacctccaaattatccatccaacattttacctgatttattttacgggcaagcgccagttcccaagtacggttatccagctgaagaccggcacgggagcttccgataacctctctgcctctatacttcacctgatatactatttcatttaccgaagaagaaattttctcctgcctgaacattacttcatgaactccctccggggacgtcaacttcaattctttagaatgacctgcataaagcgaagccgtacaggtcaacgcatatgctatgagtattatttttttcataatgattactttttaattagtagtacggatgaatcggaaaactcactcaacgaaaagaaaaataaaatctataggataaaacaattcaccgcagagacattcagcattagtccctgcggtgaataaggatgcacaaaaaaattataatttttgattgtaaccttcattcagttctttggtttcttttcctattttcacccgtacaggaccggttgctgaatagtaccaaacaccatgctgcatatagattgcagcatatacgtcatgatccgattctaaaacaaagttacctttctttagtgaacggccacagccaagatacatcagttgaatctgaccttctttttctcttatcaatcctaacccgccacagaatgaaacacgtttggaaggatgatgagcctgcatgtccgtcgcactgaacagataatccgcatatccgtccgccgtattcaccttcaccccggtacagccatcatctccctgcaaggcttctacaccgagcacattcggaccactctttttatacgcttcataaacagaaacaaaaggatgagtatgagcattattaccttcctgacggacaatcaaagcaggagtcggcataggaggcatacaaatatcgccgggagtcaaccctttattcattgtagtcgggggagcatccacctgataaatttcacgtccctcacctcctgtcatccataaacgcgccgttatatcttcgggcatactccatgaagcgatgaaattctggttataatcggatttatgcagattggaaaaccaatgatatccttcatgccacgttttgtcaaacttctccaaagcctcaccgggaagcttgttcccttccgaatcagtgatttccatcgaagtacctacatgatggaacaaataatcattatccgccctgtccgaccggaaaatatccacataataaccactattccccgaagtacggaccatagcgaccattcttcttttctcaccggcagacacatcggcaaagttgaggtaaggagttaattctctatcatttacgaattctccctccttcaccataggttccatagcatgaatagtgatatctccttccgtatatccgggtaaaaccgtattagaacctgtaggagactgatgatatccatgatctttgctccaataggactcataagccgctgcatccggagccaacgcataaccatacgcatagaattgtaaagccaacccgttcggagtgagatggtatccttttttaccaccatacagagtgaacatcattttataatctccctcccagttcttcattgtaataaaacgatgatggggagaataagacgcacgctcattactctctgcacgtacagacgggatggtagctgtataggtacaaagccctgtccaaccggcattatttctggagtatttcttttgagaaatccctttgttcaaggcacttgccactttttccaccccctccttattatctgttccggtataataagtcagcagattttcaaacgtctgaaaattagcacttcccccacgtgaatcaccgaacaccaccatattggctgcatcgtccatccaaggaaatacagccattgcagctttctgcaaaatggggttaccggctatgatatctatcccggcacgtttcaagggagccgcccaatcaagcaatgactgcactgtaccgaatgaataaccgggagattccggccacagccctgtcacccgatcataagttttcaatatatcgggaatggcatcatgatagggagtagattcgttcaccagcagattcaaataatactcttttcctttaccgtcagcataagcctcattatgatcgagcaccaacataggacgcagcattatattccacccgttcacattccagttacccgatttgccaccgcgtaccagccctatattgataaaacgcttaaagacttcggcagctaccgtttttgtatctttcccaattgctttcagatgagcatgaggatgccgtatcaaataatcgaaagcaaaatcatacgccattgccgcatgcattaccaaatcatcatgtatctgttcgtaatcataatagccgcaaatacctcccggttcccaaccaccgacactgccacacgacttttcagggtccaaaataggattcatataatacgtccctaccaaccacacattaaatatatctgtggcaaaacgggcaaacttctcttctcctgtcacccaataaacaaaagcggcattttctgctaatgtcaagatctcgacattattcccccgtatcatgtgcccgctttccttataaggcactttgaccgaaggctccgaaggatttaatttattaattccccacatatcacctgtttcattataaggagtgcggtcctccagcggaacattgacatacttattccaagtacgcattcccggcattcttacagtgggaacaggagcattcccctctccatagtcccaattctgttttttcaaatagcattgggtataacgctctccatctttccaatacatggccagccgggaagttatccattcgggatcagtctgatgacgatccacatatttttccactttggagcggatagctgcaaaggcttccccagcccaaggctcatttttcactttttgcagaacagacgctctatccgccggagaaacatatacacaagggtgttgctgcgcctgaacagccgacatacaccctatccataaaataaaggttactaaaatatttttcatactcatttattgatttactatcttggttaccgtttcagacaggacaggactgccataaaaagaagagaagccgtcttttttattagctcctccctgtacgtgagctataaagaaaccatacacgctatcacgtttatttatccacgggtaagcaccagcccatccgggagaactaatctgataagcttctcctgtagtctcatcaaccagttcacgccattcacctaatccatagataccagtgtggtgctgtcctaacgctttctcaacatactcaccaggagcaacaacagcattccgtacctgatctgcctgcatagtttgaactgtttccggtttcaatatctctttgttcccgaaacgtccgttatgataaatcattttcaagaaacggatataatcattcagcgtggtacacaatccacctcccaacataggagcatgtcccccgtcagtattaaccggagtaaaatgagagccagtcatttccaaaggaacggcaattaatttctgaaataaaaattcaaactcttcccccatagctacttcggccatacgtccggctatttgcatggccaatcctccatattcaaatcgaattcccggtgcaaaaacagtatccaaaggcaatatctctgtgacagccgaatccaaatgattgtaattgtccacccggggagcaggcaggtaaggacgtacaccggaagtatgagagagtaattgacgcaaaaggatatcgcctttcgcatcgcccctgaactgcggtaaccacttctctacaggatcatcccaactcaaatccgtccggtccactaccgcaccaattacggcagcagccacccacttgccggcagaagcgacatacacttttgtatctccggtgaaagagccatacgtcttttcaaacaacactgaatcattctttatcacacatattgctccccccggatagtatcccttatccatccaggtactgattatggaatccaaaggggtaaaatcataagttacattctgtttaccttgccgtaaacaagaagtcacaaccaagccaacagccaatatcaaaataaaaacgaatcctctattcatattcctatatcatttgattagtcaaaccatatataaatacgaatcaaaggattcatttactcatctaataatgaaatttattctttctccaaatcccaatataccacataacgctgccgatgaatattgtacaacggttctatcacatctccttgcgaagtcgtaaactttaattccgtaccgacacgctgtacactgcgttcaggatgcttgacatcgagttttaacgtagtgcgaagtcctgcagggatatgataatcatacgtataataatcattgtacaaagcaggattggaatcgggcgcaggtgcctgcattccttctgttccccgcttaccggccaacactaccggaccataaaccaacgctcctttttgaggattatccggggtcgtttccacacggagacacataggataatcagccgtaatacggtcaccgtctttccatagacgagtaatggcaatatatgaacctggcttctgtttcaccgctatctttttgccattcacaaacactttcactcccttgctccatgaaggataacgaagataaaccgtagtctctacaggattttgggctcttatggtcagaacagtggtctcctctgccggaaaatccgtttcctgccggagagtcaatcctttctcgcgccaattaaccaccgaggggataaaaagattcacataaatgcctttgtcattgtgataataaatagcttctccatatttagcatggttctcaaaaccgcttcccacacaacaccagaaagaattttctttcgtactatacaccttatgcgagcctgaaagcaagggcaggaaatatgttaccataccggtctgaggatcttgctgtcccaaaatatggttgtaaagggcccgttcataataatccgcaatggcagcatcggctgtccagcagaacaaatgacgggacagtttcaacatattataggtacaacacgtttccccagtataacctgacacatgcttggagaaccgggccgggtcaaaataatgttccttgtcactactgcatccaggggcaaatgtatgatggtctatcatagtatgccaaaagaaatcggataactttctgctgttctcatcctctgtcaattcataattgcgagcttcggctatcactttcggaatgaatgtattggtatgtttagtacccaaatcatcacgtagttcctttaacggatcaatcacttcattatggtaaaagaattgagccagccaccgatgacgttcgtccccggttatcgcatacaaattataaaaggactcattcactccaccaaattcattccgtatcattttttgacgtgtagtctcatccaaaggtttgagtttatgataggcccagtcggccatacgaacaacaacctccaaagctttctgattgtcactgtaaagatactggtctatcaatccagagaaaagcttatgaagcgtgtaccacggtgcccatacactggtgccacggatattccgattgatcaattcttcaggataagcgctcagatagccgttacccaatgcggtttgtacctccgccagggcattcaccagactatcccctttttgtttgaactgttcactgccggttgccgcatacatcaagccgtaggcagaaagcaagtgccctgtggtgtgtccacgcaattcacagtccaaggactcccatccacctaacttctttactgtcatataaccaccttcacgacctgcaaacacgccagcattggtacggaaactatgtaacagcctgtccacctctatagaagccatccatacagagtcacgcatcatattttcacgaaaacggcttggaagcaaacgaacatctttcaaatcaaaactcttgactttcatcggagccacggtttctctcttcaactttccggcatgttggctgggataaacagactgggccgtcaaagcacccgacatagccaataacccggctacaactaaaattttcttcttcattgtctttttctaattagttcctcaatcgacattcaaacttactacataatacgataaaagagagaaaaacactcaatgcttttctctcttttcataaataggtccaactataaaacagttttttatctactttatctttattccttcgatatattcattcgtgataaaaccctttaaatcctttatcttctctccattaaccaccacattttcaaacgtaatattccgcaccatcctttctttatccagcccttttatcaacgaaggattctcgcctactccgttataagtaatattacggaaagttactccatcaatgctctgtccgggctgtttgtcatatttaggattgaaacgaatgttgatatggaacaattttccttcttgaatactttctacccgaatatcctcaaataaaatattcttcaccctgtttctatcaccggcatctatagccatacatccctgataaggcacatcatcttcatcatgttccaaaatatcaatattccgaaaaatcaaattttcaatggtctcacctgtcaaggactccggatcaccatgatcacctacattgataggatgagcaatatccgcccaaagaatggaattctgtacagtgatattatccgaaccgccccaccagttccaacgatgattatataaagcaatgcagtcatcactattacgcataaacacattgtctatcaatacatcgtgacagcacatcatgtcaatgccatcactccaacctttgcaactaaaagatttcaaatttctgattgtcacccctacagcacctcctccgaataccgtgtaatgatccggattgatcaccgttatgccatccaccactacatttttagaatctgttatttcaatgccacgaataggatgatccaagatacctctacccacaatacgtacattttcggctttatccacccatagttttgctttcacaactgctcccggagccaaataaaccgtcgtattacttggtatccttatctgattgtttggcaaatctttaggtcgatgcactcccggcccaaaatacatcactcctttctcttctttcgagtaagtctccgtttccatcggattggcaaacacatgaaggttatgcaacctatccccattaaactccacagaaagatatcggggtttatcaagcataaatgtaatcacattcttatattgtacatagcgtatatcatttacctgcggaacgaatatctacctcatgaatcgttccattattcttttttaccattacctccacaggactgcccatatcaaactgtaccatcgaagcatcttgtaccctatccatatccacctgcacattatattcaaacaggtctttccattcaccccccggaacacggacacggactgtataatcatcattatgaggcatacctgttttcaatccttcgggataagtcaccaactgagcctgtgcaaccgcacaacacaccataagacaaaaggctaataactttttcatttttatgcttttctttttaaatacgtttgataagcattttccactcaaaaataaaagcctattaaccattttctcatcaacaatgatcttatcttctagaatttattccgttccacctcttttccttcctgaaagaataccacttcatacgatgcgttatcatctgatagtaacatatccgaatcaaacatcagacactcaatctcataaggttgcaatgttttcaaagcaatccttccctggctggaaccgttgcatatcacctcaacttccgtcggttccgatgcagacaaaccaaagttctgtatctctaccttcaacccacctttttctttatcaaacagagggcgacgggcggagagcagagccggccgataattcacgtatggcaaacgggcataaccatacaacatattcccttttttatctttacctatcattttaggagcaaattcatccgaagtgatgccactgcccttcgctttaaagaccacaatcaaatctttgcccgaaaccttggtcttcacaggcttgcaaccacgtccaaaattcacttcggtaaatgaaccgaatcgcaacgactttacatccacatctgtctgcggattaaaacctgattcggcagcaatctttacctcaatggtacgagtagacggagtgatctcttcttcattcaaaacagacaatagcattcctttattcagaggaatacttatatttttggaactatgtttatcgttaggcagatcgttccatttaatggtatcaatcacggcaaaattcatttggacagcacgccccttctcatcctgaaaaactttagggcgctcatatttaaaccaatgttccaccgctccatccttatggaatgatacacccggcacgtatgcttccccttgttctgtcacccaatgcactccgtccttggaacgctgatagaaagcaattctgcccaaccagtcattcacgatcaagtgatattgcaactcatcccgccataccacgggatcttcgaatctgccttccacatccggataaacccgtttgtcagtcaactgcatataaggtgaaagtccgtctttactgatccagacacctccaccccgacataccatcaggtaagaatcatcctgacggcgggcaaaagtcaaattggaaagcccctctataatttttcggtcacgagaatcaaaactgaatttaccatacgtccacaccttgctgtccaccccatctgctatatagtaaccgtcaatcacatagaccacgacacggccatcctttaaccggaacgcttccggattatgtccttttcccacagaattttgaattttaaaaggtccttccaaccgatcacttactgcatggaaaacagtagaattcgaccaaaacatgtg

SEQ ID NO: 3894 - DNA, 30309 bp, Unknown
  gut microbiota DNA sequence
gaatacctaaagatacaaaaaagccaactaattcgcaatactttgtgtatgaattagttggctgattttgtaatatttaatgaatgtccctaatttgatttttactataaaaaaggaagccatcttaatgacttccttttattataacctagctcctattctataattacttcttcaaatcgaatcccaacatcaaaccgtcataagatccggctacactattaatggtggcagcagtagaattcactttagaaacagtacctgtaatcgttttcaatactgacattaatttatccgcattaaagaccagactcatatcatttccggtcactgtgacatgagcaacagtttttactcccaattttcccttcatagtaatggtcttttccttatcatcgaacgtgtaagtgccactcattgtacgttttttcaatgtgtatgaataagttccatcttcattaaaagtatactcacagccactcatccctattctgtcatagacagtctgcatcttctcctccacttctttcgcagctacttctccaccggctttagccagtaaattttcactttcgaactggcattgcggacctacatatttccaagtacctataatagaagatgaagttgttgctttatcacctactaccgcttttgctacgccggtcaatatagatttcaaatcttgagcattggcattaaccaaaatggcaaacatagccaaacacatacataaacatttcaacaaagttttactattcatgttttattgattttaattgtttgcaaagataaacaataaacattacaaccaaagcaaataatcgaccaattggcttattttaccttctaataaaagagacgtaccgaaagttttccagtacgcctcaaacaatctttaccaaggtataacaaatacttattccaacttttcaagtataatttaaaatcaacagctaatcgttatatcaacgtttcagattcggattcttctcaacttccttcggaggataattatgataaatggaagcctcaccattccaaggaacagttacagacatattctcttccattttcaaatcttcctgaagagcataggtaaaagtcgtcttagtttcttcgtcgtagctataagtcaatgtaccggcaggaaccaatacttcatcctgagaaccactacggtagtcataactttctttgagacggttcatgcggaactcatcagaacgacgggttaccatagccaatacataaccagccacttcataaccgtgttcttcatatgctgcttctgccagttgttcagcactcatagcatccacagcagctacaaatgattcatcggaacaagcacgtgcacgtacctgctttagagcagatttagccaagctgagatcctttcctgcgcgtgccgcagattcggcataccaaagaagaacttctgaatagcggattagttgatgtcgtttgttaatacacatacctccccaaataggtttggtgtaatcgaaagcagccgatgcaggaagtcctgtcacagggtctttattgacggtaaacgccacaaacatcgggcgataatcggcaaatactgcattcgtaccattatagggctttccatccgtagttgcccaccagtcaaccaacactccattgtttaatagaatttgttttgaataaacagcatctttacgaggaccatcaggaaagtttttccaataacgccgctctgccaaaaaatccccccagccactccaaagttttcctgattgatgacaagatgaaagttgtgaatcccattcctgccaaccgccaaaattagaattgtaatctattccaaggagcgtctcattatgatggtttttaccataagagaaaacatccttccattcagaaagcaaagagtggtcataggtacccttattcacgccatccattacttccttagccttgtcagccgcatttgcataatactcggtcttattcaaagggtaacctgccatcgccatataaacagctgccaaagtcgcctttactgtctgatctgaaacgtaaatattctgtccttcaatggaacggttagcttccgtatatttagccggcaggttacaggcttcggcagcgttcaagtctgacacgatttgctcatatacttctgcaaccgtcgatagaggtgtcaaattgttgtctggcaaattatgaagattcataggcaacggaccaaaaacacgcaccaaattaaaataagcgaatgcacgccagtagtaaccctgaccaagagcaatattgatttcctcttgagaagtcatagcctttccagcattatcaatgattaaatttgctgccttgatgatcgtataaaaacgactccaagttccttcaagaccttttgtgtcagaaggagattcaaaggcatctgcagaaagataagcacccttgtttgatcccgtagttgaggttacgtcatctccctggcattgcacaatcatcggattagagttacattgggatgcctgtactttggcatatagggcataaacactcatatccagttcgttttgattggaaaagaaattttcaggggttaattttcctttcgggttttcagtcagaaaatcactgcaagaaggcattgccaacatagatgctgcaataaagcagcctaatactattttatttttcataattgtcaatcatttagaagttcatacgtacaccaaaagtaaaagttctaggagtaggataagtacccgtatcaataccatttgcacgatcaccatagtcacttgaaaaagagtaaccagcaggattggatcccttgtaactggaaatagtgaagagattctgaatactgaaactgagccgcaggtcggctattttggtcatgcttttcggaaaatcgtaagctaaagtcacattctcgcaacggaaataatctgcattctccacccatttggtcgaattgcccagatattgattgttttcaacacggggatcgggcatcgtcttacctatttccttcaaaaaatccgcatcagtaaacattcgtgaattaccaatcatagagttcatggcaaaacggagggcgttcaaacgtttggcaccgaaagatgaattgaaaaatgcattcaagctccagtttttataacgcagcgaattgttccatcccagtgtaaagtcgggacttgctttaccgagcacaacacgatcatctgtagacggattacgtgttatttcatcattggcagtataaaaagtgtcatatccttcattgtctattcctgcccaacgataaccaaagaaagtaccgatcgcttcaccttccttaataatagtacaatcagtgataatggactggaaagaaccaccataaataatgggttcctgagcagtcagttttgttaccttatttttcaagtaagtaccattaagtgtggttgaccaactccaatccttgctttgaacgatatttgcagtaagagcaatatcaaaaccttggttggaaacctcaccggcattaatcaaataagaagttccacccaaataatcagccaacttggttgaaagaagtgcatcagatgtctttttattgaaataatccacactcaagtcaatacgattatcaaaaaagcccaagtcgaaacccacatcaaactgctttgtcttttcccattttatatcaggagttgcaagcgtattggcccaataaccggttactcctgaagaattaccgaaataagtggtagtcgtattaaggattgcaagagttgaataaggatcaatatcctgattacctataacaccataactggcacgtatcttcaaattactgataaggtcacgggtactttccataaacgattcattggaagcagtccatgcaacggctacagaagggaaatacccccacttatcattggtgaaacggctggaaccatcggctcgaaacgtaccagtcagcatatagcgattatcgtaattatagataacacgtcctacccctgaaagcaatgcccaatccgaatagccgttggttgcatcacgtgtgacagcattcttcacatcccaccagcctactgattcagcttgaagtgaagaaccggaaatccccatattacgaatcgtactttttgttgcttcccaaacccctgttacggtcaaataatgtttgtcattccaggtatgattataggtgatgttatttgaggactgaagcaacatccgctgtaaattactgttacccatgctattctttcctgcaccgtttacagattgtggtgtgaagctataggaagtattattataataatcaaccccattgctgcttgtaaaagtcaagcctttgataatattgaatttaagatcaatatgtccgctgaacacatcgcgacggcgctcactttcgctagctgcgattataccataagcattagcctgaatcgtaccataagggtcccaattatagtaaccatttttatctgtcatagtcatggtcggagaggaattaaaggctatccacaagggattataacctgacatctccaatcccccaatacccttaccaacaccatgagatgcgtttaaatcgacagtaacatccagccatttagccatagagatcttaatgttggctttagccgaataacgttcataactatttttgtcaatgacaccttcatcacccatatagttagcggaaacatacgtttgagttccttcagagccttttgaaaagacaagcttgtagttttgagtcacacctgtacggaacatctgatccgtccaatcaataccgggattactgccatccaaataatcagaaacctcactcgcactaatacccgcataatcaacaagtgcttgggcataagttttggtatccatcatcttgggaagattggtagcctgagagattcctaccgaggcgtcaaaagtgatgttagtctgccctttcacaccactcttggttgtaatgataacaacaccgttggcgccacgtgaaccatagatagcagtggaggaagcgtccttcagaatttgcatactttgaatatcttccggatttataccttcaagacccgactcacgaaccataccatctacgacataaaggggatcattacttttattaatggaattggtaccacgaatgcgaatctttaccgaaccacccggaacaccatcactgaccacattcacacctgcaacacgcccttgaagcgcatcacttacttgagtaatgggctggtccttaaaattcctgctatccaaaacggaaaccgaacctgccaagtcagccttacgtactgtaccataacccaccacaaccacttcatccaaagtctcagtatcttcctgtaaggttatagtcaaattcttttgcccttttaccaatatattttgagcaatatatccgatataagagatcttcaacgtagcattgggcttcacattcaatgtaaacttaccttcaaaatcggagataaccccatttacggttcctgcctctacaatgtttacaccgactaatggttctccactcgcatcaataactgtaccagttacactaattgtctgttgctgtactattactacgttgtcactcatatttccggcaattgcatacccggcattacccgacatcaatatacccatactcattggtacagctttcaaaattggattgtaccacgcagactcgaacagcctacctaacggcaataattttttcctcataaaattcttaaatcatttaaggttaaactaagtttgatgatttgcagcaaaattaactatatcccccctcaagagggatccgtgtgcgtataaaacaaatcaactatcgtctaaattttaaaaagtaatacgataaaaatcaaaaatcatataaattagttccttatttatctaaaaaaaagatttgtgaagcttttctctatcaggaaaaaagtttaattttgttctaaaatcataaagagatgtaccgaattctacttatactatatattatatggggaggggtgtcaattgcaagtggacaagactttaattactctttcacccaactttccactaatcaaggattatcacaagcttctgttacctccgttacaatggatcagaaaggaagactatggataggtactcagagcggcttgaactattatttccagcagcaactaaaaaccttcattcaccatgaaagtgattccctatccttacctaacaattacatcaatcacatagtagaagattcattaggtaccatctgggtggccacctccaaagagatggttttatataacagcgataatcataatttcacgcctactggatacaattgtatttattcttccctctgcattgaaggaggtatattgtttggaagtgagaatatcattttccgctataattataaaagccggaccatggacagcatctatatttgccagaagaagaatttggatatatccgaataccggatacaaaaaatggttcagttgaaaaaaaataaaatactgataggaaccaaagaacaaggtatctatctctatgattgttgcacgcaacagctcacccgtttcacatcagatatccatcatctactgatttcgctctatgtagtatcagacaagtatgtatatgcctctttttacggcaatgggatttattgctacaaccaagatggcaagatagtaaagtcttatacatcaaagacttcttctttaaacaacaactatgtgctagacatcatcgaacataaaggacaattatggattgctacagacggaggaggtatcaatatacttgacatgaactccgaccaaatcaaagtaatgtgtcatgtggctggagacaacttctctttgcctgtcaattctattgtcttattatacgaggacagaaacgggaacttatgggcaggtagtgtccgagggggtatctttaacattaagaaaacctatataagaacttataaagatgtagccctgaacaactccaacggtttaagcgataagtctatcatttccttatatgaagatgacgatgacaaattatggattggtacagatggaggaggtattaatctatatgatccacacaccgatcagtttacccattttccttcgacctacggagacaaagtggcctctatcgccaaaatatctgaaaaggagttgatggtatctctttacacaaagggtatatttattttcaataaaataaccggcacttaccgcccctttaccattgttgatgaaggtacaaattacaaagaatgcttctatggctatcttccattggcccatcaagtagccaatgataaaatttacattatcagttaccgtccatgggtataccatccattaagtggaaaattctctttaatgcccaccaacaatctgaaaaatacggatgcattgcgtctcgtctattccaatgagcatttctcattattaaaacgtgtcaatcaaatattttatgtacctcaagaaaacgacagtatcagccttttatgtgaaatagacccagaggagacaattacagctcttgcctatcaggatagtactatttggataggtacggaccgaggtctgggatgttatgatatgatacacaaaaaattccaccatatacataccaactattttgaaaaaatatctttcctcattggcgacaaaaaaggaagattatggatttgtgcacacaacaaactattttcttatctgattaaagaaaagaaattcacgttgtggaacagttctgacggatttctgcctaacgacatactagctgcccactacacactatccaatcccaattttgtttatttgggaggtgcagaagggctggtgaaaatcaataccaatattcctcagtctgaaacgcaaatacctcagataagtctggcagatattaaatttaacggatgttcttatctgaaacaaatgaagaatcagacacttcatattccatggaactacaattcattgaccattcatatatgtgtaaaaaatgaagatatcttccaaaagaacttgctcagatataccatatcaggcagaggaaaacaaacggtcgaaagtttcgactccgaactctctttatcttccctgtcaccaggtaaatataaaatctgggtatcaagcagcaccaaagatggtgaatacactactcctgtacccataatcaacattgtcatcactccaccctggtataaaagtagttggtttttctcgatatgtactcttttatttattctttttaccattaaaatagctctttgggtatttcataagaaaaagaaggaaatgagagatgaaatgggcgattttgtccaaaccgtcctctataatgtactgggaaataaagaagaaaatacaaaagagaaagacttggaagaaataacagatgcttcatatcctcaatcaatggaagcaactccactcagcagtgctgacgcagatttcataaaaaaactggatcaaattatcaatgagaatctatcaagtgaaaaactatctatcaagtacctgacagataccatggccatgagccgtgcatctttatataataaagtaaagcaaattaccggattaggggtcaatgaatatatcaacagactacgcatagaacgctctgtataccttttagcaaataccaatctgagcattagcgagatttcctatgaagtaggtttttcttatccgcgctatttcagtacttcatttaaacagatgaaaggggttacaccttcacaattcaaggagaaaaacaaaaatagcggacacatataaactgttagagcaaacaaggcctgccatttattattttgaacgaaataaagaactgacattcagattctttacttcgttcaacaggtcataaaatgataccaatattaacaagccttgaaactcatatccagccccttcacggagtgagtcagcgcaccgaaagaaatgaaatccactcctgcctgcgcataaggcaacatagtatcgtaagtaataccaccggaagactcggtttcgcaacgacctcctactatctctacagccttacgagtatcttcaggtgtaaagttatcaaacataatacgatccacaccttctgccaacgcctgattcaattcgtcaaagttacgcacttccaattcaatcttcaagttcttaccctttgccttacaatattctttggcacgggacaccgcattgtgtatgccgcctgcgaaatctacatggttgtctttcagcagaatcatatcaaacaaaccgatacggtgattgcctcctcctcctatctttacagccatcttctccatgatacgcatacccggagttgtcttacgggtatcaagtacacgagttttcgtaccttccagtttcttcacatatttattggtcatagtagcaatgccactcatgcgttgcatgatattcagcatcaagcgttctgtctgaagaagtgactgaactttaccttccaccaccatagccacatcacccggtttcacgtgagttccatcttgaatgaacacctccaccttcattgtgggatcaaaacggcgaaatacttctttagccacttcaatgcctgccaaaataccttcttccttaatcaacaactttgattttcccattgcatctgcgggaatacatgacaaggtagtatgatccccatcacctatatcttcagcaaaagacaggtctatcagtctgtctattaagtcttttactactaattcgtccataatgttatcgtttttttatgaattgataggcaaaggtagagattttccgtatttttgcaaagtaaaccagaaaagaacgtatgaaatttacattattagtagtaggacgcactgtcgaaaaacattatatcaccgctatcaatgattatgtggaacgtaccaggcacttcatttctttcgatatggaagtcatccccgaactcaagaacaccaaaaacctgagtatggagcaacaaaaagagaaggaaggagaactaattctgaaagctttgttgccgggcgatgtagtggttttattggatgaacatggaaaagaattccgttccgtagaatttgccaactggatagaacgcaaaatgcacactgtaaacaaacggttagtattcatcattggggggccatacggatttgcacccaaaatatatgatgcagcccaagaaaagatctcattatccaagatgaccttctcacatcaaatgatacgccttattttcgtagaacagctataccgggcgatgactatattgaataacggtccttatcatcatgaataaaaatatatagcggttagtgattaacacctgtggcataatagcgcagtccattcatcactaaccactaattctctccctattttccaatttcaaagtccacacacactggtaaatggtcgctatagccaccatgatatttctttccccagtaggtacgtgatgggatatcaccaccatatttttcatcttcttccaataggaacggatgtcttaaaatctgtgccttgtcataagaagtacatataccgtcatgtccctgcaacaggaatccggaaacaatcaactgatcaagtattccccattcaccccgatagcggtaagtaccttccttgcgtccgtccatcagattatacagtttcttagcctgtacttcacctttcggagccacggcacccaatactttagctatcgaattattagtgggataatcattaaaatcacccattatcatcacattgggatgctggcgaaggttcatgatggaatctgccgctatgttcaatatctgtgcagtgaaaagacgataaggctcacttttttcctcaccaccggcacgagacggcatatggcacacaaacacgtccaaagtatcacctgatgctacctgccccatcacatgaaggatatcacgtgtagggcggcgttccatctccttataaggaacagaaaggctgtttttgcccagcaacttaaaacttcctcgctgataaagcaacgccacgtcaataccacgctcatcaggagaatcagtcatgacataacgataacctgcctcgcgtaatggcgagttttctgtcagatctttcaagcaatgatcattttccacttcacaaagccccaccaaatcgggaacattttcctcaccggtggcaataataaccttagctatcttagccaatttatcatgatagcgcgcttgtgtccatcctttcggagcatctggcaaaaattcataatcatttttcaacgtgtcgtgctgacaatcgaacaaattctctacattatagaacattacccgaaacggttcctgtgcatacgttacccctaccaggtagcacaaacaaagaaataaaattgttttcttcatataaattattttgtcggtatattaaccaatacatccagcaaatgacgccagaatttatctacagtaggtatcagcatacgctcatcaggtgaatgaacaccacgcaaagtaggtccaaaagaaaccatatccagtgacggatatttctcaaggaacaaaccacactccaatccggcatgaattgcctttactttaggttccacaccaaaaagttttttatagctatctaccgcaactttcaaaacaggagaatccgtattcggtttccaccctggatagccttcaccagttgttacttcagcacctcccaaaagaaaagcagaacggatcatctcggacatatccttgcgtgatgaaagaatggagctgcgctggctagtcactattttaatcttgtttccctctacctgtttgatggaagcaagattagacgaagtttctactaatcccggaatatcctgactcatggcatacactccattgtgcacagcgtaaacagctctcagaaggtgtccggcagtagtcatatctatcgcttccttacaaggggattcagaagagagttcggttctcaagttcggttctgtcgcagcatattcattctccagttctgcagtatagatattcaaatctacacgaaccgattccttatccttcataggtaccgcacataatgcctgtgcctcacgaggtatggcattatgcaggtttccaccatcaatctcacataaatataaaatatatttagaagccaactgggtcagaaaacgattcagcagcttattggcattcgctctacctttattaatatcatcaccggagtgcccaccagtcagtcccttgaccgccacacggaaatagaaataatcctgtggggcagaaacaggctgataagtaaattccgctgtagtatttgcaccaccggcacagccgataaataattctccttcatcttccgagtccaaattaatcagaatatcaccagtcataaaccctggcttcaatgcaaaagcacctgtcaatccagtttcttcatccaccgtgaaaagacactccagcggaccatgctctatatcagtagcagccaatatagctaattctgtcgccacaccgataccattatccgcccccaatgtagtacctttggctttcaaccattcaccgtccaccactgtttcaataggatcaattagaaaatcatgctccacatcactgtttttttcacaaaccatatctatatgagactgcaaaatcacagttttcaaattctccttacccggagtggcaggctttttaattaatacattgcctacttcgtctgtcttggtttccaaaccatgttctctaccgaaggctttcaaataagcaattattttctcctctcttttagagggacggggtaccttacatatctcttcaaaataataaaagacagatgcaggctttaaattcttttcattcataatcatgtcgtttaggcaaattctgtttccaaatttgcaaaaaatggttaaataattctcttaaataggacacttcctcttttttaatgaaaaaagagaaagctaaatcattgcaaaattctatatttgctatgcaaatttagtccgcagacacgaaatgcttcaataaatttggcatttcccttgccttacactaactttgcaccacaaaaataatagaaatgcttgatactatccttataactgtgttaatagttgctatctgtatagcattattgtctatcggaatctttctaaaaggaaagtttccaaatacacatgtaagcggtaataaggcactccgtaaaaaaggaataggctgtgtgcaatcacaagatcgtgaagcacgcaaacctaataaaaatgccatagccgaaattgaaaagcaaagcaaaacggataataattaataaacaatacgtgaaaaagattatgaaaagaacaaatttcatcctgaatggatttctagcgctagccatcgtgttagtgttcgcacaatgtagcgacaaaaacaacaacgctgcaacttcttccgctgctccgactgccggcgttgcaggttcctcaaacatgaaaatagcttatgtggaaatcgattcactgttgactaagtacaatttctggaatgacttaaatgaagtgatgatacagaaagaagaaaatatccgcactactttaaatgaaaaggcaaagaagctggatgctgatgctaaagaattccaacgcaaactggaaaataatggcttcgctacacgtgaacgtgctgaacaagaacagatgagactgatgaagcaacaacaagaactgcaggcactccaacagaaactaagcgacgagctagcttctgaaaaccaaaagaacagcttgcagttacgtgattctatcaattcattcttgaaaatttataatcagaacaaaggatatgatctgattatcagcaatacaggatttgacaacttgctatacgctaatccggcatacaacatcacacaagaaatcattgatgggctgaatgcacgttatactccctcttctgtaaaaaaataatagttcatcaaccttatatatgcaaagccggaacagtctactgttccggctttacttttaaacaaaaagcaccctataaacgtttttattataataaaaataacgaaaggagaacattatggaaagatttgaagatttaatcacctcaaacatccctgtattagttgatttttttgctgaatggtgcggaccttgcaaagccatgaaacctattttagaagaattaaaaggaataaaaggggaaaaagtaagaattgtcaaggtagatgtagacaaacataaagaaattgctgcatactatcagattcagtcagttcccacactaatgatttttaaaaacggtaagcaattgtggcgacaaagcggtgtaatgcgtgccaatgatttaagcactattctagcccaatatgagtaaaatatgaagaaaacaatcacatgtattctattaactgccggattaacgggatatctcagtgcccaaactcctgtccaggataagtcagataaaaattcaggaaaagtcatacgtatggacaaacaaatgttcttggataatatatttgactacacttccggttccactaactggaaatacaaaggagagaaaccggcagttattgatttttacgccacatggtgtggtccctgccgtatggttgcccctctgctaaaaagtctggccaaagaatacaaagatcgaattgcattttacaaagtagatacagacaaacaaaaagaattatctgccgttatgggaatacagtcactgcccaccatcatctttatccccaaaacgggacagccacaaatcattataggagcagccaataaagctactttcaggaaagccattgaagaagtgttactgaaagaatgagaaacaagccctacacatctctaatctaaatataaccaataaaagagagggggcaataataattgctccccctctctccatttatactatagcaaattgtatattatttcttgaaatatctgttgtacaaaccttcaaaacctttgccgtgacgagcttcgtccttagccatttcgtgaactgtatcgtgaatagcatccaagttcaaagcttttgcacgagtagcaatgcgtttcttgtcagcacaagcacctgactcagcattcattctcttttccaagttagtctttgtatcccatacacagtcacccagcaactcagcaaacttagcagcatgttctgcttcttcccaagcataacgtttgaaagcttcagcaacttcaggataaccttcgcggtctgcctgacggctcattgccaaatacataccaacttctgtacattcacccatgaaatgattgttcaaatccttaatcatttcttcatcacaaccttttgctacgccgataacgtgttggtctgcaaattccaatccaccttctgtttctaccatttcgttaaacttagaagcaggcgctttacacaacggacatttttcaggagctgcatcaccttcatgaatataaccacaaactgtacaaataaactttttcataatttctttttttattagttagtcaatattttatttattagttagtcatttactctctatcctttttaacttctttcttaatcttctttagaacaagcagggcatatacctttataatattggtgaatttcatccactttgaatccattcatatcaatttgctctacttttttcacttcattactatagggtaaatcgaatattttaccacatttcttgcaaaggaaatgagcatgcagggaagtatcaccgtcgaaacacgcattcttttcatcaattgtaagcattaaagctgctccatgctcgacaaagagtttcagtgtattatacactgtagtcttggacaaggttggaatatccttacatagtgccaaataaatctcatcgatagaaggatgagttttatgagccaacaaataatccataatagctatgcgctgtacggacggcttaatgttataactgataagataatcgtaactcttcatatattccctttttgtaactattacaattttatttcatgtgcaaagatagatagttattcgcaacaaacaaataaatcacgcacttttttttattttttttatttagaggtataaatcgggaaagaatgattaattttgcaggtatatataataataggtataatatgaaatacggttttgtaagagtggcggctgccattccgatagtgaaagtggctgactgcaaatttaatgcacaacagattgaaactcaaattgccatagcagacgggaaaggagtacaaattatcattttccccgaactaagtattacagggtatacttgcgccgacttgttcggtcagtctttactgttggaagaagcagaaatggctttaatgcaaattatgaataatacccgacaaatggatatcatctctattatagggatgcctgtggttatgaattccacgctgctgaacagtgctgttgttttccaaaaagggaaaatactgggtattgttcctaaaacatatttacctaattataaagagttctatgaacaacgctggtttacctctgctctgaaccacccggatgccaatgtacgcctctgcggacaaaatgtaccggtcagcgccaacctgcttttcgacactccggaaacttgctttggcattgaaatctgcgaagacatgtgggcccccattccgcccagttccgcattagcactgaaaggagcggaaatcattttcaacatgtctgccgacaatgaaggaataagcaagcataattatgtccgttcattagtcagtcaacaatcagcacgctgtctggcaggatatgtattcagctcatccggtttcggcgaatcaaccacagacgttgtttttgcaggcaacggactgatatatgaaaacggcacgttacttgccgagtctgaacgtttctcattcaaggaacaattggtcatcagtgaaatagacgtggagcgtcttcgtggtgaacggttgaccaataccacttttgccgccaatatcggcaactgcacgggacgtcccgccatccacatcagtacagaatttgtcaacacacgcgatcttagtctgacgcgcagtatagaagctcatccttttgttcctcagggcaaagaattggatgaacgctgtgaagaaatcttcgctatccaaatagcaggactcgccaaacgtctggtacacactcactgcaagactgtagtagtcggtatttccggtggtctggattccaccttggcacttttggtctgtgccaagactttcgataaattggatctgccacgaaaaggtatcatcggcatcaccatgcctggtttcggtactaccgaccgtacttataacaatgctctccacctgatggcttcactaggtgttaccattaaagaaatcagcataaaggaatcctgcatccaacactttaacgatataaaccacgacatgaccgtacacgatgtaacctacgaaaacagccaggcacgcgaacggactcaaattctgatggatgtcgccaaccaattgggcggtcttgtcattggtacgggagacctttcagaacttgccctaggctgggccacctacaatggcgaccatatgtctatgtacggagtcaatggaagcattcccaaaacactggtcaaatacctggtaaattgggtggctttgaatggcatggataatgaatcacgtattaccctgctcgatattgtagacactcctatcagtcccgaactgattcctgctgatgaaaacggcaatataaaacaaaagacagaagatttggtaggaccatacgaactgcatgatttcttcctttatcaattcctacgtttcggttttcgtcccgccaagatattcttcctggcaagtatcgcttttcgtgatacatacgatgaggaaacaatcaaaaaatggcttactatattctgccgccgtttctttcaacaacaattcaaacgctcttgcctgcccgatggtcccaaagtgggatctgtatcactcagtccccgaggtgactggcgtatgccgagcgatgccagtgcagcttcatggctgaaagaatgcgaagagctataaaccacataaaaaagtaagtcggcttcaaagacaaagtaacttaacttagttgggcgagtaagttaagttactttgtctttgaagccgacttaaatacatcccttgcttgagggtacttcaaaatggtaaatatctcttcgcacagccatctttatggcacgagccaaagctttgaaaataccttctattttatgatgctcattctgcccctcggctttgatatttaaattcatacgagctgcatcactcaatgatttaaaaaaatgaagaaacatctcggtaggcatctcccctattttctcccgatgaaactcagcatcccataccaaccatgctctaccgccaaaatccaaagctacccgacaaagacaatcatccatgggcaagcaatatccgtaacgctcaatgccacgcttgctgcccaatgcccgataaatacattcacccaaagcaatggcggtatcttcaatagtatgatgttcgtccacttccaaatcaccttttactttaatggtcaggtcaataccaccatgctttccaatctgttccaacatgtgatcaaaaaaaccaatacctgtggaaatatcacattttccgctgccatctaaatttaagctgatataaatatccgtttccttcgtagtacgacggacctccgctatacgttctccggcaaaaaggaattcagcgaccttatcccaatccgtagtcgccaatacacagtaggattccaaattcttttccttcagaatatccatattttcttgcaacaaaatagccttacagcccatatttctagccagttccacatctgtagcacgatcaccaataacaaaactgttagccaaatcataatcaccggtaagatattttcccatcattcctgttccaggcttacgggtagacacatggtcttccggaaaactgcggtctatcaagatatcatcaaaaatgatgccttccccctccaatgtcttcaacaccaggttgtgcaccggccaaaaggtatcctcaggaaaagaagaagtaccgaggccgtcttgattggtaaccatcacaaattcaaaatcgagtttgctgcggataaatcccaaattacgaaataccttaggataaaactccaatttatggaaagaatccaattggtagtcaaccggtggctctataaccaacgtaccgtcacgatctataaacaacgctttcttcatacttcaacattcataattcttcaatgcttccaacaacatatcattctccggacgtgtaccaatagtcacacgcaaacaatcacgacataaagaaatactggtacggttacgcactatgatacctttacctaccaaataattatatattttcttggcatctgtcactttagctagaaagaaattggcatccgtaggatagattttctcacaacaaggcagttctacaaattcattgaccaaacgcgtccgttcttccaataacgactttacccaacgttctacctcataatgccggtgcaacatcataacagcctctttctgtgtcagcagattcacattatacggatatttaatcttactgaaaatagagatgatttctttagacgcaaaggccatgcccaaacgaatggcagcacatccccatgccttagaaaaagtctgaaagacaatcaaattaggatatttatctaaatcggcaaggaaagacggcgcatcagaaaaatcggaataggcctcgtctataatcaccaatccctgaaaagtatccagtaatttttccatttccctacgatccaggttattaccggtaggattattgggcgagcaaagaaaaaccagtttggtgtgatcgtctgttgccgccaatagtttatcggcactgaactgatagttttcatccaataacaccttgcgatattctacatcgttgacatcggcacacacctgatacataccataagtagggtcaatagccactacattatccacccccggaatacagaacgcgcgatacaccaagtcaatagcctcatcactgccgtttcccagaaagatcgtatcggggtctacctttttaataggagctatcatattcttcaattcccgctgcataggatcaggataacggttattaggtgtattgtacgggttctcattggcatccagaaaaacagatgcctccgctccattatattcgtcacgtgccgatgaatagggtttcaaagcccaaatattcgggcgcgtcaattctttcaaatctttcatctttatactgtttttaatcttacggttactgcattcttatgcgcacccagttgttcattagccgccatcacctcaatagcaggaccgatattctgaataccctcgccattaatctcctgaaaagtgattttacggataaaactatccagactcaccccactatacgctttggcataaccattggtaggtaaagtatgattggttccggatgcataatcaccggcactctccggagtaagtgaacctagaaatacagatccggcattgacaatacgctctgcctgttccatataatccctggtctcgataatcaaatgctcgggagcatattcattcgtcagagcaattgcctcatccatatccctcaccaaaatcaatttgctgcttgccaacgacttttcggctatttcccatctgggaagcaaagccaactggcgttgtacctcatactccacctccttcattaatttctcagaagtagttatcagcatggcctgactatcaactccatgttccgcctgtgaaagcaaatcggctgccacaaatacaggattagccgtctcgtcggccagcacttcgacttcagaaggaccggcaggcatatctatcgcaacatcccgcaaagaaacctgctgcttggcagccgttacatattggttacccggaccgaaaattttataaaccttaggcacactttccgttccgtatgccatagcagcgatggcctgcacccctcctgctttgaatattttatttaccccggccagttttgccgcatacaagatagcaggatgaacctttccttctttatcaggaggagtacaaagtacgatttccttgcaacctgcaatctgtgccggagtagccaacatcaatacggtagaaaataaaggcgccgtgcctccgggaatatacaagcccaccttttcaatagcaaccgccttctgccaacaagttaccccgggtacggtctgcacctttttcccttcaaaccgctgagaactatgaaaagtatgaatatttttctgtgccagcatgatagctgccttcaattcaatgggtacctccttttccgcttcagcaatttccgtttcagtaacccccagtgagtccagtttcaccttatcaaaacgttcttcatattccctcaccgctttatctccttccgtcttcactttatccagcacttctttaaccgtattgcgcagcgtgtctgtattcaataccggacgacggagaatttccatccagtctttcttttcaggatatattattttcttcatacatgtattcttttataagtttacaaatctcgcctgacgtatggaccggctataatatcattttctcaatgggcaataccaaaataccttccgctcccaatgctttcagttttccgatgatctcccaaaaacgcttctcgtcaagcactgtatgtaccgaactccatccttcttgtgccaatggcatcacagtaggactcttcatacccggcagcacttcgataatttctttcaaacgctctgtcggagcattcatcaagacatatttcttgtcttcggcagctttcaccgcttcaatacggaacaagagttcgttcagaatctctttcttctcctcagacatattcttattgcctatcagcaacgcctcacttttcataaccacttccacttccttcaagctattgcttaccaaagtagatcccgaactgacaatatcaaaaatagcatcagccaaactgattcccggagcaatctctaccgaaccggtaatgacatgaatatcagaatgaatgccattccgatccatgaaatctttcaaaatgccgggataagaagtcgcaatcttacgtccttcaaaccaagacaaacccggatagtccacatctttaggtatagccaatgacaaacggcacttgctgaaccccaaacgtttaatcacctcagcgtcctcttttctctctacaaactcattctcgcctacgatccctaaatcagccactccaccagccaccgactgaggaatatcatcatcgcgaagaaaaagaacttcgatcggaaaattagacgactgtactaaaagaattcttttagaagtggagattttaatatctgcctcttgtaataatgccattgtctcttcaaacaaacggccttttgactgtactgcaattctaagcatgattctatctgtttttaattattaaccggcaataaaaaaggcttaccgttttcggcaagccctatatcattatactacaatatcaccttagcccaccgaattattcgttaggaaaatgatgatgatgtgtagcagttctaaccatagtcttttctttttacttgcgacaaaaataaagtttatatttaatatcagcaaataattatcgcaaaaactttgttttttctttcaaattaaaggtattatctcatcttgctccacctcgcagttcaagaaatgcatttcttcctttgccttctcttgagaaaaagtgaaataagtgcacagcgccttggtgcaaagttcctccttattattataaatagccgcttctacaaatacgatattgcgcttcctctcctttatggaagccttcaatacgatatgcgaatcgttggtattaacaggtttcatatagcgggtttccattttggacgtaacaccggtagtctgtagtttacgcaaaaccacccatgcacaaatctcatccagcagcaccgcctgaataccgccatgcaacgtatcaatccatccctgaaactgtggctgaggtttccatatactaattacctcatccccatcctcataaaattccatcttcactccggcttcattgttgggagcacagccaaagcaattatatccttccatccctttccagggattgattatctttttcataggctatcttttagaattcataatccacacaagcacgatcagccttaacctccttcaaaaggccggctgcagctacatgatccggatgaacggcataggcattgacatctgccagcgtatcgaattcactatccagacaaatatcccatttttcagcagaattggcattcagtcccacaaatatatgacggataaaacctatcttggccggcaaagcttcaatagccgctttaaaatcattcatcactttcaatttttcttcctgtgaaagagtttctttcaatttaaataaaacaatgtgcttaaccatacttgatattttaattaattatcctacttttgtaatcgacacagggctaaagtatttaacctgatgcaaaagtaacagttttgttttaaaatacattctattattatgataattattggtatagccggcggaaccggttcaggaaagaccactgtagttagaaaaatcatagagagcctgcccccaggttccgttgcagtcattccacaagattcatattataacgatcagtcatccattcccttggaaatacgtaaacaaaccaatttcgaccatcccgatgcttttgactggccgctctttgaacaacagattgccgacctgcgcaaagggcatcccattgagcagcccacctattcttatctagtatgcacacgcctgcccgaaacagttcgtgtagagccaaaggaagtcatcattgtggaaggtatcatgagtctctatgataaagagttacgagacttgatggacttaaagatttttgtggatgccgaacccgacgaacgtttgctgcgtgtgattacccgcgacatggtggaacgcggccaccccttggaaatgctgatagacaaataccggaacattctgaaaccaatgcatgacgaattcatagagcctaccaagcaatatgccgatattattatccccaatggaggcaacaaccaaaaggccattgaaatccttaaactatatattgaaaagattttaggaagatgaaaaatgtctggctattagttcttgcctgtatatgcatgacagcgtgccgcaaccggcaacaatctgccgaagtgacaaattatgatttgccacaaataaaagacagcggagaattagtagtcctgacactgaacagttccacttcttatttcgactatcggggcgagcctatgggattccagtatgagctggccgatcagtttgcccgttcattggatgtaaaactgaaaataaaagtagcacagaatgcacgtgacctggtccataaactattacaaggagaaggagacctgatagcctataatctgcctgtcaccaaagagttcaaagacagtgtagagttttgcggggaagatatcatcacccatcaggtattggtacaacgtaatactcaaaaaaagaagaaagcactgaataatgtgacagaattaatcgggaaagaggtctatgtaaaaccaggaaagtatctggaacgtctcatcaatctggataaagaactgggtggcggtatattgatacacgaagtcgataatgacagcatcaccaccgaggatttaatcatgcaggtttccaatggtgagatagattatgccatctgtgataacgaccttgccaaattaaacaagacttattaccccaatctgaatattgacctggctgtcagttttgaccaacgtgcctcatgggccgtacgtaagacctcaccgctactaggtgaagctgctactaaatggcatcaggaaaatatgacttctcctgcctatcaggccagtagcaagcgttattttgaaataagcaaacggacacctcacggttccatcttgtccatcaaagacggaaagatttcacacttcgatactctattcaagaaatatgccaaagatatagattgggattggcgtattttagcttccctggcctatacggaatcaaactttgatacaacagccgtatcatgggcaggcgcgaaaggattaatgcagctcatgccccggacggcgcgtgctatgggagttcctcccggtaaagaacagaatccggaagagagtataaaggccgccgtgaaatatatcgctgccacttcccgttctttcaacgcaataaaagatgaaaacgaacggatgaaatttgtcttggcggcttataacgccggaataggacacgtactggatgccatggcactggctgaaaaatacggcaagaataaatatgtatgggacaacagcgtagatgactatattctgcttaaaagtaatgaagaatatttcaatgatccggtttgtaagaatggatacttccgaggggtagagacttacaatttcgttaaggaagtaatgagcagaggggaagtgtataaaaagaaaatcaaagactgacagccactccttttattatttcaggtggactttaaaaaacactccgccggaaaagtaacggcagctgttgaactctatcaccgcattgatataatctttccaaaagctgtattcagcacctatattaattgtacgggcatcatattcagccataaggttcagcttcaaccggttccgtagggttgaaacttcagttccttcagtctgggaccaaggtttcaccggattgtaaccatggctttgtcgggatgcaaccatagttctggcgatccgcaatcagatttccatcaggctgtagtcagtgtcttgtttgttggtgtacaatattctgccgatccggtttccgggtgctgtgtgcctgtattcccaccttttcccagcgtttggtcatcctccgcctcctgtttctttcccctcctacggactttttggggtagaaaagaggtaaaagtggtggcagccctttttaccatataaaaaaagtgctgccaccaccctatgaaacgtcctgcccatggtgctttcaatggaaagggtggtagcagtagcagcagttttgcaaaactctgtagtggaagttttcgcgtaggatccggaatttcacctcaaaagacaaggacgttttatcttattttccggtcatttcatccaaaatgaatactattacaaggatggtctttttaccccaaagaaacaagttttttagggagacatatcggattcaataaaaaaatcatcaaaaagacatcattgatatataaccacaaaggaaataacaagcggaataccttcaaatctcctgtcatgtattgtcatggatagccagttgtcatagaagaaggggcggtgaaaaagaaaaaaggctttcctgaagggggagcgtaaaaccactccctttttggaaagcaggatacagcggacatccgataccgtgaaaaaagaaaaaactgccagcacattgtgaagtgcaccccaaaagttagacactaaactcttgaggtgtttatgggaaataaactctctttagtccaatgggaattgccggacgctccactgctttgcggcaagtcacacgaatattctcattaacaccacgtgcattgccggaaatgtaaggcatgtcaatggaagggatgccgctcttattatatcccatagatgtcatgggaaaaacaaaatagcgagggctctgcgcttctataaaaggaaaattctcttcatactctgccctgctcagttccagcatatattcaaaatattcgcggctcatctctatttgtttgtcaaaaggtaaagttttgtccagtttccaaatagcagtacaatccataggatataaaggattaccttcctgatcgagaaccacaagatacatatgtccgggtatctcgacaaattcaatacttattcctgcactcaaacaaaggcttgccattgcgcaagttagcgtggtacaatatccctggccattattaaacacttcggcaaaagtagacaggagcgttccctcaaaagaatatactactccatatttattcatcaaccaataaaatgcaactaattgctccttgacataatcatttccccactgataaccaaaaaatccatcttttatgtctgcgatatcactcattgcttcctgtttcagtctacttaccataggattattgggtgaaacataaccaaagaaaaaaggctcaaaagacaaatagcatatttcaccatcttctctaataggatattcaccccaatccaacgttttcaaatatgcaacataatccttagcatctggagtatccagctcccaataaacagagtatggatcttcttgaaagggagatacattaaattgtttggaatattgacaaattatatttcctttcattctgatttcccattccatcgtaataggcattgctgattttatggaagaaaatttttcatatttccatttgataggaaaaaacatttcgatacgctcgtctccggttgtcagcatggataccgttctctcttcattgagggctgaagctttcattgtcacatggatttcttgcccggcagccggattatcaaaggcaagtaccatatcttcaaaccgatctcccattttataatatttactgatacttggagccagataagtaaaaagtggcgagatataatcagttcccctggttgcgaaccaactctgcgacaatgcttctacatgcaaatccctcattggaatttcctcgttatcagcctcttccacaacctcggtataataattcttctcacaggctgtcaagcagactgccaaacacatcccagtcaatatccgggaaaataaatttgttaatttcatatatcttatataataatacaaagcaagaaactgttttaaaataattggatgataatattaatcagtcggtcagttataataattttaaattcgcaatccccaaaatcatgagctataattatccgtttaactaaaaacaatggcaagtttattaaaaatactgtagatctacaaaaaaaataatcaaaagagagatcagtcaatgaaattttaacaaatttgaaaaaatcattaagggtactcccagataaccttgtgccgagtttatccctgtgtcactattttgctatttgtgttattgccttgtctacgggatataatgttagggatcttactcttaatttctgcaactttgcaaacaacaaagactcactgtcaatgttggctgtttctgatatcatattcaacgctacaatatcaagatctgagaactagagaatagctcttcttggtatattttcgttattgattaaattaccggctaccggtttgcatatgttcaggaattttgccaattttgcacattggttatgtatataatatttgtttgttaaaagtttactacttttaaagtgttgaatttcagtaaaatacaaacctattattcattgatcttttataaatttaattccgccaacgcgttatgtattaatcaaattttaaatttatcaatatgaacagcaaattttttattttaattcttttatgtatggtgtcgctctctttcagcagttgtaacaaagataaagatcggaaggtgagcaactcagaacgtcttatcggtgaatggatttatcgtacaacacaggaaaagacaaacggggagtggaaagatatgcctacacaggtaggtgctgaaggcatgcagacattctataaagatggaaaagcactcatcactatgacgtttaaaggtgagtacatggagcagaaatttgaatggaatttgaaagataacaatgattatatcatcaatggcactgtgagaggacaaatcttgtttgaaagtaacgattgcttctatctctactcggatgaaaccctcgatccggaaacaggcgagaatattaaaggagagtttcacgatatttacgaccgtaagaaatagtttatgaagcaggtcgtttacagtgcacttttacttcttgtttgctttgtttgcggatgcgacaagatacagaaaggaatccgggaagcagcggtttttgttctggctgctcccgattataatgaatcgaaaatgtggtatgtcgaacgtaatgaccaaggcgatggtgtcgatgtgttttacattccttctacttgggagtttgattggaaaacatccgacagtcttatttctcattatgcagacccatctttgcccgaacatcgtgtacacatggaaaccgaaatggccaaggtagctgaatacatggcattgggaaataacttctattctcctcattatagacatattacccttgattcgtgggcgacactcaatgaagataccattgcgcgcagatatatggatgtgtcttcaaagatgtaaaagctgctttccaccatttcctcataaattataaccaaggtcgtccatttattctggcaggattcagtcagggtggaaagtcggttgtggaattgatgaagcacttgtctgaagaggaacgtaagcggatgattgccgcatacgtgttgggatacaaggttactcctgctgatgtggagaaagcaccgtggattaaaccggcaacagactctattgacacaggagtcaccatttgttacaattccgtttcggatgtcaaatacataaagtccgtagtcagtgctcccaatgtgatgtgcatcaatccggtcaattggtgtacagatgctactccggcagtgctcaacgataccattacggtgactgttgaccctcattgcaaggtacttgtgctacaagggtttgatgggtcttacttgcctaacatcctcaatgtattgaatacgggcgattatcacggtatagagccatgggtatacagtgactgcctaaaaaagaatatgcgtcagcgaattcgcagttttcaacagaaaaaataggcaggtaacagttaagtggcaaaaatccatcactcgcttgcgtttttctgcacaacctcaaataactattcagctacaaaagtagttaatttacttgatcttagcaagtttttatgaaagattttcaagggagatctggtccggtttcgggcttggtctccttttttatttctatccgtaagataccctctttttactgtatttacctttcctccgaatagtttatttctggtaatagggttttaccctctcaaaaaacttcaaaaaaaatacatc

SEQ ID NO: 3895 - DNA, 13819 bp, Unknown
  gut microbiota DNA sequence
gtctaaaggaaagataacgaatggatatggtttggcacaagaataaagattatatatgaaaaacattttatctgtttgcgcatttttgctagcctttggggcgctccctttatgggggcagtcccaagatcctttgaatgaggatcaaacaactgtacgtattttagaaggtgataattcggatccttctattgtccgttatggaaaatcttattatctagttcattcttcttttgtttatactccaggattggtagtttacaaatcagatgatttggtgaactgggttccatgttccacggctttaactacttttactggagatatctgggctccggacatcgtatttcataacaagcgtttttatatctattttccgactttgaatgggaaaggaaagaaaaccaatatggtaacttgggcggatactccggaaggtccgtggagtactccggtagatttgaaaataggaggaattgatccggaacatgtggttggtgaggatggaaaacgctatctgttgctcagttccggtgctttatatccattgtcggatgacggatgctctattacaggagaaccggttcggatttataaggaatgggaaataccggaggaatgggatatagaaggagtttccatggaaggcttgaacgtgaaaaaagtaggagagtactattatttgttcgtggccgaaggaggtacggcaggtcctcccaccagtcatatggtagtacaggcacgtagtaaaaatataatgggtccttgggagaatgctcctttcaatccgcttcttcgtacggaatcccgtaatgaaaaatggtggagtaaagggcatggctctattgttgatacggaagatggacggttatttatgattttccatgcttatgaaaacggattccagacattggggcgtcagacccttttacgtgaactggtccaaaaagaagatggatggttacatttgaaagaaggagccatttctttacctgcaccggaacgtttgaaattatctggtatagaagattttgtatggcagacgtgccgggaacataacttaaatgatcggttccggattacttctgataaaatcagtgtagaggcaaaggggaatactccaaaagaaggatctcccttattagcacgtaccagtgctcataaatatgaagtggaggcttgtcttgaactgaaaggtgaaaatacatctgccggattggtggcttattatgatgagaattatcattttggatttggttttaatcataagcagatgcttcgttatcggcgtgggcaagtaagtcgtacggaatcaaaacttcctcaagcaaaccaatgtggaaagatgtggttacgtttgcggaatgatgctaatgtattgtcggcctggtacagtgccgatggtaaaaaatggcataagtatccatggggatttgagatatcgggagtacatcataatacggtatatggtttcttgtttgtccgcccaggtatttttgccggtggtgacgggcaggtggaagtaacagattttgttttgagaaatcttgattgatgcgttgtttagctggaatttaatgattgaattgcttatgaaatattgctgctcttttttattgttattgcttttggggatttccggtggatttgcccaggataaggtggagtgttggggacgttatgaaatctccctgcctgccaaagtaaaggggaacccttttgatattgagcttacggcaacgtttagcggaccggatactacattgactgtacgtggattctatgacggaaatgataccttcaaaattcgctttatgcctgtgagccagggagtatggtcgtacgtgacgcagagtgagattcccgtgctgaataaggtgaaagggcggatagaatgtattgctccgggtaaaggaaatcatggtccagttaaagtggatggaacttataattttaaatatgctgacggaacgcgttattatccagttggaactacttcttatgattggatgcatgtggcaggtaaccagcctgatcagacagtgaaatcattggaactatccaagttcaataaaatcaggatgctgttttttgtgcaaaactttgatccggattatcctgaaccctccatgtttccttttgagataaagaagatagtaaaggatgaaaagggaaaacctgtgtatgaatgggatttcacccgcttcaatcctgcttattttgctcatgtggaagcatgtgtggataaattggtcggaataggagtagaggctgatttgattcttttccacccttatgatggtggtcgttggggatttgacagaatgcctttggaagccggtgtccgatacttgaagtatctgacagcccgtatgagttcatttcgcaatatttggtggtcattggccaatgaatatgattttttgagagaattaaaaccggaatattgggatacttttacacatacggtagtagagaatgatccttattcccatttatgctccattcatacttatacagctaagtattataaatattgggaacctgaatacactcatgccagtatacaggaccaggcacctgtagaaggttttggaagggcggctacggtgaagaatatttataagaaaccgattatttttgatgaggtatgttatgagggtaatatggataaccgatggggaagcttgagcggtcaggaatatctttatcgcttgtggcaagggctgattgtgggaacttacgtaactcacggagaatgttatatggataattcaaaagattattctcgtgattttctggctgtaggaggaacttttcaaggggagtcctggaagcgcatcggctttacaagacagattttggacgcacttcctaatcctctgcatttatgtgatagtagttgggacccttatacttcgactgccggagaaaattattatatgatttatctgggcaaggaaataaaaccggaatgggcatttgatttaccggtaaaaaacgctttttatccacgtttgaaagaaggagtacgttttaaagtggaagtcattgatacttggaacatgacgatagccgaatggcctgccgtttttgaaacaactgctcctgtaaaggatagggtgtatgataaaaatcaaggaagagtaagactgcctgcaagtccttatctgctgctaaggataactgaagtaaaataattaatgaatgtgttaatttgctaataggctgatttgccgtttggttccgctatgttcgcatgtcaattggcctattagcaaattggcaaattagcacattattcaaaatttgcacataatagaccaatttttacctttctgtcccctgtctctcgtttacttttgtagtagaacaaatcttaatctatacaaaatgaaacatttacatttcctcgcttttgccttgtgctggcttgtatggggacatctgttaaaagcacaaagtattgatcattatagttcgttagatccttcgcaacctatagaatttaaaggaaactgccttcgttatgcagataaagaaattattttaggtccgaaaacattttttgttgatgggcagttgtccgatagggaagtggcgggtaatccttatgtttttaatagtttcaataaagctgccgctaatttttcagctggtacggaagcggaaccgatgaaagtctatctggctccatacgtttattggattgatgatcctgacgatcctgctattcgtgttggaaaagacggtcgtgaaccgttcggcttggttgttaaatgcccttatcttcatattatcggattgaatagccatcctgaaaatacagtcctggcatccagccgtggacagacacagggggctgtcggtaatttcaccatgtttgatttttggggagacggtctgttggttaaggacttgaccatggggaatttctgtaatgtcgatttggaataccctctgaagaaggaattaagcaggaagaaaagaatgtctgccatcactcaggcgcacgtcgcttattgtcatggcgacaagattgtggcggataatgtacatttcatcagtcgcttgaacatgaatccgctgaatggcgccaagcggatactttttaataaatgccacatggaaagtaccgatgatgcgttgaccggaacaggggtttatctggattgtacacttcatttttatggtcagaaacctttttggagaagtgatatgggcggagctgtatttttgaactgtgacttttatgtatgtcatgaggaagaccggcaatatttttgtaagtcggtcgggccgttaagtattgtcgattgccgttatcattcgaagaagccggtttatgcgggctggacacatgatcccacagattggttgcgttgttaccaatataatgtgaagctgaacgggcaaccttatgtaataggggctgacaagccttataatacggtttgcatggatcagctgaatcaactgaaaactttccggctggaagagaatgaagaggtagtttataatacttacaatttattgagaggagaggatgattgggatcctcttcaggtgaaagatcgtgtcattgctataggtaagcgggatggaagggattatacccggatgccctcctgtctttctgtagagcctttaacggcttccatccagactggtggccagccggtcagactggttgcgacggtgaaaaggcattgcaactatgtactgaataatgttcccgtgaagtggaaagtacaacaaggttatgaaaaggatgtgaaattatctacttccgagggttatgaatgtgttgtcgaggcaactaatacggaggatgaaacaaaacatttcactgtgatagcctatacagaggatggtttggaatgtgcgacagaacttacggttgctcccgattatgtaccggctccctcgtttacggaagagccggaattgaatattgctaaaggagtagctactgtcagttatgctttaaatttgaatgggcgtaaggatgaatcattgataacctggtatagatgtacggacaggaacgggactgatagacttccggtttctgtatcccgcttgaatgaaccggaatattcctatacgttggtaaaagaagatgttggttattatctgatggcagctatcgctcccaagcatctgcgttgtttgccgggggaagaacggattgttgtttccaattctccaataaagaaagggcaagtgaatatcactcatatatttgaaacggattttcagaactttccatgtaagaatcaaccacaacttttaccgggattttggacgattggtggatataagcctttggatacggcagcatacgattggcaggtagttccggataaggattattggatttatggacctggaatgaatggttctcacggaaccggtttgttgcaggatcagaaaggagcccgtttgctgtatactccactggatggcagctatggagatatggcaatcacattgaatgtggatgccagtaaaacagcaggacaaggttttggtagtgctacaggacagtatttggatttgtatatcaagtttgatacccgtactttaacaggatatgcattacgtatcattcgtacgaccaagtatagtaatgcagttgattttatcttgatgaaatatgagaacggggtggctgaggctatcagtcaaccggtatcttctacctgctatcgtacagattgtaccataacattgactgttaaagaaggaagattgacagcacatgcttcaacaacaactccgcttccggcgcctgtaactgatccgaacttgaaactttcggtagatttggaggcggatatagcttcgaatacttttgggggcaccggaatccagcatacgggcagctgtggtgaaagtacaacgatgctgcactatatgaaggtggaatgggaatagaatgattattgaatttaataaaagaaagtaatagataattatgaagaagagtattattgccatagcatttttgttgttatgtccattttatggggtgagagcacaggagagaccattttttgatttgtcaggaaaaggatggcatttatggcaggataaaaaagcgacttggcagacagaggatatttatttgacattggaagaggcacagaaagttcctgcagctgttcctacagcgggatgggatatattgacttctgcccagactcttccggtacaggttcccggaacagctgaagaatatcttcaaactcagtccggacccgaaggagatattacaggagttacatggtggagtcgtacaatggatattccggtgttgaagaaaggacaaaaagtctttttgaattttggctctatacgttcacgggcggagatttttattaatcagagattagtggattatcagattgtggacaatgttcctttcgaaacggatattactccttatataaaatcgggagaacaagtacaattggctgtacgtataacggatgcgggtggtaaccatgattggcgtgactccagaactattccgtggggagataagatgttgcctcccggtcatggctttggaggaataacaggaaaagttggtatgaaggtatgtaatgctgtttatgtggcggatatttatatgcagaacactcctcagataaccaccgccaacgctattctgacattacagaatgaaaaaggaaagactacgaagcaggatcttcgtataacggtgtacgagtggcaaaataaagaaaaaatagtttattctaaagagataaagggtgtttctttaaataaaggtatgaatgaactgaagattcctatatcagctccggatgcgaaattatggagtgtggatgatcctaatctgtatgtatgtgaggtggagttatccgaaggaaagaactgggtagataaagattcccgccgttttggattccgttggttcgaggcttccggtataggtgaggatgctgtttttcgtttaaacggaaaacgtatcatgcttcgctcggccatcagttggagtttttggccggtcaatggtattttcccatcggaagaattggctgaaaggcaaattcgcatcgctaaggagttagggttgaatatgttgaattttcatcgttttatcggtaatactgacgtaatgaattatgctgatgagttgggactgctctattttgaagagcctggcggcttccgtctggatgtgagacagccgtttatgaatgctgttttgcatgaaaaggtcgtccgtatggtaaagagggatcgcagtcatccctgtctggttatctacaatatgatgaatgaatctggaaatgctgctcctgaaaagttggcattggaaattcaagcgatgaaggatatgcgtgtactggatccttcccggctgattcttcgtacctcggcttgggcaaagggggatgatatagaagatcaggctaaaattcatattcgtccttacgatgaaaaagtgtattggagtggctggtatgattatcatcgtgccggaggacctgctgtttggaatgaaggtttgtacaaaggccctgaagattattataatgatacaaagaataagcgtgaaattgtattctttggtgaggaaggggctttatcatcacctcctcgtttggaaaagaataaagaagatttggaaaaatatagctataaaggatgggatggtagagagtttttacgttggtatgatgaatttaatgaatttctggatgctaaacagctaaggacagtttatcctaccgtagatgatttatgtgtggctatgggaacggtgtcttatgaacatcagggacgtaaaatagaatcggccagaatgaataatttgacggatgcatacgttgttaatggatgggaatcggaattgacggagaattattcgggaattgtcgattgttttcgttatcccaaatcggatccggctattatagctcgttataatcagcctttgtatgtagcggtaaagaccaggcaacaggttgctgccgcagggggagaggtgaccgttgacttttatctgattaatgagaagaatgtccggggaaaacatcaattgaaaatctcggtgacggactctcaaggaaatataacggaggtagggacttatgaaacagaagccgccggaggtgaggtttatggtcagttgttggtgaaagatgtaaaaatacctgttcctgcagctggaggactttgtagaattcaagcaaaactatgtaaggaaaattctgttgttacaactgggtatgatgatatattgtctgtaaatctggcatccaatatgttggatggcaaaggggccgtttgggaagatggaaacgctttacagaatttcttgaagggtaaaacgaaagaagcggttgcggcttacgaggataatttaggaaagttggattggattatggtggtccgtcctcctaggaaagatcagttgacaatggtgccgatggaagcgttacgctctgccgatggcaaaccgggattggatgtggtctattatgaggatatggaatttcagaaggaagtttatcatgaagtggccaaggtggttaatctgagtgctattgagggagctacaccaagtccttttgtgtatatgcttgatggttatggtattaaatggagtggtaaaatacttccctctgtcagtggtgaatatacgattattcctcagagtaatgaccgtagtatgattgaagtctttgtcaatggtaagaaaatatatgaaattaccaggaagaaagagcatttgggcgatggaaaagtctatttggaaggaggcaagtctgccgatatagagattcgtttcaggcatcctcgcagtaacgcgcgttgtcgtctggattgggctgttcctaatgataagatgccggatgcacagcgtttaatggaacgtgctgtaaatgatggaaccaaaatctttattattcagagtgctgatgagtggtcggaatttatagcggctaatagtaaagcggtgtttaaggacaaattctttgttggaaccaactggctgggcggggtgatgtttaataagccgcatgatattttcaaggaacttcctgtcggaaatgctctcaactggccttatcaggcattgatacatacaggggtggagcgtatgggattggtgatggaaggtgaagaattgctggtcggagcctatcatacttatcctatggctatcggaactgctatggggattgtaccgatgggtaagggtagtgttttgttctctacattggatatctatgggaacatcattaatgattcggctgccggacttgtagccaaaaaactgatattcaatatgattgattttaaataaaataacagataccatgaaaaaacgaatcctatgcttttgtttatgcctgtattgtatagggctatgggcggccaatgcttcttttaagaagacaggaaatgatttgttgtttcttctgcctcagggaaatgtgaaattggaattttgtacagatgatatgttccgtgtacgtcattctcaaggtaccgtgttcgctgaaaatgagcagtggatggttcggaaatatgattttactcctgtacactatacagtggaagataaaggtgctgcatggttgattacgaccggaaaactgattatagaggctaccaagaatccgttctgtctgtctgtttccgataaaaacggcaaactactttatacggaacttgcggaacaacgtttttataaggattctgttaagacgaaagctgttctacaaccggatgagcatttctttggttttggggagcgtatggatttcatggatcagcgagggcgtaaggtctatctgaatgtagagttgggaagagggataaaaccggctgtaggaggaaaagatattttacgtgccaattattgtcccgtaccttttatgatgagtaccaaaggatatggtttgttctttcatactccgtttgctaccgaatggaatatggggtgggatagtagtgattattattcgttcaaagcttttggcggtgatttggactattattttatgtatggtcccgatttttataccatgattgaccgatatacggaattgactggaaaatcccccatgcttcctcgttttgcaatggggttgcatgtcggtacttattccggtggaacctggaagaatgaagagatgacttccgataaatacccgcctgctttatgtaaacgtttgcgtgaggaaggagtgccttttgatttgctttggctggattctacttggagactgtttaataccacttacggaaatggcggttgttgctttgaatggcgcaatacgttcaaagatccgaaagccatgtttgatagttgctatgcgcaaaatgtaaagatggtggggcttcatatccgttccatattagataatggccctgaatatcatctgttggataaggcgcgtgaacagggaaatgtgctgtatcccggagcaaagacagaaggagtagtgaatttctttgatccgaaagcggtagattggtggtgggagaatggagtaatgaaagtagcttccatcggggctaagtttgtgaagacggatgtcggagggacgatggacctgaaaggacttcataatatttttcctttggcttatgcggaagcaccctatcgtaaatttcaggaatataataatatgagggggttgacacatacccgtgaaggttatgcgggaattcagcgttatccttatatatgggccggagactgggggagtgaatggcagtggtttgaaccggtgatacgtgcaggacttaatatcggtatgagtggtgtaggtaactggactcattgcatgggaggatttgaacaatattctccttacgatacggaattatatacccgttgggtacagttcggtatgttttcacctatcgctatggtgttcggtatggaccatccccgttatcatgagccttggacttatggtccggaggccttggccaattttatcaaatacgatagtttgcgttatacattgattccttatatttatagtaatgcctatcagctttataaaacggcacgtcccatgatgactcctttagtgatggattatcctcaggatgagaatacctatcagctgacacgtcaatatatgttcgggccatggatgatggtttgtcctgtcactaccaaaggtgcactgagccagcatgtctattttcccggtggagaatggtttgattatgaaaccggtgagcgttacgagggccgtcaatataagtcttttcttactccgctggatgtgttgcctgtctatataaaagccggagctattattcccatgcaacctgctatgcagtgggtagatcagcatcctgtagatgtgataacattggatgtctatccgtcaggtatttcttcttacgagatgtatgaagatgatggtatatcaatggattatcaaaaagggattggttcattgacccgctttaccagcaggctcgctgatggtagttggacgtttactgcagataaaccggtagggaagtacaaacctgccagacacacttatctggtgaaggcttatttgcagaacgctccgcaatctgtgatagaaaatggtaaatcgttgcccgttctttcatcggttgcagatgcagaccggaatacaggctggttttatgatacggagcataaacgtctgtatgtgaagacagccggagataaccgtcagaaaattgaaattgtggtacaataacttaaggattgattctatgagaaaaatcatcggttttcgcactttatgtgtaggtttgggaatatggggggggactgttggggtatctgctcagggtgagttcaaggcattaccttggagtcaaagtaccgcttataattcttatctgatgcgtgatgtacatcggcagtttgctgatcggcagtcggctattcaacaagcgtttgcttctcctgccgggatgcaggagtatctggagggttgccgtgaacgatataaacaaatagtaggtacttttccggagaaagggaatttaaatgctcaggtggtggggaaggtacaaggtacgggttatcatatagagaaaataatttttgaaagcaagcccggccgctatgtcacagcacatctttatatgccggagaacacgactgttcctgttccggcaacattggaactttgcggacatggattgaatggtaaagggccttcgtctcatgccgctatgttgatggcatccaatggcattgctgtactggtggtagatcccatagggcagggagaacggttgcaacttattgacagggaaggaaagccgctgacacggggggctaccacggaacataccttactgaatgcgggctttaacttgcttggtactagtttggcggcacaggaatattgggacaatcatcgggctttggactatttactgacccgtaaggatattgatccggagcatatcggagtctatggatcttccggcggtggcactcagaccgcttattatataggtttggatccccgtgtaaaggtagcggccatttgtagtttcttttctacccgagaacgtactatggagttgcaaggtccttccgacggttgccaacatataccctacgaagggcgtgaacaactggaagtacctgattttgctttaatgatggctccacggcctttattgattttaagcggtaaatatgattttgtcgatttgtggggggcgcagcaaggatatgctgaattacaacagtgctataaagtattgggagttcccgaaaaggtggatatgctgacagtagaaaccggtcatggacttggagttgaaaaaaggcaaaagctggtcagttggttcaaacgttggttgaaagatgatcaatctccggtgaagaaagcggcacaagaccgtttccagttgtcagatatgctttgtacgactcgaggacaggtgaatgtatctatgcctggagcactcagtattatgcaggaaaatgtgaatcagctggatgagtgggcttccaagcgtgaggcgtttctttcgaaaggaaagaaaactgttcaggcaaagatgttggatttgttaggtcttaaaggtcttcctgaccataaaataagaattgaggcaaccggacatgattctatgcgtgaatatgagcaatataaatttcagcttataagggaaggggagatgcctgttccttgtattcttattattccgtccagagcgaatgctgattctcctgttgagttaaggttacaggaagaggggaaaggaacttatttgagtgaatatgcaaattttgctgctgccttgacggaaggaaaaattttgttgttggcagatttgcgcggattaggggaaacaacggaccctgcattttatacggatgctaaatattggaaccgtgaatatcgtaatgcaatgatcagtatgcatataggacgtcctattatgggacaacgggtagtcgatatcctgactttgcttgatttttgttcagaacacgaatttctgaaagggcattccgtcaaagtatttgccaatggcatttatggtccagctgccattcatgctgcttatttggatgaaagaatcaacagtgtggagataacacatagtgtgaaaacttggaaggaatacattgagaggcctatgcagtgggatatgtattctaatgtgttgtatggtgccttgaaatattatgatttaccggatttgataaggttaagcaatcgttccattcgttttgcagattaaaaaatagaattcatttccactgcaggagcagattgctgtgccctctgggtattta

SEQ ID NO: 3896 - DNA, 40368 bp, Unknown
  gut microbiota DNA sequence
cgggctgaaacaatctatcagcatacccggttccagacatacacaaccatgcacagcatccggttccttatacagacagtcgccggctgatacaattttctttacgccattgatggtgaactcaaactttccgctttccacataagtcacttgtgaatggacgtgatgatgaacagctcctacagctcccttttcaaatttcactttgacgaccatgatgtcatcattgtaacccatgatctggcgcactacaccttcgcctgcaggttcccattctttgccttctgcaaagatgaagttctcactacctgttgtcataacctttttttcagtgtttttgtttgtttcttcagtgcactctttgttgctctcttttttttcactttgtgcattgcagctttgcagtatcaatggtgccatcagggcacaagcatacaatgcggttcttactttacgattcatgatcttgcatttaatataaaatgaataactaaaacttttcttcaaatatataaataatatggggagagtggttcatcgtgattaaaatatacgaggaaaagaccaaatattacaaatccaagccccgaaaaatggcttattttgcttcataatgatatttaaacttgaatcaaaacactaaaacaacaatgaaaagcacattaaagaagaaatggggaagaattgccctttgcttgtgtatggcaaatcttgcttgtgtaggtatggctcaaactaataaaaaattagatgaccaagttataaatacgatgaaaaccgccactcagttcatgatggacaaggtgagttataatggtggcttcgtatggaattatttgccggatatgtcccgttcatggggagaaatggaagccaagaggacaatggtttggattcagccgccgggaactccttctgtgggtcatctgttgcttgatgcttatcatgctacaggggatgagtattattatgaagctgcaagaaaagtggctaacaccttgatttgggggcagcttgaatgtggcggatggaattatgtgttcgatttcgcaggagagaactcgttaaagtcctggtatgacaccgttggtaaaaatggctggcgtctggaggaatttcaacattattatggaaatgcgacttacgatgatgcgggcactatggaggctgccaagttcctgcttcgtatgtatgtggagaaaaatgatgctgctttccgcccggctttggaaaaaaccattgattttgtcttgaaaagtcaatatccggtaggtggatggccccagcgttatccattgatgcatgatcatcctttccagggtaagaaagattattcgtcgttcatcactttgaatgatgatgtgattcctgatgcaaccgaatttttgattcaatgttatcaggcgatggggctgcaaggggtgaaagaacccattatgcgtgccatgtacttgatgatttctcttcaacaaggggagccttatgccggttgggcggatcaatacacggtggatgatttgaagccggctcatgcccgttcttatgaaccgcgcagtgtgaacaccggtaccactgtccgtctgatcaatttaatgatggaatactataaacttacagctgatactcgtttcctgtcgggtattcctgctgccattcattttctggaatcaatgaaattgccggaatcggatgtgaagaaatggaagcgtcagtcaaataatccggaagctattctggtacctcgttttgttgatcctgatacaggtaagccactgtatgttcatcgtaagggaagtaatgtgaaaaacggtacttattatattgatcagaatatagaaaatacgataggccattataattcggctacttttgtgaatccgagtgaactgcgtcgtcgttatgaggaggtgaagaaaatcccggtatccgagttggcaaagaattcacctttcttgcaggatcaattggttcccctacctaaatattatactcgtttacgtggaaaagcaacggaagaagttgcccggggattggtgaagtcactgactaaggacggttgttggctctctcctttaaagtcaacctcgaatccgtataagccatatacagtttcaggtcctagtgaagagacgaaatatacaactacttttgtaggagacgagcacgatacatcgccttatccgtgtaccaccggagaattatgtatctctgtaggagagtatattgacaatatgatgaaattaatcagttaccttgaaaaataaagtttgttaggtataggtttatgaagaaaacagtaatttgtttattgttgttcgggataggtctgacggtttctgctcaagaaaaggcggaaaccgtttctatgcgttatgaaacgcagaatgatatgccgttgttttatcagaaactgaaggaaagtctgacttatcctatggcatggaggaactcttctatccggaatttcgaaaaatggcgtgagggggctagaaaagttttgttggattgtatgcaacccgctcctcctgtggcggcttttgataaagaagtgatagataccgagcaacggaatggatatagggcggagaagattttgttcagtgtttcggaatattctcgtgttcctgcttatctgttggttcctgacgggaatggcccgttcccggcagtattgctgcttcacgatcacggtgcgcatttttcgatagggaaagagaagatggtgcgtccgttcggtgtggaagcatctgtactggccgatgcggacgattgggcggaaaaatgttatgacaaacagtatgtaggtgattatctggcaagtcacggatatgtagtgcttgctgtggatgccttgttttggggggaacggggacgtaaggaaggagtacgctatgactcacagcaagcgttggcggccaatatgttacagatgggaatgtcttggggagccttgatagcctgggatgatattcgtagcgcggaatttctggcctcattgcccatggttcataaggaaaagataggtactatgggattttccatgggagcacatcgtgcctggatggtcagtgccgctacagatgtggtgaaggcaggcgctgctgtgtgctggatgaatactacagatagcttaatgacacttaccaataatcagaacaaaggtgggtctgcttattccatgattattcccggaatacggaattggatggattatcctcatgtggcatctatcgcctgtcccaaaccgatgttgttcatcaatggcttgcgggacaaactttttcctgtaaagggcgttgaaagcgctttctctaccatgcaggatgtatggaagagtcaatcggtagaaaatctgttgaccaccaagttctatgatttgccccatttttgcagtaaggagatacaggatgatatacttgagttctttaatcaaaatttaaaatagaaagcgatgaaaattaagatgttgatggcatttgttgccttgttattgttttctgcttttacggcagaccgcacaattactatctttatgataggtgactcgactatggccaacaaacccttagagggaggtaatcaggaacgtggatggggccatgtgctgggaggatatttcagtgagaatattcgtgtggaaaaccatgctagaaatggtcggagttctaaaagttttattgatgaaggattgtgggaggtagtaattaataaagtaaagccgggtgattatgtttttattcagtttgggcataatgatgagaaggccgatgagaaacgtcatactgatcccggatctacttttgatgccaatctacgccgctttgtaaaagaaacacgtgctaaagggggaattcccgtgttgttcaatgccattgtccgtcgtaatttccggaataataaaaatgcggtagccgaagacgatgtgcgcaaggatttgtcaaaggggagtgcttctcaagatggagaagtgttgattgatactcatggaaaatatttggagtctccgcgtaacgtggcaaaagagttggatgtgccttttgtggatatgaacaagataacgcatgatttggtgcaggagatggggccggaggcttcaaaaaaattgttcatgtggattcctgaaggtgtgtgtgcagcttgtccgaaagggcgtgaggataatacgcacctgaatgtatatggggcgcgtactattgctggtttgacagtggatgctatagctaaagaggttcctacattggcgccttttgtacgtcattatgattttgtagtggcaaaagatggcagtggtgatttctttaccattcaggaagcgattcatgctgtccccgattttcgtaaagcaggacgcactactattctagtccgtaaaggggtatataaagaaaaagtggttattcctgaaagcaagattagtatttctttgataggtgaggatggagcaattctgacaaaagatgattttgcttctaaaaagaactatttcggagaagaaatgtctacctccggttcatcaacctgttatatttatgctcccgatttctatgctgagaatatcactttcgagaatagtgccggcagagtggggcaggcagtggcctgttttgttagtggagatcgcgcttatttcaaaaactgtcgttttttgggaaatcaggatactttgtacacttatggcaaagacagtcgtcagttttatgaccattgttatatagagggtacggtggattttatttttggctggtctacggcattgtttaaggattgcaccatccatagtttgggtgatgggtatgttaccgctccttctacagatcaaggcaaaaaatatggctatgtttttataggctgtaaattgacgggtgtggctgaggctcagaaggtgtatttgtcccgtccttggcgtccttatgcacaggctgtttatattcattgtgatttgggaaagcatattcttccggtgggttggaacaactggggcaaaaaagaaaatgaggaaaccgtattctatgctgaataccggaatacgggagaaggggcggctaccgcttcgcgtgcttcgtttggaaagcagctgaacgatatcagtaattataatgaagcacagattttggcaggtgatgacggatggaatccggtggaaaatggaaatgtgttgttgcagaatttaaagagataagctgttctttctaccagtaataatactttgtcactgtagggaggaattctatttgctcctatggaaagtgtcagggaagagtagaatgataaaagggggatttaactttgccccttttatttttttaggaacttgtatgtcagtatctctcgttttttatgtatttttgccatactatatatgaaaatctacgaaatgaaaagacacattctgtttatacttactttgctgctctttttttatgcaaaaagtcagcctaattgtatctttactcattattcttcggaaaacggcttgtctcagaactccatcatgagcatggtacaagaccataatggagttttatggttctctacttgggatggaatcaaccggttcaacggttatgacttcaaagtttataaagccagacaagggaataaaattactatgactaacaaccgggtagacttattggaagtagacccttataattatatttggctgcaaacgtatgattaccgtgtgtatcgttttgaccaaagaacagagaaattcgaacaaatccctgctgaaggtgaagaggagggtatgcgtttctcttctattaaaatattgcccgacagtgtcatttggctactttctgaaaatgagggggctgtccgtgtgaaaacaaaccctaaagattacagtataactacccaagtatatgctactcatagtcgtggaggaaatgccgttcatattaatcaggtttttagcgatgcttacaatcaagagtggttgcttactgataacggtctgctgaagattacgaatgataaagaagagcctgtctcttattttgtgaatatccagtcaggcaaagatgaacccgtacaggccttctactctttttgcagttatggtgacgaactttattttggatcagacagaggacggatatggtgctattctttgcagaatgaaatctttcgtctttgggaattgccggtaaaggataaagtgattgctataaatgaaataaaaggtacgggactgttgataacgactgcccatgaaggattgatattgtatcattcggatacaaaagagtgtaaagtctataataaatccaattgtcccgaattcccggcagacgctttccgttctgtttatgttgacagtaagcaggaagcatggtttgagatgaccgaatggggaaaagtttgtcatttcaatcctttgacggaagtatttaagcaagaaaagatgcaagtggagcctcgtggtgccgatcgttcctatcccagttttcatatttgtgaagacttgaacggtaatttgtgggtacatccgcaaggaggagggctttcttggtatgacagagaggcaaatcggctgttgcctttctataatgatcccgattcacccgattggcacttttccaataaattacattccatgttatccgataagcaaggcaatctttggttatgtactcattctaaggggttggagaagattacttttttaggaagccagttccatatttatccccgcatgggtcacagttatgacttgaattccaatacggtacgtgcgttgtttgaagatagcgaacatcgcatctggatgggaaaacgggatggtcagattgaaatttattcttctgatttagattttcagggtattctgactgaagagggggatatagccaaatctggcagaccgttacggggagttccttatcatatcatgcaagattctcacggaaacatttggattgcgaccaaaggggatggtattattctggcagaaaaggaggggacccattttaagtttactcgattcaaatatgatgaagatgatatttatagcctgagtcataatagtgtttactggttacatgaagacaagcatggacgcatttgggtggcaactttcggtggagggttgaattatattcagaaaactcctgaagggaaatatgtgtttattagttctagaaataacctgaaaggttttccgtatgaccgttgttaccgtgtacgccatatcacttctgacaagaaagggaatatatgggtggggagcagtgatggcgcgcttagttttaaagaggattttaaagatccggagtcgattgtgttccatctttatgcacgtatccccgatgatatgaattgtctgagcaacaataacgtatatcggattgtcaccacttcacaaggagaagtttatctggctacatttgggggaggacttaaccagcttgtttccatgaacggggaagggaaggcggtatttaaatcctataccgtgaaggatggtctgccttcagatatcctgttgtctgtagaagaggatgacacggggaatctgtggataagtacggaaaacggattgagtaaatttattccgtccgaacagcgttttgaaaattataatgaacgggattttgggggcaaaatacgttttgaggaggggacatcgctgaatcttagttccagtaccctactctttggcaccagtcgtggtatgctttattttgaaccggaacatatcaagaaaagcaattatgttccatccattgttttcggaacgttgaaaatatccaatcaggaggtgattccgggtgtatcaggcagtttgttgcgacagtctcttgataatacagaacacctggtactttcgcacaaggagaatattgtaactttgtcctttgcagccttggatatgatttatcctgaaaatatccgttatgcttatcgtttacgcggatttgataaagaatggaattatgtagacagacagcgtaccgctacatatactaatcttccgaaaggagagtatgtctttcaggttaaatcgaccaatagtgatggggtttgggtagagaatgagcgcagtttgaaaatcaccattcagccttcgttttgggaaacggcttgggctatggcaatttatattcttgcttttctgttgattctgttttcaggagtatatatattgtttaccatttatcgtctgaaacatgaagtgtctgtggaacagcaggtttctgatataaagcttcgcttttttacaaatatttctcacgaacttcgcactccgctgacattgattgcaggtccagtggaatatgttctgaaaaacaagactttgccggatgatgtacgtgagcaattgcatgtagtagaacgtaataccgaccgtatgcttcgcttggtgaatcaaattcttgatttccgcaaaatacagaaaaataagatgaagttgcgtatagagcagatagatattgttccttttgtacaccatatcatggataattttgaatcgctggctgaagagcatcatattgattttgtattcgaaagtgaaatgccttccttgaaactgtgggtagatgcggataagttggaaaagattgtcttcaatctgctttccaatgctttcaagtatactccacatggtaagatgattacgcttttcattcatgaaaatgaacataatgtggcgattggtgtgcaggatcaaggtataggaatttctgaaagcaagaaagcttccctttttgtccgttttgaaaatctgttggacaagaatttgtttaatcagcaaagttctggtatcggtctttctttggttaaggaattggtggaactgcacaaagcgactatccgtgtggatagtaaagagggggagggcagttgtttcacggttgagtttttgaaaggcaaggagcactatacggagaatgtagagttcattctctctgattctgtcgaaatgaggccggaagaggtggaagaatctgttcagggacatgaagagaagaggaatgaaagcaaaacgatgttgctggttgaagataatttggaacttcgtttctttttgcgtagtatctttatctcaaatttcaacgtcatagaggctgtcaatggggctgaaggtttggataaggctttgaagtttgttccggatattattattagtgatatcatgatgccggaaaaggatggtattaccatgacagaagatttgcgtgctaatatggcgaccagtcacattccagtcgttttactgacggctaagacggatatggacagtaagttggaaggtatggaactgggagttgaggattatataacgaagccgttcagtgctacttacctgaaggccagggtggagaatattctgacacaacgtgtcaagttgcaacagttgtattgtgcgaatctgatgaatattcagcctgttgcggaggaagaacagcaaacacagcctgagatgtcttcccatgaccgtaagtttatggagaaactgacggaattaatggagaagaatatggataatggcgatttgatagtggatgatttggtacaggagcttgcggtgagccgttctgtctttttcaagaaactgaagaccctgacaggacttgcccccattgagtttattaaagagatgcgtgtgaaacgtgccgcacaattgatagagagtggtgattataatatgacgcagattgcttatatggtaggtattaatgatcctcgttatttcagcaaatgttttaaacaacgttttggtatgacacctaccgaatataaagagaatgcgaaaaataagcgataacttttgctgctgttggttcgtttttgcagcgtttgtttttttgatttcttgaacggtatgtttaaatgtagggtgtttcttttgttatgtgagtgagttgctcatgttattttattatttttccggatatgcaatgggggtttttctgaatttttagtcttttacatagataatgaactaaaaagaagaaaaagatgaaaaaagtaattttatttatggcaggtattttggcgagtatgatgttgaacgctcagtctcgttggagtgttacgccggaagccggcttggtagtgaataaggaaaatgaagggacatcagttacattaggttttaaagccggtgccggtgtgttgtatcagttaaaggaaggggtgggaaagaagccttcttttggcttgaagtccggggtttatatcttaatgcagaaaggtgggtatcatcctatgagctggggaaacatatcaacagggggaggatttagcatggattatgaaaaaacgaatgttgagtccacgcgttattatttgcaattgcctgttatggctcattggggttttaaactttgtgatgatgtgcgtcttaaattagcagtaggaccttatgtagctgtaggaattggtggacgtactaatgcttatgtttcttcctcaaaatataatatagatgaagaaacaggtgttggacagtacgaataccggaatgattattaccggtttggcacatttaaaggaaaaacagtaaatgaggaatttggttttgaggcgtcccctcgtttggattggggaggaacggcttctgtcgggattgctgttaaacggatttcatttactatcgggtatgatttggcttggggaaaatataataaggaacagaatgatttaaggatacggaatcatatggttagctttacttcagggtatagtttctgataagaaaaggataaatgaaacaaacatacacaaaattctttgtttaagattgttaaatgaagaattttgtgtatgtttgttttttataaacacgataaaagttcaatctatgaggaaaatgctattcattacccttttaatgggcggtctgtgtacgacagtttctgttgcaaaagcgcaggaacgcttgccggaatatctgcaggcagagaaatacacacaagaaaaattgaacaccatgttgttttctactgtggtggatccgcattggttccagaaaggtaataatttctggttcgagtacaaaacaagtgaaggaaccttttggtatgtggttgatccggctgcccggacaaagaagcttttgtttgatagggatgaattagcttcccagcttaccgaaattgtaaaagatccctttgaggcacgccatttgccaatcacaaatctgaaagcggaagaagatgggcgtacctttacttttgaagtaaagtctacaaaagatgcgacaccaaagaaagatggcaaggataagaaggacaagaagaatgagaaggaaatcttttatttttcttatgactatcctacccgtaaattgacccatctgaaagataaagaagacgacctgaagaaaatctattggggatcggtctctcctgatggtaaaacggtgatttatgccaaggatttgaatttgtatcgcatgagtcgtgaagattatgaaaaggcgaaaaaaaatgaaaaggatagtacgatcgtggaaatccagcttactacagatggcatgaaggattttggctatggtattccctatagtatgttgaatacagatactttatgtaatggcaagcgtcgtcgtgtaggtggagtgtggtctccggattcacgttattttgctatgacagtttctgacaatcgcgctgtgaaagagttatgggtaataaattcgatggcccgtccacgtcccacattggaaacttataaataccagatgccgggagaaaaggaagctcccatagaacacctgtacttgtttgacttggttgataataaacgtaaggaaattaaagtagcagcttataaagatcaaagcattggcctggaatacaaaccaatgatgcaaaaacagcgtgatatggaagatcaggctgccgtttggcagggtgataacaaccgtttcttcctgacccgcagcagccgtgatttacatcggattgatgtttgttcctatacgataggacaggattctgttgtaccagtaataaaggaacggatgaatacctatcaggaaactcgtcctttaagagtcttgaatggtggaaaggaaattattcaatggagtgagcgtgatggttgggcacacctttatttatatgatgatcagggtaatttgaaaaatcgtatcacaaaaggtccctggcacgtggaggaaatcttgaaagtagatgacaaggcgcgtgtgatttattttactgccaatggaatgaatgcgaaagaacatccttattatgaacatttgtatcgtgtgaatctggatggcagcggtttgaaattactgaccaaaggggattatttccatcgtgtggaagtggatgatgatgctcgttttgtggtggataactattcgcgtgtaaatacggtgccctgcgccatcctgctggatactaatggcaataaggtaatggatattcaggagagtgatttttcacagctttttgctgccggttataaatttccggaaatatttaaggtaaaggcggctgatggcgtgacagatctgtatggtgtgatgtataaaccttttaattttgattcaactaaggtttatcctattgtggattatgtttatcctgggccacaggtggaaggtgtttattatccgtttacccgtatgagcccccgtaccgaccgtttggcacaagccggatttattgttatttctgtgggacaacgcggcgggcatcctagccgctctaaatggtatcataattatggatatggaaatatgcgtgattatccgctggccgatcataaatatgctatcgagcaattggcgcagcgtcatcattttatagatatagataaggttggtattcatggacattcgggaggtggatttatgagtacggcggctatgtgccaatacccggatttcttcaaagtggctgtttcttgtgccggaaatcatgataacaatatctataaccgttggtggagtgaaacgcatcacggcgtaaaagaggtggtgagtgagaaaggggatacaactttcgtttataagattgctactaatcctgaaatagcgaagcaattgaaaggaaatttgttactgattcatggtgatattgataataatgtgcatccgggcaataccttacgggtagttgacgctttgattcgtgccgggaagcgttttgatatgctgattcttcctcaacagcgtcatggattcggtgatatgaatgaatatttctactggaaactggttgattacttttccgaacatctgaaagggaaaagtgaaaaatcggtagatataccgaaacggtagatttaggatcattgccggacgaatatggaaggagcacagagggttcgtgtcattttaagatacctttgtgctccttgttgtttttatattatagcagactgttgatataagccttcatgtccggtgtagcggattttgcttccagatacagtttatactgcgctttggtgcgtaccagattatggtctttataccgggtttgataatacgtgtctccgtttatataatctgctaaaaagcgtacagcttgcatataggggaacagggtggcagcgtaaggtagcatttctatttcgagaggagtcaggaaagtccgggccgattcaatataacctttggtaaatgctttgaagatttccatgttgaacttcaccttatttaaatcagcctcatcctccttgccggtattggctgccgaacggaggaaatcaccgaaatcggagaaaatgaaactgggcattaccgtgtccaggtcaatgacacacaacacttttccgttttcatcaaataacatgttgcttacttttgtgtcacagtggcagatgcgtttgggcaatttgccttcacggtaaaaacgttcagcgctgcacatcgtatcagcatctttttctatagcgtccactatgtcctgtacttctgccaaacggccggatatgttggcggatacggcttcacgtaattgttttaagcggaattccatattgtggaaatcggggatgatttctccgagttgttcgggcacatcagccagcatggcctggaattcaccaaacttcagtcctgccagataggaagattccggtgtaactgtttccaatgtttgtgaacgcggaataaatattgaaattcgccaataaccttctccatcatagaaataggtcttgccattggtggaaggtagaaaatggagtaccttacgttcaatgtcctcttcgtgtctggcttccagcttttggcggatgtgtctggtcactacttctatattgtgttgcagcatttcaatattggtaaatattaaatggttgattcgttgcaatacatagtcaggttcttcaggagataccgattttaccagataagtctgattgatgaggccggatgtcaaagctttgatttctttcacttcacccactttggggaactgtttgataatttttttgaggttttccataggtttgtttaaataatgtctatatatacgaaacaaagataacttctttccttcaattggaggaaagaagttatcttaaaaaacatataataggaatataaatctttttattttttcaaatcagtctggaacatacggtcggcgcgtaacagatgacgccagtaggaaaccaattcttgtgattcctgcaatacattgaggtacaccatggaagcttttacattgacatcccgttcttgtatgcggtccatctgttctttgcgcaaggtagagatcttgcctttcagaagggcgccttcacgtagcaaggcatcagtctgatcgtaggccttgttggcaagtacttcagtagccttggtcattaatgcggtcatctcatcgcggatagggatgaactcgttagtggcacgttccgataatggggtgaacttattgtccacatgttctttacaaggatcgcagatacgtttcagacagtaaagcatttgttcacaactgttgcttcccaagtggaaccaagtgtttttctcgatagcagtaaagttgtctatacggcgcagacctagtatttctttacggcgtatcttttttaacatttctttctgattgtcggtattgttcacggccttgcgcagagctttcagattttcgttgatgaaaccgtcggttatctgccggtaggtttcattggtgaatgccatttcggctaccaatgtgttatttacatgctggcggagtaatctccaacgctcttctttgtctttactggcaataaggcgggagaatatgtcgtctttgcctttatccttctgtttcttgctgtagtgtatgttgctgcgaaccaataagaagatggcaagtgcaataagggccaacatggcgaatgtgcctccataatacatgatgagcgtaaccacaaaacagatagtgaaagcggctccggcagtgatgaaccatccaccgataacagaaagcacaccggtgatacggtatacggcactgtcacggctccaggcacggtcggctaatgaactacccatagctaccatgaaagttacgtaagtggtagaaagagggagtttcaaagaggttcccaaagctatgagcagaccggccagtaccaaattgacagaagcgcgtatcaaatcaaatgctgccccgttctccataatcatcacatctttgttaaaacggctgtcggcccatcgtttcagattgtcgggcaatattttggctatactttccgaagcgctcatggtagaacggacaatactgcgtgctacagcggaagaaccaaacatttcgtcaccttcatcctgacgcgagagatctaccgaagtcttcactacattttgcgctttttttgaagtaatcagcgcatataccataatgacgcctgctaaaaataaaaaaagaaatggggttttagccggaccattcagtgagttcatcaagtatcccattggttcaccgtttccattagccatgaagtctgtataagctgagaagcctgccaagggcacaccgatgaagtttactaagtcattgcctgcaaaagccatagctaaggcaaaagtacctaacattaccaccaccttgaatacatttatcttgcaccaatgcaatatttgcatcagaatggtgaagaacacaaaactgcaacttactaacatcaaggtgttttcctgaatccaatgtttgttttcggtggtcatgaaggcggaatctttcagaccttttatcaacatgaagtagattatggccgtaacagcaataccgccgaacagtccgatagtgtatttcagtttctttgtataattaaatgtgaagagaagacgggagagatattgtactaatgtgccgaagaagaaagctactgctactgagaggaagatacctaaaatgacggacaatgccttttccgtattcagcagatcagcaaatcctagcattccggtttcgtctcctgctattttgataagagctagaacgaaagtacctcccaatagttcgaataccatggatacggtagtggaggtaggcattcctaaggaattgaaaatatccaataggactacgtctgttaccataactgctagaaagatacacattaactcctgaaaataaaattgttcaggcctgaaaataccgtgccgtgcgatttccatcataccgttgctcagtgtggcgccgatgaagataccgaaagcggcaatggcgatgatggtcttgaatgacgcggctttagcaccgatggcggaattcataaagttcactgcgtcgttgctgacgcctactaccaaatcgaatatggctagcagaaaaaggaatacgacgattcccaaaaacattgtttccatataattttgtctctctattttattgggcgcaaaggtacgggaggtatattatgataaaatgtcatatatgttacatttgtgttacaggcgttttttttgttcgccacggattgcacggattcacacaacttgatttttaatttattattatccatatttagtggcggatctcttcttttttgaaacaaatatgagtggataaataatatttcacgtttatgtgtggaatttatagagtgaaaatttatacctttgtagcccaaatacttaatctataaaaaatgtcagaggctaagagaattaaaaccgcattggtgtcggtttatcacaaagaaggtttggacgagattataaccaaactacacgaagaaggagtagagttcctgtcaacaggaggtacaagacagtttatcgaatctttaggtttcccttgcaaagcggtggaggatcttactacttatccctctattttgggcggacgtgtaaagacactgcatcctaaagtctttggaggtattttatgccgtcgtggtttggaacaagatatgcaacagatagaaaaatatgaaatacccgaaatagatttggtcatcgttgacctgtatccgtttgaggcaactgtggcttcgggggccgaagaacaagctatcatcgaaaaaattgatataggtggtatttctttgattcgtgctgctgctaagaactttaatgatgtggtgattatcgctagtcaggcacaatataagccgttccgtgatatgttgctggaacatggcgctactacttcacgcgaggaacgccgttggttcgcaaaagaagcgtttgctgtttcttctcattatgattctgctatctttaactattttgatggtggtgaaggttcggctttccgttgcgcggtggaagaacaaaaacaacttcgttatggtgaaaatcctcatcagaaaggttatttctatggaaatctggatgcgatgttcgaccagattcatggaaaagaaatttcctataacaatttgttggatatcaatgcggccgttgatttgattgatgaatttgatgaggtgacatttgccattctgaagcataataatgcctgtggattagcttcgcgccctactgtgctggaagcatggaaagatgcgttggcaggcgatccggtgtcggctttcggcggtgtgttggttactaatgccgtgattgataaagaaacagcggaagaaatcaataaactgttctttgaggtaattattgctccggattatgatgtagatgcattagagattctgggacagaagaagaaccgtattattttggttcgtaaggaagctaaattgccgaagaaacaattccgttctttattgaatggggttttggttcaggaaagagacctggatgtggaaactcctgccgacttgaagcaggttactgaaaaagctcctacggcgactgaaatagaagatatgttatttgcaaataagattgtgaagaatagtaaaagtaatgctattgtactggccaagaacaaacaactgctggctagcggtgtaggtcagacttcacgtgtggatgcattgaaacaagccattgaaaaagcaaaatcatttgagtttgatttgaatggcgcagtgatggccagtgatgctttcttccctttccccgattgtgtagagatagcggataaggagggtgtgaaagctgttatccagccgggaggctctgtaaaagacgagttgactttccaatactgcaatgaacatggcgtagctatggtcgttacagggattcgtcactttaaacactaagatcattgcaatttaccatttgcggctacaatcggactgtttatacagcattgttcaggtaaatggtaaattgcaaatgtcaattgtaaattgctaaattgtaaatgaatttatgggattattctcctttacacaagagattgcgatggaccttggcactgccaataccatcattttaaataacgggaagattgtagtggacgaaccttcggtcgttgcgcttgatcgccgtaccgacaagatgattgccgtaggcgaacgggctaaaatgatgtacgagaaggaaaatccgaatattcgtactgtacgtccgctacgcgacggggttattgccgactttaatgcctgtgaacagatgatgcgcggtttaataaagaaagtgaacatgggtaatcgtttcttttctccttctttgcgtatggtgatcggagttccctcgggtagcactgaagtagagcttcgtgcggtacgtgacagtgctgagcatgcgggaggacgggatgtttatttgatttttgaacctatggccgcggctattggtatcggtattgatgtagaggctcctgaaggtaatatgattgttgatataggtggtggttctacagaaattgccgtgatttcattgggtggtattgtttccaacaattcgatacgtattgccggtgacgatcttacagccgatattcaggaatatatgagccgtcagcacaatgtgaaggtgagtgaacgtatggccgaacgtatcaagatacatgtaggcgctgccttgactgatttgggagatgatgctcccgaagattacattgtacgcgggcctaaccgtatcactgctcttcccatggaagttccggtgtgttatcaggaggtggcgcattgtttggaaaagagtattgcaaaaattgaaacagctatccttagtgcattggaacagactccgcctgaactttatgctgatattgttttgaacggtatttatttggctggtggtggtgctttgctgcgcggtttggacaagcgtctgacagacaaaatcaatattccgttccatatagccgaagatcctttgctgagtgtggcgaaaggtaccggtattgcactgaagaatgtagatcgtttctcttttttgatgcggtaaatgatttgctaatgaggcagtttgctaatttgctaatgccatgcggtatggatagcgcagtacattggcacattggcaaattagcacattgaacaattggtattaatgaaaaatctgctgaatttctttttaaagtataactactggtttctctttgtccttttggagataatcagttttgctttattattccgcttcaacagttatcaggggagtgcgttctttacatctgctaattttgtttcgggagctatgtatgatgcagccaataatgttaccggatattttcatctgaaaacgatcaacgatgagttggtacagaaaaatgtggaactggaattgcagttggagagtatccgtaaagctttgattgaagcgacggaagacagcagtggtgtagaacagcttaagcaggaagcactggcaggatatgatatattcaaggctagcgtgataaataacagtgtgactcatgctgataactatattacacttgacaaaggagaagcggatggcattcgtagtgagatgggagtggtaaatggaagcggtgtggttggtattgtttatctcacctctccacattactccattgtcattccggtattgaattccaaaagcagtattagctgtaagataaaacggagtgattatttcggcttcttgaaatgggatggcggttcatccgaatttgcttttataaaggatatgccccgtcattcattattttctttaggtgacaccattgtaaccagtggacacagtgctgttttcccttccggcattccggtgggtacggtagatgatatcgccgatagtcacgatggcttgtcttatttgctgcgggtgaaactatttacggacttcgcccgtttgaatgatgtgcgcgtaattgcccaaaaagggcaggaggaacaattggagttggaaaagcaggtaaaaacgactaagtaagaaggttgatgttgacttatctacaaagaatagagtggtttatcggactggtactgttgcaagtgctggtgctgaatcatatgcatatcaacgggtatgccactcctttcttttttatctattttattttgaagtacaattcgggagttagccgtaatgtccttatgatatgggcattcctgttgggattgacagtcgatatattaggcaacactccggggatgaatgcggctgcggccactgtactggcttttatgcgtgaacctgtattacgattagtcacgctccgcgatagcgtcgaggattttgaaccgggtatcaagagtatgggattctcgcctttcttccggtatatcttattgtgtactttcttattttgtaccattttacttgtcatagatactttttcattcttcaacctgcctgtcttattgttgaaaatattgacagatgcctcaataaccatcatttgtatattgtgtgctgaggcgatcaggaggaaaaaatagtggaaagagattataatctggagaagcggaaatatgtaatcggtgcatcggtgatcgttattgtgctgatttacctgatacgtctttttaccttgcagattatgagtgaggattataaaaagaacgccgatagcaacgcttttctgaacaagacacaataccctagccgtggggtgatgtacgatcggaacggtaacctgctggtgtataaccaacctgcctatgacgttacgatggtgatgaaagaggtgcacaaccttgatacgcttgatttatgtaaaacattgaatattacccccgactattttaaaaagcgtatccgcgagataaaggacagacgttccaatccgggctactctccatatactcatcaggtatttatgacccagctttcggcagaagagtgcggagtcttccaagaaaaactgttcaagtttcccggtttttatattcagcggcgtactatccgccagtataattacaatgcggctgctcatgttctgggagatattgcagaagtgtccaagggggatattgaagccgatgattactatgtacgcggtgacttcatagggaaacagggggtggaacgctcatacgaaaaacagttgaggggcgagaaaggagtggagatattactgcgcgatgcccgtggacgtattcagggacggtatatggacgggaaatatgacaagactcccgttccggggaagaatctgaaactaggtatagacatagagcttcagatgttgggagagcgtctgttggaagggaagataggcagtatagtggctatcgagccatccacaggagaaatactttgtatggtatctgctcccacttttgacccaagattgatggtggggcgccaacggggtaaaaatcatctggaactggcgcgtgacagttggaaaccattgctgaaccgttctattatggggcaattcccaccgggatctactttcaagactactcaggcgttgactttcctgcaagaggggattattactcctcagacagcctattcttgctatcatggctttgtgtatgccggtcttagggtgggctgccactctcatgggtcgcccctgcctttggtgcctgccattgcaacttcctgtaacggttatttctgttgggggttgtttcacatgataggggcgaagaagaagtatggttctgtacagactgccatgaatacatggcgtgattatatggtttctatgggatttggttatcctttgggagtagaccttccgggtgagaagcgtgggatgatcccgaatgctgcttattatgataagaactatcggggatcatggaacggactgacgattatttctatttccatcggccagggggaagtgacggctactccgttgcagattgctaaccttggggctactattgctaaccggggctattatattactccgcatgtagtgaaagaagtggaagacgagccgttggataccctgtatacgaccaaacgttatactaaagtaagccgtgaacattatcagacggtagtcgaaggtatgcgttcggcagtattgggaggaacttgccgtaatgcgaatattccgggaattgaagtgtgtggcaagacaggtacggcgcaaaaccgtggaaaggaccattctgcttttatggggtttgcaccaatgaatgatcctaagattgccgtggtagtctatgtagagaatggaggttggggagcaacctatggtgtacctatcggtgcattgatgatggagaaatatttaaaaggcgaactttcaccggaaagtgaggcgaaagcggcggaaatacaaaacagacgaatagattatggcatacacgaacgatagtatatggaaatcagtggactggatgactatctgtatttatctgatgctggttatctttggatggttcagcgtatgtggagccagctatgattatggtgagattgatttttttagttttgacactagggcaggaaaacagtttgtatggatctgttgctctttggggctcggatttatcctgatgatgttggaggataagttatatgatatgtttgcttacattttatatggaggcatgatgctgctgttgttgataacaccttttctggcagaggatactaagggatcttactcatggataaaattcggacctgtaagtttgcaaccggcggaatttgctaaatttgccacggcgctggctttggctaaatttatgaatgtctacgggtttacaatgagtaagttaaagtattcattgcctgtggtagggatggtgttgctgcccatgctgcttattattttgcaacgggaaacggggtcggctttggtttatctggctttcttttttatgctgtaccgggaggggatgccgggttctattttgtttgccgggatttgcgccgtggtctattttgtagttggaatccgttttggcaatgaattgatggcggatgactgtacttccatcggtgaattttctgtgttgctgctgatagtcatcctttctgctttattagttaatagttattgcaaaaaagcatcggtagtgtggtatatcggagggattggtgttggtggtaccttgctggctttattattttcgtattatgttatcccttttgacattacttggttccaatatggattgtgcgtagttttattgttctatttgatcttcctttctatgcatgaacgtatgcgtaattatttttatattgctctatttgcgataggttcggtgggatttcttttttctgccgattatgttttcaataatgtgctggagccacatcagcagatacgtattaaagtggtgcttggtatggaggaagatttggcgggggcaggatacaatgtgaatcagagtaagattgctattgggtcgggaggcttatgggggaaaggctttttgaatggtacacagactaaactgaagtatgtgcctgaacaggatacagactttatcttctgtacggtaggggaagaagaaggctttgtaggttcggcggccgtattgtttctttttaccggacttattttgcgtcttattgtggtggcggagcgtcagcatactcgttttgcccgtgtttatggatattcggtattaagcattttcttattccatctgtttattaatataggtatggttttaggactgacccccgttataggcataccactgccttttttcagttatgggggatcttctttgtggggatttacgatcttgctttttgtattcttgcgtattgatgcagggcggggaaaacgttagagcttattggttttccggtttgcgcaaccggatacctatatcgctgattcccgtcaacgggttgtccgtcatgatatggacgatgcggaaagtacgtgcgcttccttctgtacggataggaatagatgctttataaggcaggtcacattgatataatccacaaagaccatttcctgttttatttccagcttcgtcaaccagaaaaagttgtaaagtgtctgtgacgtaagtcaaagtatcctttgtgttatggctgacttctagccaaatatctctgtaaggataagattcttgataacggataccgatttctgcttcgtaatttccggcagggatagaattgggcagggtataaacaagagtatcacttttatcccatccgtcaagggggacgggggcgtaagagtgatagatgatattgttttgacaggctgccaatatgagtattggcagccatgtcagtttattctttagttgatacaggagtttgtggcttttcattcgggatttggctattgtttccgttgttcttgttgtcattttcctttcctcctccgttattccggttttcactgcctccttcattattaccattattggggcggcgtttattgcggttccggtttccgtcttcccgattttcacgactgcgctcttcccggttgcgactttccctgttgcgattttcttctttagggcggtttccgttctcttcgcgtggctgctgagccttgttttctttaggctctctaggttgtttgggacgtccttctctaagtggccggttttctttgggttgttgtgaccggttctctttaggttgttgcggacgtctgttttcattgggagtaccttctccgttattaccgttattttccggcttacgttttttctttcggttgctgttgttgccttttcgtttgtcgaatcgggttaagctttcttgttctactaaatcaacgggcttttgaggttcgttctttttgacagattcggttaagctttccggtttctcaccccgtcggttcatattaataatttcaaaagcacggcgtgcggtgatggttacagcattagctatgaagtttttgtcagtagagtacatgatagttcccttcaaaatatccgctttgaaaaaatagaatgtactatccgtcgtttctaaagtcatttctttgcttggaaggcgtttttgggactctacataggcgtctacctcatagtttaggcagcatttcagcttggcacattgtccggctaacttttggggattcagagaaatatcttgataacgtgccgcactggtagatacagatacaaaatttgtcatccaggtagcgcagcacaattcacgtccgcaaggtccgataccgccaatgcgtccggcttcttgacgggcgccaatttgtttcatttctatacgtacacggaaagcttcggccagtactttgatcagttggcggaagtctacacgttcgtccgcgatgtaataaaagatagctttgttgccatcgccttgatattccacatcaccgatcttcatgtctaggttcagattcttggctatctggcgggaccggatcattgtgtcatgttctttggcttttgcctcctcgtatttttccatatctacaggttttgccttgcggtagatacgcttgatttcggcatcgggtttgatgtttgccttacgcatttgcaaaggtaccaatcttcccgtcagagttactgtaccgatatcgtgtccgggacttgcttctacagctactatatctcctttttccagcttcagtttgttgctgttcttataataccctttgcgggtattcttgaattgaacttcaaccatttcctgttcctcggtgttgccgggaatatcagccagccagtcgtaggtgttcagctgcttatcctgtcgtccgcagcctttgcaacacaaacagccgcttccgttctttaatttgaattcattgtccataattctgttttaattgagaattgaaaattgagaactaagaaataaatgccatgcggttctgttattttttaatgctcaattctcaacttttaatttttcaatagcacaatcatttttaaagagaaatcaaagaacaccattttgggattcacattctgtcctatatgtaattgtgcttcactaagttcgtccattatgcccatcacattccgctcgttgacaaacggtgcgaaacgggtggaaaaattttgttcttcgggattcatatacactaaatcacgttgatgaaagttgtatatgaagttttctcgtatcatacgttggcagtaggccagaaaattcttctgacgttcacgccccatggaggctaccgcatcgctccattgtctcatttcgcgtatcttccgttgataggaaaggcgcatcaaatttataaagagttcaaagaacagtttgttttcctcgctcagatgtatggtttccagtgctttcagaaaattgccttctgagcggtgtgctatatcgtcagcatcttccggttgtagtccgtatttggtttgcaatacttttgagatttcaggttctttgatcccatgaatgttaaatcgttgggtacggctttggatcgtttgcaaaatggcatcaggctcttcggatactaataaaaagacagtcatggcaggaggctcttccagtaacttcagcagtttgttgctgcattccacgttcatcttttcgggaagccatataatcatgattttgtaaccgccttgactggattttaagctgagctttcgtacaatctcatcgctctcttttacaaagatttgcgcctgttggttttctgctcccatctctttcagccaatggttcagattaaaatatgggttctgcaggacaaagttgcgccagtctgctatgaaatcatcgcatacggtatcctttccggcttttttcttgataacaggaaaaacgaaatgcaggtcgggatgtatcagcttattgaatttcacacaagtggggcaaattccgcaggcatcttgttcaccacggttttcacagcagatgtaacgggcataagctattgccaaaggcaactttcctgtaccttcgggaccgcaaatcagttgtgcatgagggattcttccttcttttacctcggctatgagccgctgttttgcttcctcttgtcctattacatctttaaataacattgctttttatagtcatttatttactgtttaataaattgcttttgcaacttcctttacactgttcacggcacttacggtatagaaatgaatgctgggaaccccacaggctattaattcacggcactggtgtatgcaccattctatgccaagactttccgcttcttcatctgtttgacatttcatcgcttcgcctgccagttcttgcggcaagtctatcttgaacgtcttgggtatcatgttcagctgggataatttgcggaaaggcttgatacccggaataataggtacattgattccttcttttcttaccctttctacaaattcgaaatatttgcggttgtcatagaacatctgtgtcacagcatattcagctcctgcttcaatctttttcttcagccaataaatatcttgttccatattgggtgattcctcgtgtttttcaggatagcaggctactccataactgaacggagttcctgttaccttgatgggggaaccgtctacaaatacgcctttattgaaatcattgatctgctcttccagttctatggcgtggttgtaaccgttgttttcgggtacgaaagctgattcgtgctttgccttgtcaccacgcagtaccaacaagtcggtgatgcccaggaattgtagatctaacaatacatattctgtatcttcgcgggaaaaaccgctgcacaggatatgtggcactgtcgttatattgtatttgttctgcaaagcggcggcaacagcaactgttccgggacggcggcgctggcgtgtacgttggtacagcccgtttcccagctccttgtacacatattcgctgcggtgggttgtaatattgatatatttagggtcgaattcgcgtagcgtatcaaccgttttatacagtttttcaatacccgttcctttcagcggagggagaatttcaaaagaaaaagccgtattgtccgtgctttttattaaatcaactactctcatcgttctgtctcgttctcttatgccttatcgggcggaattacatatttgggcaaaaataagaaaaatatcgtagtttatggggatgaaaaagcgatttattttatctttgttctataataaagtgaaacatacggagagaaaagcgtttccttgcagctaagccgtggttttccacacttgtcagggataccgtccgtgatggtggagtaacatttctcctgcttacaggcattgctctctttgatgatgacctgtcaagctttactgcatggagcatacttgcggatgggataagccccgtccttgcaggagatgaaataatctgtaaacctttgtttggggaagtagcggaggtttataggaatggagtgaacagattggcgaaccaaccgacgaagcgtttccatccggagcgttttttatattcttccttggtaaacagggtactgtccagcttgtcatgctcgaacatggtgttcagttcatgtgtggtttctttgtcaaaaatgaaagcgttgacctcatagtcatagcgtaggctgcggctgttcagattcgtacttcccacagtgcagaacaggctgtccaccatcatgatcttagagtggtggaacccgccattgtacacataaatctttgctcctttcttacgcagcttgtttgctgtatagaacgcggcatcgggggtaaaaggaatatccgatttgcccggtatcatgatttctacttcaacgcctcgcttcaacgcacgttttatggcttttttaatgcttggaatgggagtgaaatagggattcactatttgtattttatcctgtgcggcatcaatggacttgatataagtctgcctcatcagtctgggttcttttttcggaatgcggtctacaatggctacattcttatttcccttgaaagtagaatcgtttcgtaggggatagtattggcttccgcttacgtgttgtttagtgcttttgttccacatggccaggaagatgtcctgcaattcgtttacggcatttccctctatacggatatgcatgtcgcgccagtcgcctatttccggcagaccctttatatagtaattggctatgttcatgccaccggtatatcctatttttccgtctatgactacaatcttgcgatggtctctgtgcagggcatgattgatataggggaatttgaaagggtcgaacttgacaatttcgattcctttgtcacggattgcttgtatgtgtttctttttcaatggcttgttgtttgacaaattgccgaaggcatcaaacaaagctctgacttccactccttctttcactttttctcccaataaatcaaatagtgcgttcgctatggaatcgttacgaaaattgaagtattctaagtggatatgatgtttggcatgccgtatttcttcaaagagatcgatgaatttggcccgaccgctttttaataatttcagtttgctgttttgggtgataggaatgccggcatcctttaagaaattgataacggcagagtcgctggtataggttggcaccgtatctgtcgctgctatatggatgttggtaacttcttgtgactgagctgtctctacagtgaaagataagatgaataaaagtattaaataaatatgtttttttatatcaaacttcattgcttttttattaaggctgcaaaggtatttattattctaggaatgaacaagccatcggtattatttatgtttaaaagggagaaatagaacagtgtggccatttgtttgaacagttggtaaattgaggtggtagaaatttaatgaaggttgtttttattgttccattcatatcttttttcaggctcggtataaacatctgtagtgtgtgtgaaagaagtttgtcggtccggtttttctgctgttgtgacattcaagaggaggagatacggaaaaataataatccgtcggcgggattaaaagaatgcatatcgcatccagccctgttgcctaagccttttctatctccagattaaccctttttatgcggatgtattctatctccatagccttgggagttaactccatagccttgggagataactccaaagcttatggagataactccaaaggcttgcggagataaaacagacgggaagaaaacctttaatcatacggcgggaaaggtttggggatacaggtaaaatcttttagtgatgaatccggtgtatgtacagggttatacatatattatattcattcttatatgtatgtatatgaacttccatacgttcagaatgaaaatccacatcagggcaggggtgttttttatctctgccgatgcatcgtaagccgtcattccttggaggtacaaatcttttatggtgctttttcattgaaaaagacttggaatgctctactttgtgtcaagctggaatagtttataaaaaagagagtatatgattgataaacagtatgctatgtgaaattttccttgaaaatgtagtgagggcatgagggtatgagtgagagcaagtatttttaccattggcgtataaatggtttatagttagcttgttatgtttgcagtgagggcatgagggcataaatgcttcgaactttctagtgggagctgaagggaaaggctgatacgccaagaatattttggaaaactgatccggaaaatccattcttggtttaactctcggtttaaccgaaccatgtaaaccggcgcgtttaaggcataaaaaaagagagttactttggtgtaactctctgattctttggtgatccgcttggggctcgaacccaagaccccaacattaaaagtgttgtgctctacctgctgagctagcgaatcaatcctttgttattgctattcttccgaattgcgagtgcaaaggtagacgttttagatgaaatatgcaaatatattacttgatttttttgaattatttttcgttagaattctctttgtgctgaaaatcagagtgttctatccctccggaaaattctttttcttttattcgtatgtatctttgatagtaagaaagcatcaagctggtacaaggcaaagcgataatcatacctacaattcccattaatgccccccagacggagagggataataaaatgatagcaggattcaatcctgtgatttttcccataactttcggtacaatcagaccgtcttgtataatttgtacgatgcagaacacaaggaaggcgcaaaataatatccaccagaaattctctcctgtatccgcagccttcagtaaggctaataagactgtgggaataaaagcgataagctgaaggtagggaaccatattgagaagcccgataaacaatccgaaaccgatggctaacgggaaatcaataataagaaaccctatgctgaacagaatccctacacaaaaagcgacaaacgcctgcccgcggaaatatttgttcatgccgtcctgtacatccgtgacaatatgtactgtcatttcacggtgtctggcagggatcagttttatccatccccgtgcaatggcttcataatctaatagaatgaagaaagtgtacagcaggatgatgaatgaggtgaatacactgaatacaatattgacagattgggtcagcaatgcccatacttggggaagaacattacgcatggtattcgcaaaattgctttcgttcagcgcttcgtgtattttcaacatatctatgtgctcttttatgaaattggccactgtgccgggaatagctgcttgcttggatccttcgataaaataggcggtgagcaattctttcagtttgccgaattcttcaatgattggtggtacaagtcctacaaatgctaaagtgataatggacagtaataccagcaaaacaaccaatatggagattacccggttcctcagacgcaatttgttctgaaagaaaatgaccatcggataggtaagataggctatcagccatgctatgaagaaaggaagcagcactccgctgagtcggttgaccagatatagaatgccgataatgaccatcgctgtcaatattccgcggataaaactatcgaatgttatttttttctgtatcataaagtgtgtgttatttattttcagtttcctctttcaaagcttccatatagcaggtccggcaaagaggttcatagtctgccttttcccctaataggacccgtttttcgcttttggtgattcggtgggtggcataggccaagttcccacatttcacacaaatggcatgaactttggttacttcgtctgcaatagccagcaaggcaggtataggtccgaaaggaactctcctgaaatccatgtccaatccggcgacgatgactcttatcccgttgtcagccagcttgttgcagacatcaaccaaaccttcgtcaaaaaattgcgcttcgtctatacccactacatccttgtctgaggagaaaagcaagatgctggcagaagaatcaataggggtggaggcaatagagttgctgtcatgtgatacaacttcttcttccgaatagcgtgtatctatggccggtttgaatatttcaacccgttgacgggcaaacttcgctcttttcaaacggcggattagttcctcggttttacctgagaacattgagccgcatattacttctattcttcctcttctacgtgtttcctggatgtggtcttctgaaaaaactaccataatttagttataacaattagattaattctgagtgcaaatgtacgacttgtaccccgaaaaaggattattttcacttggaaatttattaataaaagatataatgttaaacaaaagtgcaacatctgttaaataattgggacaattaactttatgcatttaaattctttctacatttgttccagtataacagaatgcaattgttttatgggaaaactgtatgtcgtacctactccagtaggaaatttagaggatatgactttccgtgccatccgtgtgttgaaagaggctgatttgatattggcggaagacacgcgtacttcgggtattcttttgaaacattttgaaattaaaaacgccatgcagtctcatcataagtttaatgagcataaaacagtggaaggtattgtgaatcgcatcaaagcgggcgaaactgttgctttaatatctgatgccggaactcctggtatttctgatcccggatttttaatagtgcgtgagtgtgtgaagagtggcattgaggtgcaatgtttgcctggagctactgcttttgtacctgcgctggtggcgtcgggattgcctgatgaacgtttctgctttgaaggattcctgccacaaaaaaaaggaagagtgacccgtttgacctctttgcaagaagaaaaacggacgatgatattttatgaatcaccctaccgtttggtgaaaaccttaactcaatttgccgagtttttcggtgccgaaaggcctgtttccgtatgtcgtgagatttcaaaaattcacgaagaaagtgttcggggcacattaactgaagttatagcgcatttcactcaaaacgagccgcgaggtgaaatcgtaatcgtactcggtgggaaagaggactaaaaatgaataaacttaaaatgtaaagcaaatgaaaaaactagtatttttatcgttgttatctgtagctttattgacttcatgcggtaatggagctcagaaagatgccttgaaggctcaaaatgattctttgatggtagaactgtcaaacagaaatgctgaattggacgatatcatgggtgctttcaatgaagtacaggaaggttttcgtcagataaatgaagctgagaatcgtgtagacttacagagtggttctattcgtgagaatagtgctgataagataaaagaagatattcgcttcatcagtgaaaaattacagtcaaaccgtgagcagattgcgaaactggagaagcaattgaagaatagtcagtataattccgctcagttgaagaaagctgtagccaacctgacgaaggagttggaagctaaacagcagcagattgagactttgcaggctgaattggcttcaaaaaatattcgtatcgctgagttggacgatgctgtggccggtttaagccagaatgtaagtgaactgaccgctgaaaatgaggcgaaggctgcaactgtagccagccaggataaagctttgaatgctgcttggtttgtttttggtacaaaatctgaattgaaggaccagaaaattcttgaaaaaggtgatgtcctgaaaagtgcggattttaataaggattattttactcagattgatattcgtactgataaggaaatcaagttgtattctaaacgcgccgaattgctgactacacatccggctggttcatatgaactggtgaaagatgcgaaaggccagctgactttgaagattacaaatcctactgaattctggagcgtatcacgctatcttgttattcaggtgaaataaggaatttaaattattgttctgtgaaagggttgtgccgtgagtgacgcaacccttttttaatctgctttatgttgtatgtatagaagtatatttattgatttggatgatacggtatgggcttttactgaaaacgctcgtgatacattccaagacatgtatgataaatatcattttgatcgttattttcgttctttttcgcatttttatactttgtatagcgggaagaatgaggagttatggaatgaatatggtgctggtaggattacaaaagatgagttgaatgagcaaagatttgcctatccgttgttgcaggtaggcgttgcagataaagcgttggtgaaagcctattcggataatttttttgatgatatagtttacaagaagaaactgatgcctcatgcaagagaggctttggaatatttggcatccgcttataatctgtatattttgtccaatggatttagggaattgcaagagcagaagatgcgttctgccggtgtggaaggatattttaagaaaatagttttgtcagaggatataggagtacataaaccgtttccggagattttttattttgccatgtcggctacgcagtccgagctgcatacttctttaatgattggagataattggaagaatgacgttgaaggtgcgaaaaacgtagggatgggaaatgtttattataatataaaaggtgagaagagcttgccttttaaacctggttttgatatgagggattggcgggaaatcgcttctttcttataaaattgaatggaagatgttgatggataagtctgttggcacaaacaatgtatttgcataaggaatgcccgatatttgttttcaagggatgctcctgtgtattggggcatcccttgaaaagcatttttctttcaaaataaaaaatgtgattatttattttggaagagtatttgtccaattgttctgagttactccgaatccagcgttgatttctgcactaggaataggaaatactaaatttgatatttcgtaattagtataagtaaatttgatggctggagcactgttggcatatacactgactctttcattccagcgacgcaaatcatatagacgcataccttcttggaataactcacgagcacgttcgtcttttataaaactcataagattttctttttcgctcggtaaatcgtttgttgattttatatctaaattacgcttggctactactaataaagcttctttggcttcattcaatttgtttaattgtacatttgcttcagccttaattaaatacatttccggagcatttacaatataattagttccacgagcagggttacctgacgaaaagtgagcaattttaccacctgtgtaaacaggttcagattctgtagaagttttatctcttccatcaataagaattttacggcaatcgttagttgcatacattgaaattagtttaggactaggactaaagttgtatgtagaccacaaagttccatatgaattagctgaccagtttgttgtattagtaatagctaaagcaaacatactttcggaatttgatatttcactattataaagagctttgtatgcattagcatcgttggttaaagtagtaatacccgctatttttagtgcttgttctgcatagtttcttgcttcatcccaattttctaaatataggtaggtacgggccaataaaccattagtagcagcttttcctaaatattggagttctcctctgtctttaccagctgcttcaaaatgggataatgcattttttaggtcattgatgatggcttcatagctttcgccaacagtagaacggctgattttagtcaatgcttctttgggttggtcaattatgacgattcctagttcggaagaaaaatcttgtccattcacttttatttggtgcccataaatattagtaagcaataattgtgcgtaacctcttagagcataagcttcagccatatacatattaagttctgttttttcatcatcgcttgcattgttatatagtgcttgagaagcttgaattacacgtgctgcattatcagctgttttataaccatactcccaaatactttttaaataagtatctgtatctgtaaaagtataggtataaataccatcaaaatgtccggttttagtattccaataagtaatatctgtaggaatatcaccaatagctaaagcatagttaccagcaaatgcataataaaataattgataataagttccatttaatgctgtactaacgttagttacagtgttgagccctccttctaggtccactcctttatagttgtcagtttcaagaaaactgtcaccacatgaggaaagtcctgttgcaaatgtaaaaatggcaattgcatttaaaatatattttttcatatctttcctttattaaattttaccttatttaaaaacttaattgaatacctccgatgaatgtacgggttgctggatattgccacgcaattacaccattggaataggtttcaggattatatccaacaaaatcattggatgtaaatgtatataaattatcaatggatatataagctcgtaatttttgaatgaatattttctttgttagatttacgggcacagtgtaacctaaggtcatgttactgatacgtaagaaattactgctatataagaatctagaagaagtttgagttgctttattgggatctccataaatatattgtggatatttggcatctttattttcttctgtccatgaatttaatgcaacgtctttcaacggagtacgattggccataccaaatccggtgaatgaagctccggaatcgaaaacttttcctcctaatctataggtaaagttcatgttaaagtcaaatcctttccagcttaaatttgtaccgaatccacctaaaactttggggtcagcatcgcctacataacgtttggctgctgcattgtagtcggaggtcgtttcgttgccttcttcattcagataccataatggtttaccattttcgcggtcaacgcctgcatattctttcatatagaattggcgataggggcgtccttcttcaataatttgataagtatattctatgggttcatctgtagatagtttgatgatcttatttttgttccatgtcatatttgcataaatattccatgtaagattattgttgttgataacagatgcattgatagatgcttcaataccacggttgcggattgcaccaatattttggtatactgtagacatacctgtagtcatggacaatggtacttcaaacaatgcgtcactcgtctcttcattataataatcgaaagtaagatggatacgattaattaaagataaatcaaaacctatatcaaatttttttgaagtttcccatgtcaaatctgaattagagatgctagtgggagtcataccaggcttttcgttataattgtatccggaagaatagaaaccacgtgctgcataccaatcgatatcttgattacctacggttccgtaagaggcccgaagagtggcattggtaataatagaattatctttaagaaattcttctccacttacacgccattttccaccaacagaccaaaagttaccccaacgatgatttgaaccgaaaacagaggaaccgtcacggcggaatgaaccagatacataatatttatcctcgtaagagtagtgtgcatccataaaatatgatgccaatcgagcttctttcttataatattctgatccttgaggagttccagcagtagaaaggtcggtttttccatcagctgcaaatgggaaatcagagcctgaataatattcatagaaataattctttcgttgcatctcttgacctaataacaagttaatattgtgtttgtcaaaagtatagttccaacctaatacattgttccacgtaattgttgtataacgagaattgtactgttgacctaatccattataatcaacagcttgtggattatataatgcactccaatattgatattgacgtaaatcagcaatatttacacctaaggtagtttttgcataaataccttttccgagatcaatctgcaaatatgggttgaagttcaatgtttgattattgttttcattgatttcaccagctttttcatcatataaagctagaggattataattactgatattggcataacttccatcttcattatagaaaggcatcataggattcatagaacttatagctgctacagtagcgctggacatagagccacttgtagcttgtgaaaagccgttttgggtagaattactgtatgaagcattgacaccgatagtaaagcaactgaacttagagtctaggttcaaacgtcctgaataacgtttcatgtcagaaccaataatcaatccttcagtatctaaataacctaaactaacataataaccagtagaaccagaacgtccttggaggtttacattgtagtcttggtagtatcctttacgggtgatagcatccatccaatcgtaggatgaaacaccatcccaaccataaccttgatatacttttttcaaataatcatagctctcatcataggtgttaccataagcaacagaacgtccatgagcaaatagcttcatagattcttgagcattggcgtaatccatattatgatttcccattgaaacaaatccttgtttaatgtctaagttgatgctcatttttccctcttttccttttttagtagtgattacaataacgccattagctgcgcgtgaaccataaatggctgtagccgcagcatcttttagaactgtaacactttcaatatcagaagggttgattgcggccatcggatcaaaattattatttgtagtcgtactcataccatctgtttcagagttgacaggcattccatctattacatataatggctgagtgcctgaattcaaagaaccacgtccacgaacataaatctcgctccaaacaccaggcatactggtagagttgctcatttgtacgcctggtacagctccttctagtgctttcacaaaattagcatcagattttttggctataacatcttcaccaataatagcagcagcaccagtaaatgaagctttgcgttgaactccatatcctgttactaccacttcttcaagcacttcggcatccgactttaacgtgatgttaacagtctgttttatagctacttcttgtgtagccattccgataaaggaaaccaccaaagtctttgcggaacttggaacatttgataatgtaaatttaccatccatgtcagtaactgtacctacagtagtaccttttactaaaat

SEQ ID NO: 3897 - DNA, 72400 bp, Unknown
  gut microbiota DNA sequence
aaaaatgacaataagaatggcatatgaaatggtcatgccctatcatcttcatatgccatcttattttttagagacatttactgaatatccctttgctacaagatttcaggaaacattccctgtcattcatgaaaaagcaggaaagaaaaaaattctacttatcttccaactgccgtataatcagtacccgtttcgtatcttccgtcacccggaaacggtcatcgctacgctctcctaccagccatacaatccggtctgctgagcaaaccacatactgattttctttctggaaaagagaaaacttacgatctgtcagataatcgctgaccttctttttccctttcattccgaaaggaacaaacttatccccctgccgccatttacgcaccgtgagaggtagtaccaccttatccgcatccaaacaggccgtattcttattcctggggatgacaaagtccggcattatttcctgcgtttccattgcaagccggaatgggggcacattttcctccacttcctcatccgccggcttcctcctgcgaataatcagctccgtcctgtcgcgcagcacctcccatccggcagaaacgaatctttttcccgactgggcagacaaactgcggaatacatctcctacctgaacggaattgaaacctaacggatgaagaatctcaaacagcaaagccgccggaacactctcttccatcaaacgagaaataagaatatggccggacttttccatcaccctttctttccccgcctctatttccttattatatataagagaaacatcagtcagacgtctggatgtttcagctatactttcactgacagaaggattcagctcacgcaacatcggaagaatattcagacggattttattacgcatatattcatcttgcagattggtactgtctgtaacataaccttgacgcaaacaacgcaaataatccaaaatatcctgacggctcacctccaacaaaggccgtacaatgcagccgttatgcggactgatacctttcaagccattgattcccgcgccacgtatcaaattcaataaaaaagtttccacactatcgtcccgatgatgggctacggcaataacagccatccccctctccttacgcagttgttcgaaccaatcatagcgcatttcgcgagctgccatctcaatagaaacatgatgccttgaagcataagcgactgtatcaaaatgagtaacatgcaaagtcactcccagccctttacacaactcattgacaaacctttcatctctatcggactcctcaccacgaagatggaagttacaatgggcagcctcacaatgataccctaaaacaagcaagacacgcaacaaagctaccgaatccgctccgccactcaatgccactaacaccttatcatgcaaagtgaaaagttgtttttcctctatatacttctgaatattccaatgaaacatgacacaaagataagggttctgcaagacaaaaacaaagtgcctgttctttatttaaaaacaatctaaatagtttgcatacttctaagtaataacttatctttgcgaaaaatttaaaacaagatgcgtttatccgaattaagaacaggagaaaaaggcgtaatagtcaaggtgttaggtcacggtggtttccgcaagcgaatcgttgaaatgggttttattaaaggaaaaaccgtagaggtaatcttgaacgcccctttgaaagaccctataaaatacagactactaggttacgagatctctctccgaagacaagaggcagatatgattgaggtggtaagcgagcaggaagcacgcacgatgcagaacccttaccatggttccataacagaagatgtacccgtgtccgaatcagaactggtggcactggcaaaaggcaaacgccgtacaatcaatgtagccttagtaggtaatcctaattgtggaaagacttcgctattcaatattgcatccggcgcccatgaacatgtaggaaactacagtggtgtgacagtagatgccaaagaaggttttttcgacttccaaggttatcatttccgtattgtagatttacccggaacctattctctttcagcctatactccggaagaactttatgtacgcaaacatatcattgaagaaactccggatgtaatcatcaatgtggcagactcttccaacctggaacgtaatttctatcttaccacccaattgattgacatgaatgtgcgtatggtcatcgcactgaatatgtatgacgaactggaaagcagcggcaacaaactggattacatcaagttaagccaattgatcggagtgcctatgatacctactgtctgccggcggggtgaaggcatagaccaactgttccatgttatcatcggtatttacgaaggcggggatttcctgtcacaaaagggcgaaatacgttctgaaattctggaagatctgagagactggcacaaaacctatgtacccgaccacgaattcggaagccacaaagaagaggaagatgcccgcccacgcggatatatgcgccatattcacattaaccacggtcctgaactggagcgcagtatcgaagaagtaaaaaaagcaatcagtcaaaacgaagacatacgccataaatactccacccgcttcctatctatcaaattactggaaaacgataaggaaatagaaaatttcatctctacactgcctaatggcaaagaaattatagcgatacgcaacaaggaaaccttacgtatccgtaaagtgatgaacgaagacagcgagcaagctattacggatgctaaatatggttttattaccggagctttgaaggaaacattcaccgacaatcatttggaaaaagaacaaacaacccgcgtgatagacagtattgtgacacatcgcatttggggatatcctatttttttcctgttcctttacatcatgtttgagggaacctttgttttgggtgactaccctatgcaaggtattgaatggctagtagaccagttgggcaacctgatacggaacaatatggctgaaggtcctttgaaagacttactgatagatggtattatcggtggagtgggcggtgttatcgttttcctgccgaatatcctcatattatacttttttatttctatattggaagattcggggtatatggcacgcgctgcatttatcatggataaaataatgcatcggatgggactgcatggcaagtcctttattccactgattatgggattcggctgtaatgtacctgccataatggcaacacgtactatagaagaccgaaagtccagactaatcaccatgttggtgaatcctttaatgtcctgtagtgctcgtcttcccatatatttagttatgataggtgcttttttccctaactgcgccagctttatgctactttgcatctacacagcaggcattttattggcagtaataatggcccgtattttcagtaaatttctggtgaaaggagaagattctccatttgtgatggaactccccccctatcgtatgcctacctctaaaagtatcatgcgccatacatgggaaaaaggagcacaatatctgaaaaagatgggaggcattatcatgattgcctcaattattatctggtttctagggtattatccacaacatgatgcttacgaaagcgtggctgagcaacaaaaaaattcatatatcggacaaataggcaaagccatagagcctgttatcaaaccgctaggatttgactggaagttaggaatcggacttatttcaggtgtgggggctaaagaactggtagtaagcacactaggagtattatacacaaatgaaggagatgtggaaaatgtgaatctttctaaccgcatccccattactccactggttgcattagcttacatgctgtttgtattgatttacttcccctgtattgccactttcgcagcaatcaagcaagaatccggcagttggaaatgggccatattcacagcaggatacaccactggattggcttggcttattgcatttactgtatttcaaataggaagtcttatcgtttaataaacctaaacctaaaattatttgtttatcaagcatggagttacaacaaattatagttattgcaattgtatgcctctgcaccatatggataagcatacgtatctttcagtatttcaagcgcataaagaacaatagcaatccgtgtgaatgctgtagttcggactgcgccatgaagtctatgcagaacaggccaaagtacggttgcgaaaaaaatgcagaaaaagtgagaaaaaaatagcagaatatttgcagattaaaaaaaatgtcgtacctttgcaaccgcaatcgagaaacaaagattgctaacgacaaggttccttggatgagtggcttagtcagcggtctgcaaaaccgtgtacggcggttcgaatccgccaggaacctccaaaagcgaaaatggattagaatgaaaatttctaatccattttcgcttttcagctacttacgtcctctatggtagaagtagagaagggtgggcttccacccccgcgactccactggagatgttgaggctttatagctccctctataaattatattacagacatccatctgcatgcgaaatcaaacaacaaaccgttttcaccccgtatgacgaatgtgaatattttatggacgggtgcgatataatgttagatcaactttattcttatcccctgggattaaaatgcattatatgccatgagcaaaggaattatagttgtaggaggtacagaagaggaacattacaacttattaggcaaagacagacttcatcctatcatcaacgtataccctgaagaaaatgacatttataataaactagatagtttattagctaacccaaatttctcaattatccgccgacagcattgaatatatcaaaaaataccattgcccaataaggtggctaaagaatgtttggatttttgggagaaaaattaattccatccattagcacttcactatcagcatcttattacttccatcaaaaaaatatatctaaaaaaagagcaaaatgtttgcataattcaatttatccccttatctttgcaccgcgtttgagagataacgcttctgaaaagaaggaagtttgggtgagtggctgaaaccaccagtttgctaaactgacgtacgggtaaccgtaccgggggttcgaatcccccagcttccgcaagcgggtcataaaagtagtttatgacccgcttttatttttcaatgatttgagatcaaggctttcggaagccctaaaaagacgactcaaaatacttcattaaaacttcagggaagataaccagtggtaacttatgtagattgcgatcagaatcgcattgggttgttttttttaatccaaccgcactgatagcttactttcgcgtattaacataacatacccacagttttttcggactgaccattaaattcctattttatagtaacagcactaaaaaaatcattttttattttgcagattaaaaacaaacttttaactttgcagcgtcttagaaaaagagttaagagcaactgatggcggtatcgtctagtggcctaggacgcggccctctcacggctgaaactcgggttcgattcccggttccgctacctttagaagctaattggtttattgtcaccaattagctttatttttttataaaactaaaataaaaagagtacttatcattttttcatttattgactactttatacttaaaaatgcacaagcattcgcattatacctactaatagtgatgcatagctcacaaaaaaggagtacctttgcagccctaaatcatcttaataatgacagtatggaaatgaacaaagtttttaaggatggattgtggagtaaggaaattaatgtttcagacttcgtatataccaacattaccccttatgagggcgatgcctcattcttggcaggccccacagagcgaactaaaaaagtgtggaacgaatgcctcaaggcactagaagaagaacgtgccaataacggagttcgttcccttgataatgtaacagtatctactatcacctcacataaagcaggatacattgaccgtgaaaacgaactgattgtaggtcttcagacggacgaacttctgcgccgtgccatcaaaccttacggtggtatcaaggtcgtagaaaaagcctgccatgaaaacggtgtggaagtagatgaaaaagtaaaggatatctttactcattatcgcaaaacccataatgatggcgtatttgatgcttataccgaagaaatccgctctttccgttcactcggtttcctgaccggtctgcccgataactatgcacgcggacgcattattggtgactaccgccgtttggcactgtatggtatcgaccgactgattgaagcaaaacaagaagatttgcgcaatatcaccagtccgatgaccgatgcccgtatccgcctgcgcgaagaagtagccgaacaaattaaagcactgaaagaaataaaaatattgggtgaatattacggactcgatttgagccgtcccgctactaatgcacaagaagcggttcagtgggtttatatggcatatcttgctgccgtgaaagaacaagatggagcagctatgtcattgggcaacgtttcttcattcctggatatctatattcaatatgatttggatcatggtaaaattgacgagtcattcgctcaggagctagtggatcagtttatcatcaagttacgtatggtccgccatctgcgtatgcaatcatacaatgacatctttgcaggtgaccccacctgggtgaccgaatctatcggcggacgattcaacgacggacgcaccaaagtaacaaaaacttctttccgcttcttacaaacactatacaatctgggtccgtcacctgaacccaatatgactgtactgtggagtccggagttgccggaaggtttcaaagaattctgcgcacaggtttctatcgacacttcttccatacagtacgaaaacgatacgctgatgcgcgaagtgcgtaactgtgacgattatggcattgcctgctgtgtgtcttatcaggctatcggcaaacaaatccaattcttcggggcacgctgtaatctggctaaggctctgttactagctatcaatggcggacgttgcgaaaatacaggaactgtaatggtgaaagatattcctgtattgacaggagacttgctgaactttgaagaagtatggtctaattataagaaagtattaatgcagattgcacgtgtgtataatgatgcgatgaatatcattcactatatgcatgacaaatattattacgaaaaggctcaaatggcattcattgataccgatccacgtatcaatctggcatatggcgtagccggtctgtccattgccattgactcattatctgccatcaaatacggcaaggtacgtgccaaacgtaatgatataggtttgactgaaggctttgatattgaaaatacatatccttgcttcggtaatgatgatgaccgcgtagaccacttaggagtagatttggtttatttcttcagtgaagaattaaagaaacatccggtatacaaaaacgcccgtcctaccctgtcactgctgactatcacctccaatgtaatgtacggtaagaaaacaggtgccactcctgacggtcgtgccaaaggggttgctttcgctccgggtgccaacccgatgcacggacgtgataagaacggtgccatcgcctcattgagttctgtagccaaactacgctatcgtgatgctcaggacggcatcagtaacacattctctatcgtaccaaaatcactaggggtggatcgggaaacccgtatagagaatctgataaccatgatggacggttatttcaccaaaggggcacaccacctgaatgtaaatgtgctgaaccgtgaaatgctggaagatgcaatggagcatcctgaaaaatacccgcaacttactatccgcgtatcaggttatgccgtaaatttcatcaaattgagccgtgaacatcagctggaagtaatcagccgttctttccacgaaagaatgtaacatcacatatacattaatcgtaggggcgggttttaaacctgcccttaccagtttaaagacaaatcattatgatcagagtacattcttacgagtcaatggggacgtttgacggtcccggcttacgcttagtcgtatttttacaaggatgcaatttccgatgcctctattgtgccaaccccgacacaattgacaccaaaggtgaaagtacggaaacggcaatagacgaaattgtgcgtatggctgtcagccaaaaagcttttttcggtaaaaaaggaggtgtgactttcagcggcggcgaacctacattgcaagcaaaagcactgattccgttattccagcggttaaaagaacaaaacatccacatctgtatagataccaacggcagtatatggaatgaggaagtagaggaactgctaaaatggacagacctcgtattattagatatcaaggaatttaataatgtgcgtcatcggcaactgacagaacgcagcaacgaacaaaccatacgtaccgctgaatggcttgaaaaaaacggaaaacctttttggttgcgctacgtattagttccaggctatagttcctttgaggaagacatacgggcattaggagagcacttcaagaactatcacatgattcaaagagtagagatactaccttatcatacattaggcatacacaaatatgaagccatgggaaaagaatacaaactgaacggaataaaagaaaataccctagaacaattggaaacagccaaaacgttatttggtgaatatttcaataccgtatatttaaattagaaaagacaaacttaccgtctacccggtacttaagttccgttaaggagatgagccccataattttcgcctcatctcctttttatgtataagaaacaatatatttatatcagcactaccgtcacatcccgtgccccatgagcacccattaccaaggcctgctcaatatcagctgtctttgacggaccggaaataaaggttccgaaaccatattcgcctgtatctatcagtttatatgcttcatgcatattgttcacaatcttattcttatctagaagaataaccaacttttcggcaataaaataaatggcacgctgctttacatcctgctctatccataccgcaccattctccgcaaccccaatctttccatctatgacagccaaatccgtcccattcaattctgcaggatcttccaaatcatcgggattaaatgttgcacaagtaatactcttcagattagaagcgatgcgtttggctccaggataagcttttttaatgaaatcattcacgttctcctctttttccaaaaaaatggcttctcctcctacttgcttcatgacgaaataaaactgttctaccttactgggataagtcaatgccatatcttccaatggctttaaatccggtttctcatattttacatgtgtagcacgccggatgctctgcaatatatcttctctgctgctcataatttacttcactttacctttcttccacatttcattgaaactctccttagcaaatttcggcatttcacgtcctttcccccagtcattcaatccgttatagataaggaaacgcggcactccgtttaccaatggcgcccattttaatgccatattgaatatcgaagggcggttcatcatgaattccatgccaccggacattacctttttcatccggtctgccttacccaatttatccaaatcctggcgccacaaatagatctgctccgccaaatccactttagccggacatacaaacgaacaggaataacacaaagaacaagccgacacattgtcataataatgtaacggcgccttcaacatccccaggttaatcccgatagggccgggaataaaataagtataagagtaccccccactacgtctatatacaggacatgtattcatacaggctccacaacgaatacaattcaaagtcttgatatgctttgggtcggctaatatcttactacgtccgttatctacaataataatatgaagttccccaccctctctaggctttcgataatgagaagtatatgtagtaatgggttgtcctgtagccgaacgggccaacaaacgggtgaacactcccaatgattcacgatccggcacaattttttccataccaaaagccgcaatctgtaatttaggctgggaagtacccatatccgcatttccttcattggtacataccacaatctcaccagtagaagctacagcaaagttagcacctgtcatagccacctcagcatgaataaatttctgacggagatttttccgggctgcatgtgtaaggtaagtagggtcaaaatttcctttctccgtacccatctctctctcgaaaagctcacctacctgttcacgtttgatatgaatagcaggtaatacaatatggctcggcttcagatgcatcaattgcaagatacgctctcccaagtcgctttctaccacttcaatccctttgctttccaaaaagggattaagttcacactcctcggccaacatggatttgctttttataaaatgcttcactccgtgctggttcagaatattgtagacaatattacaatactcatccgcatcctttgcccaatagacatgagctccgttagcacgcgcattgttttcaaactccaccaataattcgtccaaatggctgttactatatagtttagtagcacatgccatattacgcaattcctcccattcgggaacttctttactcagtctgtcacgctttgccctaaccagccaaagtgtttcgtcatgccatgcggcctgtttcttgtttttcagaaactccgcagctgcttttgaatgtttcgtactcataatcctgccgctaagatttcaacaatgtgcaatgtcttgataggaagtttgtcacgggcaatgataccattctgatgcatcaggcacgaactgtcggcccccacaatgtattcagcaccggtagcaatatgacgcatcaccttgtcatgccccatctgcacggaaaccgcatcttcctctacggcaaacataccgccgaaaccgcaacattcgtctttgcgttccggttccacaacttccactccttctactaaagagagcaaatcacgcaatttgctgaaataaggaatattaagttcgctggcagaagaaagtttcatcaatctcactccatgacaactgttttgcagactcactttatgtggaaacttggctttcaacgaagaaggcttgacgatatcatgaataaactcacagatatcatatatcttaccttcgctggcacaccgatgtttgtcttctttcaacagacgactgtagttatcacgcacaaaaacgacgcaactggccgaagggcccactatataatcgtaattcttaaactgttcgtcaaaatgacgggccaaatctaccgctttattctcgaaacctgcattcgccatcggttggccgcaacaagtctgattgagaggataatccacgtccactcccaaacttttcagcagcttgtacgaggctatccccacctgcggatataccgcattgatataacaaggaataaataaacctactttcattgtcattagttaatatgtgtcctatattgaataacaaagttagaggatatttgttaagaaaacaacgagatttctaacgaataatgaagcggaataggtaaaaaagcataatattgtgagcaaaagccttactaataaaaaagtactccccgcgaatcacttcgcagggagcacttttaactaataactaactttgtggtttacgtaatttctatatgactaacttatagtgcaaagatagaggttagggaccacatccacaatcacttcatttaggtattctatcttattccactcaccatttgtaggtattataagttcatcttcacctcgcttagttcaaccagtttatttacgatagcgtaaatagtcaatccggcaggtgaatgtatttgtagcttgcgcgcaatattccgacggtgagttatcaccgtatgaatggagaggaacagtttttccgccgtttccttatttgtcatcccacgtaccacgcaacaaataatttctttctcacgctggctcaacgcttcctgttcgccatctgtttcatccacaccaagattcatcaggtctactaactttttatttaaaacttcgatgtcatcatatagcgctatactctcatcgtatcccttcaacagattggtatctgtgactgaacacaacaaagaaacgcatttgacagatgcctgtggatagttcgatttgaactcgtccacgttaaaccatcctccgaaagtaggatttatgattagaatatccggctgatgtccctgcatacaattttgcagtccttcaagagaagttatttccaccggctgtattataagatcaggcatgcgcttcagcacagccacaagtccgctacgcacaatgactgaagtttcggccaccgcaacgtgcacaagttctgtccgtttcatttcccctccttttccagcctaagtacagcaggcacaaacaagtaatcctctacgcggcaatgagatgccaaatcttgttcacaactgaatatgtcgaataatacggcgttcaacaaatggttatttccttttgccggataatatttaataatgatgttttttaactcagtcagtgtcgcatctatctgatcatgcctgcgggcaaactgtgagatacggaatcctcccgtttctcgtcccgtcatcagattctctacataagtaaacacattcatatcttcataatccatgtgtttacgcacttctccggcatactgatcaaaaaatttcagaatgagaaatgcaacctcgttttccgtggaacaatctatagcttctatcaatttacggcgtatggtaggcagacagaaatcaaggaaataatgatgtgcctgttttaaataattcatcaatgaaggcatagaaatatccttcacatcatcctccatccggtcgctatcttcaatcatgaagtttaccaccgcaaggaaagtacgacaatccactccattttcacggcacacctcctgtactgtcttgtctccaaaccctaacgaaagatcaaaacggctcattacctgtagcaatgtatagttatcacagataagataactcattttgtccgtcggagtatatttacttgttttatacatagttatgttttttatttctctttatggccgcaaagttacggaaaatcatcagggttatcaatcactataaataggtattttctcttgtaccccataattcccgttcaaccggccaatgccagtcttttaattatacattaatatatagccgttaagataagtggcaagaagcaaccacaaaagataaggaacaaaaagatatgccgaagatttcctcaccggataactttctatcatataataaataacaagcacatccagcaccagaatatttgcaaaacctagcaacggactccgaaaataaaagaagaaaatgctccatgtaaaattaaacagaagctggaatccgaataatctgataatcatttgtcgtcttattgtccatatatgccaaatcaacccgatagacattcccatgcacagatagataaaactccaagcaatgggaaaagctatatcagggggtgtacaagaaggtttttccaatgcaggataccagttgagtatggactccgactgaaaataagaagcagtacagcctacaccaaaacagataagtatagcaatcagtatggggattattcttttcataaggagaattgtttctatttatgccataattaacaaaccaacctccggatttgttgcagaaacagaacacttctcccctgcaggtgtctaaaaaacgtgctcccattcgttcgcttacgatgggagcacttacaacacaaaaactaaactagacttaactaaactattctattaagaagtttcacaacttcccttgtctatgctgcaaatataaaaagattatttcttttttgcaaaaggatatagacaaaatatcaacttttatcattcaaatatcacatttttcaaacagaatgactattcaaatatatctgtaactcctgtttataactatcggaaatcggaatatactctttaccgaaaacaatccgcccccgatcaagcaccttaattttactcttttgcactataaacgagcgatgtacgcgaataaaacgactggaaggaagcttctcttccatagctttcatactgataagtgacaggatagctttcggctcatcctccacatgtattttaatataatccttcaacccttctatatacaatatccggtctaaagcaattcggagcaatttataatcactttttacatatatacaatcatccgcctcatcggcatcaacaccattatccgccttttgtttcaattcataccattgcaccgctttattcaccgattgcaaaaaatcgacatagctgataggtttcaacaaatagtccaaggcattgactttataactatccaaggcatactgtccgaatgcagtagtaaaaataatccttgtttcaggactgaccatgcgtgaaaactccaaaccgttcaactcgggcatttgaatatcaaggaacaagacatgcacctcctcgtgaagaggaatttctgtcatagcttgcaccgcactggaatacctccctaccaaccggaggaaagatgttttttccacatagcttctcagcaattccaaagccagcggctcatcatctacaatagcacaattcagtatcataaacttttagtctgtatagttaatatagaagaatatacctgtccgttttcactgatcccttttatccattcgtaatgtcccggataaatcagttccaaccgcttgcttacctgttccagccccactccacttccacttttatcttgcccggacttcggatgattgctgttaaggatctcacatctcaccgtaccatccgtatgcccaaagatagagatactgataaaactgtctgctgtggggctgataccatgcttgaaggcattttctatcagcgatatgaaaataaggggagcgatttgcaacgcacctccagagtctgcctccaaattcacactcacttctacctgctgtggcaggcggatacgcatcagagctacataattacggataaagtccaattctttttcaagcggaacaaaagtttgctgattgtcataaagcacatgccgcaacaatttactcagctcttgtactgcctcttgtgccttgtcactattaaaagcaatcaaagcatagatattatttaatgtattgagcagaaaatgaggattcaactggttcttcaagtttttcagttccgcttccgtcttttgtctctccgcttctatcaaccgctcttccgcctgacgccaacgcaggctggtacgaatggccgcacccaatccggcaacaaaaatcatcatccccatatcccgcgcataaaatatccaacggggcggaatatgacgtgcaaactcaggaggcggaggagtgcttatactttccagaaatacatgaagaagcacactcagacaaagtatcagcacggcattgctcagaatatacttacgcatttcgtccgtgaacatatagcggggaaccaggcacaagtaattgacatagaagataataaaatagcacaaaggaacacaactatgcctcaagaattgggccagattgaagccgcttccacggtccatgaatacaagcggaaagccaaaaacgagcaaccaactgacaatatggatactcatttccaaaaaacgtcgttgtgaaaataactgtttcatacaggcaaagataagaaagattagattagaaataagatttccatgattcttattccataaaataagactggcaggaatcagtgaagcaaaattgatttacaaaaaacattacaaacagataatcgggaaaagaccggaacccaactagcattcccataaatcaattctgcttcacccccacaccttttcatccctactcgtaacgcaaagcgtctatcggatccaaatctgcagctttcttcgccggataccatccgaaaaacacaccggtgacggtacataccagaaatgaaagcaacacactccaaggctggataaatacaggccaatgtgctatcgttttaatcataaaactggctccacaaccgataatcactcctatcagcccccccgtgatactgattaggatagcctctatcagaaactggctcaggatatctactcctcgagccccgaccgacatacgcaaaccaatttcacgagtacgctctgttacagatacatacatgatattcatgataccgatgccaccgaccaccaaagatataccggcaatacaagccaacaaggtagtcatcaggtctgttgtagtgttgagcatactactcagctcctgctgggtgcggatggtaaagtcatcatcatccgtttctttcagcttatgttcacgacgcagaatggtcgttatctcatctacagcctcatcggtcatatcttctgtcagagctgaagcaaaaattccacttaggtaagtctgtgccagcaatcgtttcatcaccgtactgtaaggagccagtactacatcgtcctggtccatgcccatcgagttatacccttttgatttcagcacaccaattacccggaaaggaatttgattacaacgaatcactttccctatcggatccgatccgtcgggaaaaagattatcgacaatggttttaccgataacacaaaccttggctgccgtacggatgtcattctcggtaaacatctccccctgttccacggtgagctgacgtatggtaagataatccatacttacaccactcaccgaagacgggtagttgttggcccccgcaacaagttgtcccgaagaagaaacgttgggactaatgccggagagataagtacactcttcgctcaacttttcataattttccagtttcagtgtctgcatggccgaagggtcttggcggacccctccacgcatctctgctcccggatgaatcataatcatgtttgaccccatctccgagatttgttgctggatgctctttttcgagccctgaccgatggcaagcatagcaatgactgatgccacaccgatgatgatccccaacatggtgaggaaagcgcggagcttgttgttggcaagagcccggagagctattttaaatagattcgttccgttcataatgattcttttttatggttagtcctcatcattcttgggcaaggcagccagcgcggcagcggccgaaaggatctgaggattgatggtatcttccactacatgcccgtcacgcaagcggatattacggctgctatactgggttatttcgggattgtgagtgacaaaaataagtgtacgaccttcggcgtgtaacttttggaaaagtaccagaatttcgaaagaggtacgggtatccagattaccggtcgcctcatcagccaaaataacggcaggattattcaccagagcacgggcaatggccacacgctgcatctgtccgccggacatttggttggatttatgttccaaacggtcacctagccccacggctatcagtgattcaatggcacgtttccgtctttcggaagccgatatggacgagttatacatcaagggcaactccacattctctacggcagtcgtcttaggcaacagattatagttctgaaatacaaaacctattttacggttgcgcaacacagcccgctgaggtttgctcatggtacgcacggacacaccatccaacaggtattcaccactggtaggggtatcaagacatcccaaagtattcagcagagtggacttgccggaaccagaagtacccatgatagtgacaaactctccttcataaatggtaaaagagatgccacgcagagcgtggacggtttcatcgcctacctggaagttccgttttatattttgtaattcgattatctttttcatatgatttattctttcaatgtaaacggaagcattaccttttattacttgttctttttcttattgcttcccggagggcctggcatgaacggacttctctcaccttctccggcagacggctcttccattccaggcatagcacctttcactaccgtttctgtcactaccggcgtattttcagtgatgccactcacaatctctgtcttgctgccatcagtaatacctattttcacaggatgggcggtaaaggtattgttatccagtgtccacactttatgactgctctggcaatcgtttatcttacgacctcccactatgtctttgttgggagtaaagcgcaaagccttgttgggaacggtcaacacattatccttggtcaatgtataaatggtagcgttggcggtaagacgcggtttcagtttcaaataaggattatcagctgttatcactacctcataagtaactacagtggtactggtggttgttgaagagctgctgctcgtgctgttcgtacttcccaaacgaacctgtctgactactccttcgaacacatcgtcgggataagcatccacggtaaaggttacacgggctccttcctccaccccggcaatatcggcttcatccacatcggccaccacctgcatcttggtcaagtcggcagcgatggtgaacagtgtcggagtttcgaaaccggatgctacggtctgtccttcttccacatcacggctggtcaccactccatcgataggcgaggtgatggttgcgtatgacaggttacgctcagcctttgccagagccgccttgctttgctccaatgcactttgggcacgttggaaattataaaccgtttcttcatagtccatatcgctgattaattgcttctcgtgcagtttacggttgcggtcatataatttcttttggtaatcgtactcggcctcattgccgtcataagtggcctttgccgactgaagttcactttgcagtgtcactttatccatctcggctatcaattctcctttctttaccacagaattgtaatccacataaatcttgtcaataataccagatacctgcgtacccacttccacctctgtcaccggctctatggtcccggtagcagtaatgaaattgctgacattacctttcgttacggtttccgttgcgaaatcgaccgtactttttccctccggtccgccaagcatccagtaaccgcctgccacgaccactacggctaccgctgtagtaaggatcattttcttcttttccataatataatatgtatagcgttatgattataattttatatcctgacctgcatagaagttcagtagagtccgatccaagatagccatatacttggcctgaatacgttgctgctgtgcactgagcaggttatttttctcggtaagcaactctacggtattcttcattcccaagttgaattgctcgctgaccatctcataactggcccggctacttttcagcttactctcagccgccgcatattgctcttgagcattagtagcgtccaaccacagactttctatattcttatagagttccttttgcttgtttatcaaatcgagtagactactatcatattgcaaacgtgccttctgcacagcacttttgttctggcgattatcaaaaatcggaatgtttatattcaatcctatcatattattccagccatatttcatttgtttgctccagctattatcactggcactgtttgtcatactccccgtagatgcactcagactgatggtagggagatagccggctttagccactgatatgtccaatttggaattctctatgctcaacttgctgctttgaatttccggacgtgatgccaaagcctgctgataaacatcctcctgagcaggtaacggttgcaaaacatgttcatcggcgagttcgggaagaaccaaatccatttcttccgtaccatccagctccaacaactgcttcaactgcaatttatagtcacgcaaggaactttcggagatcaccaactgatatttgtcactgcctacctgtgattccaattgtgccaaatcggcttttgaaatacttcctttatgaaagagttctttgcccctgtcgtatgtagcttggctcacctgtaaggtgttctggttaattttcaccgactcgtcggcataaagtatctggatgaatatttgtgcaatctgctcttgcaaagagttttctgtttcggctacggtaagccctgcaatctgctgactcgtcttcttttgtttgatggcattcaaccgtttgttaccattccacaatgtccattgtgcattcagaccatagtttccattataagtggttttactgtcactactgatgatttccgttccgcttaccgtgttactggtttcctgatacggacggttcgtcacattctgtcctgtgctgaacgacagactgggaaatagtgcggctttggcggttttcacgtctaccgaactctcttccagtgagattttgtcctgctgcaattggatatttttctccaatgcatagtcaatacagtcgtccagcgtccactttttggcctcttgcgcggaaaccgaagtgaccgcgacccaaatcattacgaaatatactactcgttgtctcatcctttttactatttaatttgtttgtacaaaagtagaggactgtgatttttttagcaataaatatagatttgtggaatatttctatggacaaaaacttgctttttaccgataaagtgtttttctttgtaattattacaactttaagataaatttatgaatgattctttgttgacacgcatctggatattctatcgcgacggctttcgcgagatgaccttgggacgtaccctttggacgattattcttatcaaactattcatcatgttctttattctaaaacttttcttctttccctccttccttggcgggaagacaacggaagagaagcaacagtatgtaggtgaggagttaatagaacgggcaaatccataaacatttaaataaatcagaaagttatgtttgaaaacattgacacttcattaattgactggtcaagagcacagttcgctctaacggccatgtatcactggcttttcgtacctctcactttgggattggctgtgataatggggctcatggagaccttttatgtaacaacaggtaaggaattctggaagaacacagctaaattctggatgaaactgtttggaatcaatttcgccgtaggtgttgccaccggtctgattctggaattcgagttcggaactaactggagtaactattcctggtttgtgggcgatatcttcggagccccactggctatcgaaggaatcctggcattttttatggaagccactttcattgccgtcatgttcttcggctggaacaaagtgagcaagcgtttccatctggcatccacctggctcaccggactgggagcaacgatctccgcttggtggattctggtcgccaatgcctggatgcaataccccgtagggatggctttcaatcccgaaacagtaagaaatgaaatggtggactttgcagctgtcgccctctctcccatggctatcgccaagttcttccacacagtgttaagcagctggatactgggagccgtttttgtagtaggaataagttgctggtatttactgcgcaaccgtcagaaggagttcgctctgagcagtattaaagttgccgccgccgtaggtttgttcgcctctctcgtcactgcatggacgggggatatttcgggagtacaggtagccaaagtgcaacctatgaaaatggctgccgctgaaggattgcacgatggcggaaacggagtacccttcaccattgcaggcgatttgaaaatccccaaaatgctttctatccttgccactcacgacatagacggttatgtaccgggtatcaacaatctgctggaaggtggttatcagatgcccgacggtacaacggctttatcggccgaagagaaaattaaacgcggacagattgccatcgccgccctggatgcattccgcaaagcgcataaggcaggtgacgaagcaagtgccgcagcagctcgcaagacattggacgaaaacgtaaaatattttggttacggatatatcaaggatcccgcccatctggttcctaatgtaggacttactttctggtcattccggatcatggtggggctgggaggttatttcatcctgttctttattatagtactgattgtatcgaaaaaagagaaactggctgatatgcgatggttgcaacgggtggctttgtggactattccactagcctatatcggcagtcaggcaggctgggtggtagccgaagtggggcgccagccatgggctatacaggatatgttgcctgtaggagcagccatctccaaattgcagacaggttccgtacagcttactttctttatcttccttctattgtttaccgttctgctctttgctgaaataggtatcatgctgaaggccatcaagaaaggaccggagggaattaagaattaaggaataaatgaaacaggtggaaataattcaggctgcgcaataaatgggctacatacaggagattaattccgccatcaagtcattctttttttagttcaagtttctctaattctatttttcaatattcaattctcaatttttaatttagaatattatggactatatatttctacaaaattattggtggttcctagtatcgttactgggtgctttgttggtgttcctgctctttgtgcagggtggcaactctttgctgttcacgctgggacgcaatgacgaagaacgtgccttgctggtaaactccacaggacgcaagtgggagtttacttttactacccttgtcactttcggcggcgccttcttcgcttctttcccgctgttctacagtaccagctttggcggtgcttactggttgtggatgattgttcttttcagtttcgtattgcaagctgtttcatacgagttccagtccaagctgggcaatctgctgggcaaacatacttaccaatggtttctggttataaatggtattgtaggacctctattgctaggaggagctgtggctactttctttaccggctccaatttcctggttaataaaggaaacatgggtaatgagctgatgcctgtcatcagcagttgggcaaacggatggcacggactggatgcgctgaccaatccttggaatctggtcttgggatttgccgtattcttcctggcccgccttttgggcaatctttattttatcaataacatccgggataaagacttaatcccccgctgccgccgtcagcttataacagatgctattcctttccttattctatttctggcatttgttatccgtactttattggctgatggtttcgctgtaaatcccgagacaaaagaagtttatatggaaccttacaagtatttcatcaatctgatggatatgcctctattgctggtattgttcctatcaggcgttgtcggagtactttggggtatcggaagggctgtcttcagcaagactgcgaccaatggtatctggtttaccggaataggagttgtattgaccgtattagctttattgctttgtgcgggatataataatacggcttattacccgtccacagccgatctacaaagttcgctgaccttggcaaacagttgctccagcgaatttaccctgcgcaccatggcatacgtttccattctggtacctttcgttctggcctatattatttatgcttggcgtgccatagaccgcaagcccattacagcaaaggaactggaacaagacggacacgcttattaaagagtcttaatggattatagtgaaggcatcctgttttgcaaatagctgtaaacaggatgcctttctatgttaaataacattgtttcaacctataaaatgaagagaatatcttgcaaatttccgaaatatccgtacctttgcattgtgtttttcatagtattagatttaaggttaacaaaggttggagcaaggcgttgctcctttttttatatctataggagacatagcatccatagttgattcatttcccatctagaaagttattttcgtttaaactcttcatctaaaagaaatattatgatacaagtgatgcatacagttgcggattacgtgcatgatgccaaatataagatgccggatagaccccttccttgtttttatcaaggatttctttcaaaatactgcatttgttctcgcccgtcaccagaaaacaggtatgccgggcttctatcaagggacgtcccgtcatgcatatacgcactgttttattataaggattgacggacacctcatacggttccccggcggtaagaagttcctgatggtcggggaaaatggatgatgtatgcccgtcctctcctatccctaataatacaaaatcaaaaacaggcacaccgtccacggtcggaacggtggtcttgactatggaagaatactgtttggcttcttcttcgggagcgccctcacccacaatacgatagtaatgactggcaggaatacctaccttactaaacaacagacgataggccaagccaaagttgctctgatcatcgccaggtggcacacaacgctcgtctacccaatagaaataaatacgggaccaaggggtatatgtggcatattcacgctcccaaacctcaaaaagtgtggcaggagtagtccctccggaaagagcaatggtaaaaggccgttcaagctctttatccatcgcttccaatatatgagttatcaaggtttgcgacgcttgtacaggcgacgcataaaagttatggtcaatcatcttattcactatttattacttagagtttgctgttttaaatttactatccacagatgacgacttacaatttacagtataaattggaatgtgtcagattcttgcacgggtttgtccactcggaatgactgcggttgatcaatacatccgcttctttcggtccccatgttcctgcaggatacccataaagaggagtttcgggatgcttcttccaataatccagaatcttatcaaagtaagtccagctctcgtccacggcatcggaacgggtaaaaagtgtaggatcacccaccagactgtcttccaacaggcgtacatacgcatcccccgtttcctgatcgtgctggtcatagctgaagtccatctccatggttcccatatagaaaccggcaccaggttctttcatggctatgcgctgaagaattccctcgtcgggttgaatacggataatcagttcctcacctttgtaaaaaccttccttcatttggaacatctgcataggagcaggtttgaaatgaaccacaatttcggtcaccttggtaggcatctgctttccggtacggatataaaaaggcactccctgccaacgccagttatccacatacagacacatcgccacgtaggtatctgtacgggaatcaggacgaacattcttttcttcacgataaccgatacggtcatcaccagcaatatattgtccgcggataacattatcacggatatacttatcagtcagcggacgaagggattggtagaccttgatcacctcgttacggaaaccattcttgtcaaacttggccggtggttccatggcagtaatagcaagcaactgcatcaaatggttctgtaccatatcgcgcagagctcccgccccgtcataatatcctccgcgagtacctatacccatattttccaccgcagtgatttctacataatctatatagttacgattccatatcggttcgtaaatagtacttccaaaacgggtcaccataatattctgcaccgtttccttgcccaaaaaatgatcgatgcggtagatatcctcttctttaaaataagcggcatagattttatttagtttctgagcggaagccaggtcgtatccgaaaggcttctcgacaatgatacgctttaatccaggctttttcaacaagcccgcatcatgcagacatttcggaatcaattcataaagcaagggcggagttgccagatagaacaaatagttcccattattctcatattgaggcgaaagctccttcaaacggtcatttaacagaaaataagtggtttcgtcagccgggtccatggactggtaatgaacagtagagagaaaatcgtccaatgtttccatttcctctttagtaagaaaaccgaattttatcagttcttctttcagataggcacgataagtttcgtccgtgtatgcagtacgggcacagccgataatggcaaaatgctcggggaagcgtttcccgttatgtatctttatcaaggcaggcatcagtttgcgccgggttaaatcaccggatgcaccgaagatgaccaaaaataaactatgtggtaaactcatgattctttgttttaaaaatgaatgtataatgctttgtgttgcgacatatcaatagttgtcttcccaatgttcgtggaaaaattccccccgtggactgtccacacgctcgaaggtatgagctccgaaataatcacgcatcgcttgaatcatattagctggggaacggttggtggtcagacccagaaaataattcaacgctgcggaaagtacaggtacgggcaacccttctctcaacatgacaccgatgtatttcttccacgcgggcagggcttccattacttcccgtccgaaatgctcgtccagcaacagatgcgacaatcccggtgcacggtgataggcctcggcaatgtcgttcagaaaagcagaacgaataatgcatccggcgcgccacaacagcgcgatagtggaaagattcaacttccagccatattgctcactggcagtgcacatcagagcaaacccttgcgcatagcttgtcagacgagccgcatataaggtactttccaatccgatcaccgtatcctgataattatataccggatgattctccacatgcatataatgtttggacatcagcacgcgcaagttcttctctgccgacagattacgggcaaaaaccgcctcggcaatcacgtccagtggtgtatttagttgtagggagttaatgacactccagcgacccgttcctttttgtcccgcagcatccagaatgttatcgagcaaataatcgcctccttcttctttatgacgcagaatggccgaagtaatctctatcaggtaactatgcagacgtcctttgtcccattgttcaaaaatatccgccatctgttcattcttcaacgccagcaggtgcttcatggcgaaataaatttcagcaatcagctgcatatccccatattctatgccattatgcaccatttttacatagtggcctgcgccaccgggacctacccactcacaacacggagtaccatcctcagcttttgccgcaatacttttcagcatcggctgaatgactggccatgcctcttgcgcaccaccgggcatgatggacgctccatgcaaagcaccctcctcacctcctgaaatgccgcaacctacaaagtacattcctttatcataaagttcctttacacgacgttccgtatcttcataataagagttgcctccgtcaatgaggatatcacccttttccatcaaaggaaacagcttgcccgtcagttcatcgacagcgggccccgcctgtaccatcaaaaggatgacacgcggagttttcagtgcttcgacaaaatctgtcagttcattactgcctatgatgccttttcctttggcgcggttggctataaagtgttccactacattttcttcttttccaggaacggtacggttccatactacaaccttccatcccttgttggcaagattcagagcaaggttctgccccatcacacctaatccgattaatcctatatctgccttttccataaattattctttttatatttaacaatttgataggttatttgttcaataattctatctttgcaatttgaataataacacattatcatgaagaggttaaaaatcggcttattagcccgaattatcatcgccatcacattgggtataggattcggaaacgttcttcccggcgaattggtcagagtatttgtgactttcaacggaatcttcagcgaatttttgggtttcatcattccactgattattctcgggctggtcactcctgccattgccgatatcggtaaggaggcaggaaagatgctggtgataacgacattggtagcatacagcgccacgttgttctccggtttcctgtcttatttcaccggagtgacttttttcccttccatgattactccgggagcaccgatagaacaaatcagcgaggcacatgatatttctccattcttcactgtagccatccccccggtgatgaatgtgatgacttccttgattttagccttcacactaggtctgggcatcgcacatctggatagtacagcgctgaaaaacgtatgtaacgatttcaaagaaatcatagtcaaaaccatccagacggtgattctgcccctactgcctatctatatattcggtatattcctgaatatgacccattccggacaggtatataacattctgatggtatttatcaagatcatcggagtcattttcctgcttcacatcttcctattggtttttcaatataccattgcagcgctgtttgtacatcggaatccgttcaaactactgggaaagatgatgcctgcctatttcacagcattgggcacacagtcatcggcagccaccattccggtgactttgcgacagactgtcaagaatggggtcacggaggatatagccggatttgtcattccgctatgtgccacaattcatctgtcgggaagcacgttgaagattgttgcttgcgcactggcactgatgattatgcaaggaatgccctttaatttccccatgtttgcaggattcatctttatgctgggaatcacgatggtagctgcaccgggagtaccgggaggagccatcatggctgcattggggatcctgtcttccatgctgggattcggagaaagtgaacaggctttgatgatagcactttacattgccatggatagtttcggtactgcttgtaatgtgacgggcgatggggctatcgcattgattattgataagtttttcggaaagaaaaatctccggtccatacaataaacaggaaaaatattcccgaatcagataaagtcaggaaactctgtaacccattcatgaaaagttgccaggctgatttatgacgtgtatgataaaaaaggtaacggctttaactctgataaaagaaaaacattttcatgataaatagcaggcaggcaacaagttgcctgccgattcttcataacaaacaaaaaaggaaagcatgagctagaatacaggcatctgccaaatgaatcccactgacacacgatgggtactgaaattgtcctcacccaacgcctttgcacgatcggtatatttataggaacgccccacgtatgccaggaagaagtgcagattgctctccatcggataaaattctatacctcctgcatatccccatgccgtgcgatatttccctttttccacttcatcgcttgccttataaacggaagcagtttcatacattccttttgcaaacaagttccactttggggcaaaacgataattcacatgcaacacatatgacatatattcggcattaaaagcattgtgtgcctgattatcagtccctactatgctagttataattcctttacggtctactccttcacgagaatacatccagtcaaaataggcatgccatttagggctgaaattaaattcattacccaaagcgtaataatacatcttttcgcccttcgtttcgttcatcacagaggcagaccaacgggttttgaaaacatccaggaaatttccgttccagttcaaggtatagactaacggcaatttggtacgttccaaatctccatacatctcctcagacggcccgttccgactgttcaatacctgaaattgtatctgctgataaggattatagttgtatgccacattcaaaccggtcatgaagttactcatgtgctctatcatgtcactatattcgtaaatatcaatcggattcaaatcaaattctataccaccatacgagacacattgctttccggcaaaaaatgagaacttatttaatttgatgcctactcctgcccaatctatgctggtaggtacattatctatattgtcggaaccatcgttaccccgattcagacgctgacggtaacggtaactcaaccaatcattgatatctcccttcatttcgatacggagctgcttcatttcgaatgcgccctgatcaaatccggaatcattccatttcatgttgaaatcaccgtgcatattaagatagagattgaacttatccgttttcttcttgataccggtgacttcttcaaacaggcttttgtcaccgaccatgaaatcacttccggaagattgggcatataaagagcaagtgcctgagacagcaagagctgtcaggcatactaacattattcttttcataagtcaaagttttaggttgtaatgtattctctttttcttttatgcgcacaaaagaaaaagagataaaaagaaaaagtgccggatggactagtatacgttgaagtattcctgaatcttcttccagtcttttgttttagttaatgccaacatcaacaacacacgcgctttctgaggattcaactcttgtgaagccacgaattgatatttattatcatccacctcggcatccaatgtggtcggtccggtaggaacacggctggaacgcactaccaaaataccttgctgacgggccttttccaacatcggaaacaaattctgatgaatgttgccattccccacaccggcatgaataataccttggtaaccattattcagaaaagggatcataacatcagcctctacattggaataactgtaaacgatacctactttcggcagcttgtcaaggtgggccacatcaaaatcggaaccggtggtatggcgtttcaaagattccatattatagaaaaccttaccattcaagacatatcccaacgcaccggagttaggggactggaaagtctgtacatccaccgtattggtcttcatggctccgtgagctcccaaaatcaaaccgttcatggcaattacgacaccttttccccgtgattccctggcggcggcagtgactactgcattatacaagttcagcggtccgtccgcactcatggccgtagaggggcgcatggctcctaccaatacaacaggcttgtcactcttcacagtcaagttcaggaaaaaggcggtttcttccattgtatcagtcccgtgggtaatcacgataccgtccacatctccacggctgaaaagctcgttgatacgcttggccaacgtcagccatacggcatcattcatgtcctgagagccgatttttacaatctgttccccggtcacattggctattttgttcacttcgggaaccgcttccagcaatgtgctgatagccacctgtccggcagtataatttgttttagtagccgaagcgcctgttccggcaatagtccctcctgtagccaatatgtggatattaggcttttgggcgacagcagccaatgtggtacataccagcattgccgccataaggctgagttttcttaatccgttcataatcttttcaagtttaggttttattactataataaatatttggaaattttgttcacacaaagaagaagatgtgccgatgatatatatgtatacatcgaatcattataaatgttacaggcagaagatcactcatcttcaagtccgactacacctaccccctttcctttctagaacacctgtaccagcagcagacctatcacaatagaaacaatggtggccaccatcccaggcatcatgaacgaatgattcagaatccattttccaatgcctgttgttcctgtacggtcaaaatttatagctgccactactgtaggataattaggaataaagaaatatccgttgacagcagggaacaaagcaatcaacatcatcggagaaatacccagtgctattcctaacggcacaatggcacgcaccgtagcagcctggctataaagcaaaatggacatgacaaacaatgccagaccgaacaaccagggcatttggcgcacaatcccctcaatagagcctgtcagttccgtaatgtttccattaatgaaggtatctcccatccatgcaataccaaatatagcgattaccgcctgcatcccggcaggaaacacactgccttgtgtagctttaattccatccgtacgtgaaatgagaagaataacagccgccgcacacaacatcaaaatctcaataatagccggcatatccaaagccgtaccattgaacacaggacgcatggcaggaatagaaccgaacaacactatcaacagcgtggcggcaataaaaattatcaccgagatacgggcatgaaacatattcttcacatcgttcagctccacatgttttgtatcaatcatcccggcttccaagcggcgcaagtattcgggatcttccaacaactctttacccaccttctttgaaaggaaagctcccaccagcacaccgattaatgtagcgggaatagtaatctttagaatatcaaacagagtgatgtcaaatcctgtcagcaatcccagcaacgctacggtagcggcagagatagggctggcggtaatagcctgttgcgaggcgataacggcaatgcctaaaggacgctcaggacgaattttagtttccgtagccacctcggctatgacaggaagcacagagtaggccacatgccccgtacctgcgacaaaagtaaacagataagtaaccaacggactcaggatagtcacttgtgaagggttacgacgcaacaaccgttctgctaatttcaccatatagtccagtccgccggcagcctgcatacaagaggcggcagagataacggcgacaatcatcaacatcacatcaatagggggagcggtaggttgaagtccgaaaacaaaggtcaatatggcaaggcctacacctcccatcactcccagtccgatacctcccagacgggcacctacaataatagcgacaagtacaaatagcagttgtaataacatgttttttatccgtttataaatatacaattttaattctgagaacaaagatagaccatttctgttctacaaaccttaaaatttctaagaatttttccttttttcactactttctccctaaaacattcaataaaagttagttgttttgtataatgaacaatttgtcaatgtgctaatcggctgtattatgtcccacatagttattggtacattagcaaatagacaaattattaaattattacatatgaacagaatttgcaatctttttggaataaagtatcccatcatacagggaggaatggtatggtgtagcggttggcgactggcctccgcagtaagtaacgccggaggactgggactgataggagcaggctccatgcatcccgagaccttacgcgaacacatacagaaatgcaaagcggcgacagacaaaccttttggagtaaacattccgctgatgtatcccgaaatagacatccttatcaatatggtaatagaagagggtgtgaaaatcgtcttcacctctgccggaaatccaaagacctggacagaacacctgcatgagcatggaatcattgtggcccatgtagtggcaagcaccaagtttgccgccaaatgtgaagaagcaggtgtagacgccatcgtagccgaaggattcgaagcaggaggacataacggacgggaggaaacgaccaccctatgtcttattccagccgtcagacagatcaccactgtgccgttgatagctgccggaggtatcggatcgggagaaagcatactggctgctatggcattgggggccgacggggtgcaaataggcacgcgctttgcattaaccgacgagagttctgctcatttcacattcaaagaccggtgtctgcgactgaatgaaggagatacccaactgacattgaaacagctctctcccgtccggttggtcaagaatgatttcttcaaacaagtggaagaagcggaaagccgtggcgcaacaacggatgaactacgcactttgttaggaaaaggacgtgccaaaaagggaatctttgaaggagatttattcgaaggtgaactggaaataggacaagtcgcatcatgcatacataaattacagacggtagacgaagtgatgaaagaactggtggaagatttcaatgccgcattaaacagggtcaatgagctgaaaagatttatctgataaggagaacgatgaaacgattaataaaccggagagtgaatcaaaaccaaaatgaacattctaaaggttacagattgtaaccgacaaatacagaaaagccgtatcattactcaaaagtgatacggccttcttattgtcaatgaagaatgtcaagtttcagatgaaaaattcttttctataaagttgagttttataaaattaagttattctacttacaccttctcttattaagcagattagcactcaggaatcccaccaaaaatatcagcaacgtcccgaacacgatagccagattggcatgtacaaagggggatatcacaatccaacaaaccagaattactccacaaacgactcccagtaccgcatcaaaattacgtgccttcctcgaaatataccccaatagaaacagtcccaacatgcctccgctgaaaatagacgccaacgcccaccaggcatccagcgcactttgcacactcataaaggcaaaagccaccagaatccctgccactcccactcctacactggagagtttcagcaccaacatccgctccctgtttccggcatgtttgcggaaccgctgataataatccgtcagaatgatggtagacgaactagtgacactggtcgcaatggtactcatacctgcggcaaagatagaagcaatcagcaggcctgtcaaccccaccggcaactcattgactataaaaaacggaaagacataatccgcccccaccccgtcgggcaagatccccggatgcactttatagaacgcatacagcccggttcctatcataaagaaaacggccgaaacgggaataaacaaatatcctccgaacaaggccgaaaatttagcctccttctcattcttcgccgtatgataacgttgcacataactctggtctataccatagttctgcaaattagtaaatataccataaatcagacacacccaaaaagtggactcacttaaactgcttccaaagcttcccaagctgaatttaccatcttccatggcgatggagaaagtctgcaccggacctccgggcatatcaaaaagcaaaataaacatacataccaacgcacctccgatcagaataattccctgtatggcctctgtccaaatgacagccttcatgccacccaacatggaataaagcacaatagccacactggttacaacaataatggtctggatatgccatcccaacaatacattcatgggcaacgccaacaaatacagaatagaccctgtacgtgctatctgggtgagcagatagcaggacgaagcatatatacgtgcccaagggccgaaacggttttccaaaaagctataagccgatatgctgtcctgactccggtaaaaaggcacaaagtaacgagccgcaaaataagaggcgataggaatagaaagactgaatacaaatgcattccaatctcccgaaaaggcctttcccggatatcccagataactgatactgctgacatacgtggcgaagatggacatccccaccacccagccgggcaaacttcttccggcagaagtgaactcctcggaggtacctttcttcttaaagaaagaacaaccgaaggccacgactccgccggtaaacaacaaaaagacgattatatcaatgatatgcatacagaccgagcatttaaggtttcaactccggacaaaaagggagtgcctccaacgccttgcgtatcttctcgcgttccggaacattgaagcgatggaaaggagccgcaacaaaatcatcacaaacgcccaataaagacaacgcgcatttcaatcctttcaaataactggagccatgctgccccacggtataaatactgctactgatttgcatcaccaagggttgcagccgacttacggtttccatgtcacgcgctaccgcagcatgataaagatctacatataattccgggaacatattggcacctccgttgatccccccatgtccacccagcaacacacactctgccgtaatttcctccggtcccaccaacatggcgaaatcctgtctgtccttcatggcatacatcacggactggaaataaacggcattagccgaactatccttgaatcccaccacctgaggattacgggcaatgcgttgaatagtagccggagcaaaattcactttcgtgtgcgacggcatattgtacaagaagataggtaacggcaactgaggaatcaggtcctcataaaattcggccagttcaggctgtcccggagcaaagtagtaagggggagcggaaactacggctgaagcaccacactcggcccctacatgtgccagatgaatactttctacaattgatgtatcggaaatacaaaccagaaccggaagtcttccggcattgatacggcaagtttcctttatcatttcatggcgaagccggtaactgatactctgcgcttctccggtggtacccagtataaataatccgtgcacccctccttttatcaatcgttctatcaacctttccaaaccgtcaatatccagtttgtcattatccagtaacggagtcactaaaggaggaataatgcctgtcataggcttttttaatgtgttttccatgattcgttttcttttaaaaatttcaatgctatatttatgaaacgaacagtaggattatttgtactcagcccaacatcccggcttgtccggaaagcgacagggcactatcgtttaacctgtcgtcttccgtctgcccggaacgtacctttagaaaaagaacttttaattccgcttcaagaaaagaaagttagttatacatgcgggcaactcttcctgataatgtgtcaccataatcatggtcttgtccttacgacgacagaaagtttctatcacatctttcaccaaccggcggttgtacaagtccaacccatgcaaaggctcatccaaaataagcaactcaggatccttcacaaaagcacgggccaacaacaccagacgctgctcgccactggacaactgcaagaaattccggtctttcaaatctgcaataccaaaaatatccatccaccattcacaagccgccatctgctcgggacgcggacgtttgtacaaccccacagaatcatgtagtccgcttgccacaatatctatggcaggaaggttcttcagataagcgcgatgcatctcaggactgacatatcctatatgcttctttatctcccaaatactttctccggaaccgcgttttctgccgaacaaggtaatatcacaagcatagctctgcggattatccgcacagaccaaactcaacaacgtagactttcctgaaccgttctctccactcaaagcccatttctcgccacatttcactgtccagtccaaatctttcaaaatggtacgctcgccataacggatgcttaccttgttcaaatcgactacgtgctcggtgtgatacaaatcaccgccgtaaggcaaattcagaatccgtacctccttttcttcggaaagtatccgttccggtatcggcttacggaccgccaaatattcctgcaaagttatctttttaccacacaccctgtcttccacaggaataacatgagtaataaaagcaggaatatcatcgaacttagacaagataaggattacctgcaaatgggttactttagtcagttcgcccaacaatgtatgaagcaggtctctcgtcttcgcatccagtccgataaagggattatccataatcagtacacgcggattactcagcaaagtctttgtcagttgaaacttacgtaactcaccactggaaagcagaataatatgtttatccagcatcctctctatgccaaacagttcatacaaagcctttttcagacctgaatcggtcgcttcgggcaacaaatcacgtaccagtggggtttcatccaaatcatgggcattccatcgttgctgataatagtaatttccatcggaatctccgtatgaatcacggaaagcaatatactttatattctcgtatgccatcttcgaaggagaaggagagaaatcatacttcacttcgttcatcaacaacggccaccggcctgtaatcgtatctaccaatatactttttcctgccccgtttcttcccacaacagctatatgttctccggtggcaagtgtcatattcaccggttccttcatccggtacagcggatggcgggtcacaccattttctatcgcaataatattctgcattacaaatctcttttttatccaacaggatgcaaaggtaacaaaataatataaaaatgagataatatattatcatcttgttacatcaatcatccaccttaattatatatgataccaattatacaacactgaataaccaacaaaatattacctaaactatatgttccataacagaatataggctcaaatttattaagcatcaacaagatatatatttgcactaaattaagacaaaaggaaataataatagaataaattatagacaaaatggtaacaacaatcaagttcacaaagatgcagggagcaggtaatgactatatatacgtaaacaccctaaagcacctcatgtcctaaaactgcatacggagaacgagctggtagaagaagtaacagtggacatggatcttcccctgcttgccaactccagacaaataaataccccggacggcaaaatgttggcaaaaacaatcacagtagatggaaaagaatacaaaagaacatttgtttgtatgtgaaatccacatttagtggttttcatagatgatataaaagatgtaaatttgccggcaataggtccgaaactggagaatcatccgctttttcccgaacgaaccaatatagaattcgttgaagtattatcacataacaagcacaagccattacaagaaaaacaaatacatacgagatataacaaactcactattatgaattaaaaaggtaaaaagcaatgaaaaagagttctagaaaaacaacatttctgtcggccttggcaatagctgttccggcaatgggcatggcgcaggacaaagtggaagccagcgtaggagccgatctcgtaagcggatacatctggcgtggtcaggatttagggggtgtcagtatccaacccacgttgtcagtttcttacaaagggttctcattgtctgcatggggaacagcaggtatcgaaaaagaagatacaaaagagattgacctcacattaggctacgccacaggaggtttcagtatctccgtcacagattactggttcaatggaggaccggggtattttcattacggctcacacaataccaaccataccttcgaggcacaaataggttatgacttcggaccgctggccttgaactggtataccaatttcgccggaaccgacggagtgaataacggaggaaacagagcccattcgtcctatatctcggctaccgtacctttcacactggcagggctggaatggacagcggaaataggagcgactccgtggagcacagacttttacaactattccgaagtccctgtatgcaacggttccaacggtttcaccgtatgcgacatcagcctgggagccgccaaggagataaaaatcactgattcattctccgttccagcttttgcaaaagccaccgtaaacccacgcactgaaggggcttatttcgttttcgggctaagtttttaatcataaagagcataaccagacaaggataacaacaaagtattagttttttagaaggcaaaaagattacattatatacaaaatacaaatacaacaataaaaaaattgaagctattatctgtaagacccaattcgaggacgtaaaagaagcattgctcgaagccaaaatcgaatggttttcctattacaatgtaaaaggcattggcaaaacatgtcaaggacgcatttgaatgccgtccgcatccgtacagaagagcgcggatatatcgccttgtacaatgcagaacaggagaactaactcattacacggccaagactactccacaaagtaaaaatcatactataacttaagcggaaaattatggatacaactaacaaaaagaggtcgtcagatgtagaacaacctctttttatcaggtaaacacatcataaacaagaaagatgaattacaagcaaggtaccttcacaaatgctgtatccgggaaatgcttctctatataacgacaaatataagtttctgtatctgcttgaatgattttatcctctccttcgggaaacagattgtacatcactgtatgaagctttatccctctccgttctatagcctcaaaactcaataatgtatggttgatacttcccaatcgtcccgaagtaacaaaaactaagggataacccgattcctgaacatagtctatagtcagattatcttctgtcaacggcaccatcagccccccggctccttctactaaaacagcatcatagcgctcactcagcacctccgtggcatgctttattttatcaaaatcaatggcgcggttatctattcgtgaagccaaatggggagaagccggataagaaaatatttcaggtttggtaagtccctgctcatcctcaggcaaatactccatccccatcagacgacgatgcaactcaatatcctccgaataaccttccggatttccagtctgtatgaatttttgagtaatagtacgacatccttgtttgttccaaagatgtgccagataggccgtggcataacttttgccaatatctgtatcaataccacttacgaaaaatacattctgtttcatgattctttttatttctattgtcttttctttgcaataatataaataggatgataagtcaaagtcaccgaacgaccatcactgaacaaacgggcatacttgtcacagaaatcctgcaaatcccttttagtccacgcttgttgcctgacagcagccaccccggtgtgtttcaagtgataaagcacttcgagcggagtaccgaaagtcagacagatacgttcctcatgagccttcacgatctcatagtgtatgcgcagcgcttcttctaattcctctaaagaacgatagtgaagaccgctgccggtaaccgatgcaacttctttcagattatccctgccgaacgtagtaaaagcaaaatatcctttctgcttcaacaaagtattacaacgttcaaaaaacagctcgggagaaacaaaccactgtaatgccgagcatgatacaatcaaatcctgtccttttggaaaaggaagggactcggcatcccctgccagaaaggtagcctgcccgcttcccaacaaatcggtgaaacaagaactcatctcctgacaaatatcattcaacaccagtttttcaggatggagggtttccatcaacctacgggtaagaaagcccgtcccgctaccaatttccaatatccggccgcacggacggggcaaataatgatttagcatatcactcatgcggtatgctatctgcttttgtgccaccgcctcacggttataactctctacagcgcgggaaaagcgacgggttatcaattgcttattaatcatatgtttttgttttaaataacagacgggcatagcaaatctctcattatttcttctgaataatgaggaatatcatactctgccacttccgtcccggtccatgcatttctttggttgaccgccgtaaaaatcaaatcattcttgcctataacagcccgttcccatgcaaaactgggaacagcgcaagattttacctgttctccaatcctccgaagctcttcttgcagttcctctaccgcacgttgcggacgtttcgacaagaatgtttccagattctcctttttcaaacacatcctgcggataaacttttccaacgtaccctcattcaagccttccagtgttccttcaaaaacttgctgcggaatacctttcaaatcatcgacaggagttaccgtgccattcaaagcaacacgctcacaaataggcaagtccatatcctgcaataccatagacgcggcccatactcccatagaccaggctatcaggcgaatctcctgataaccctgcaacaacgtgaaatcaaaatccagcgaacgataatcataacaaaccaacagatcgctattttcggggcaataatccatgaaaggacattcatccattccccaaccggcaaaaaaaagtgtcaatcggggaagatgcttttgttgtataaaataatgtttcatatcaattctatcagactttttatttcttcttcagtaatatccgctgtcaacgaaaaacggatacgcgatgttccttcgggcacagtgggaggacgcaccggcaacgcataaaaacctttacgctgcaagaaatcggcctttaacaccgtatcaccgctatcgcctatcgtcattggcagaatatggctggtagaaggacaagcgtagcctttctttaccaacgcgtctttcaaaagagaggatattctcttcaacctttccctccggaagctgaaactgtccaaatgctccaggataaagaatgtccatagcaagttgacaggaggaagagccgttgtaaatatgaatgtacgcattttattgatcaaataatcacggatggtcttcgaacaaacaatatagcctcctactgaggccaacgctttaccaaaagttccacataaaaaatcgatgtcagccacacaatcctgttcttccgcacaccccaggccatgtatcccccgcacccctacagcatgcgcttcatccacatacagcaatacattatcatattgttgcttcaaagtgaccaaacggcggagatcggcctcatcaccgtccatactgaaaatactttcggttacaataattattctatcatacccggcatgattggaaaccagcaactgttccaattggtcatatcggttatgccggtaccggatacacttggccgccgataaacgaatgccgtcaataatgctggcatgtaccagtttatcggcaagaatcaatgtacgagcatcgctcactgcaggaagaataccggcattcatgtgataaccactattaaaaaccaacgcgctttccttccgaaacagtcgggcaagcaaatcctctatctgaacatagatattaaaatttcctgtcagcagccgagaggatgaagaggaaggaagaaaagtgtcgggagtaagactttgcaagaattccgtacgtaatggcaggtaagcagccaatcccagataatcgttggatgaaaggttaagcatcacttttccattcacctccacctctcttccccaatggcggataacaggcaacttacgaagattacttttattttcaagcagggctaattccctttcccagtctgttaatgaattcattttttctatttttcccaatactatcacttattcttttaattctcctactatctttaccagtgaatgcgtcaatttgctcaattcttccggctgaattataaaaggcggcatgatatacaccagttttccaaaaggacgtacccatactccttcttcgacaaaacgacgttgcatgaaagccatatctaccggtttcttcacttcaataaccccgatagctcccaatacacgcacatcagccacctgcggcaataaagcagcaggagccagctccctcttcaattgtgattcaatagcctttaccttttcctcccaactatatgaaagcaacaattccacggatgctttcgctacggcacaagccaacggatttcccataaaagtaggaccgtgcataaagactcccggataaccgccggaaatggtatcagccacctcatcactggcaaggacagcagagaaagtcatgtatccaccggtcagtgccttacctatgcacatgatatcgggctggacacctgcatgctcccaagcaaacagtttccctgttcttccgaaacctgtcgctatctcatcaaagattaacaacagacgatattgcctgcaaagtttctctacctggcgcaaaaactcaggatgataaaaacgcattccgcccgccccttgtacaataggttccaaaatcaatgcagccatttcttcatgatgctgttccaatatttccttcaagggttctatatcctcttcataccagattccgccaaagcgtgaccggggagcaggaacaaaataacgcacaggcaatgtagggccaaaaatatgatgcataccggtcaccggatcacaaacggacatggcattccacgtatctccatgatatccggactgaatagttacaaaattgtttttcttttccttcccttgcgcataccaatattgcacggccattttcagtgccacttctaccgcaaccgaaccggaatcagcataaaatattttctgcatacggggaggaacaatcttcagcaacaacttgcctaattcgatggccggatcgtgtgtcagtccgccgaacatgacatggctcatacggtctatctgttccttgagcgcttggttcaataccggatgattgtatccatgtaccatgcaccaccacgaagacatcccttctatcaaacatcttccgtcctccaattctatatatactccatccgcccgtcttaccttataagtggacagcggatgagtagtcgatgtataaggatgccataaatgctccctgtcaaaattttccatatattatttccttattgttataataactttataatgtatcaaagcgaatacccggcctcttctatcaatattttatcttctgatactttggaacctaatgtagtcagcaaatctcccacaatggcagaattaataccgatatacaatgctttctttacagcttccacactcatctgtgaacgccctccggcaaaacgaagaaaggctgtgggattgataaaacggaataaagcgatggttgtcagaatctccgcctctgcaagacgatccattttttccaatggagtgccgggtataggctgtaacaggtttataggaatagactgtacttccaattccctcagtgtaaaagcaaactcaatacgctgttccattgtttcgcccatgccgatgattcctccgctacatacatccatccccaccctgcgtgctgcctgcaacgtttctattttctgttcttgtgtatgagtagaacatagagatgaaaaataagagggagccgtttccagattacaatgataacgggtgatgcctgccttaaacagccgttccaattccgcttcatccagcaatcctaaagaagcgcataactgaatatgcgaatgcgcacgcatgtactctgttgtctcacatagccggtccatgttacggctacccggtttcctgccgctggtcaccaaagaaaaacgggatactccctgcgcttcgttatacaaagcatggcgcagacattcttccttcccaaccaaatcataaacatccgcttttgttttataatgtgcagactgtgcgcaccatttacaattctcaggacatttaccggatttagcattgataatggaacacatatcgaatttccgagaagccaggacccgtgttatctcatgagccgcatcatacaaatcctgtttctctgcctggcaggacagccaacgggcttcttctacggtaatcttctcaccgcccaacactttgtttcttattgcattcagcatcatatacagttcatattaagacaaaaaaagccgaaaagatgcatggcacatctttccggcaaacaaatatttatttaaataaaaaagacaaatcacgtcagccacctgtggttgaggcagttggatccgaaacatttgcaacatggattcaacaggggccattccttcttcatattcctctccagcatcctctttccgtgcggaagagcaaacagagaatgccgtgcaaacatttgcctgtttacccaacgatacatcggcaatctcctttttcagattaccaatagttacatatttgcccaagctataaaacatagcgtacttcttccggctccaatagcggaaacgtatcgtatgtttattctggcacaattgtttcatgttttttcgtatctgagattggcaaaggtaaataaaatattcaatgcagcaaacttttatatagaaaaacaccgttccgcctcttacaaccttaaaaccagttttccgaaagcacaacggtgaattcttaagtcctttatattatatttctgttattcttctttcttcgaagcagctttcttggcaaccggcttctttgccgttgctttcttggccgcaggttctttctttacggcaggagcctttttgccttcagctttctccagtttagcctgcaatctctccacttccttgttcaaagccaccaattcctcgccctgattcttaatggtagtaagcaacgaatttaattcttcgttatccatatctaccggatacaacgaattgacacgacttataaaatcacccaaaatgttcatatagttggtgaaagcatcatacggagaatcataaataccacgattcaaccaaataccggtattcttagtggtcatgaagcggaaattattacttgcctgcaaataatcccaatcctgcttaatacggcgatcatcgcacaaatgaacacgttctgccacactataaagtttattgaaagcctcacgctgcatcacattgcctaaccacggactgatatcgcgttcctcgtctatccatgacataggataaggaacatccacctgatccacagatttcagtttggtaatgatatcggtcggagtagagaaagtaacccctctttcttttgcgcagacaggcagtgctttcataaattccaaaatattggaagacaatggctgggcgatacccaaagcagaaagttccatgaaaatattgataacctgctcctcctccggcaaagctgcaatccaatctatatatttgtcggcaaacaacggatattcattccattcggaattagagaaacgcaggctgatgtcatcagacaatttgaaatcgcgaagcaataacttcaagttcggattcatggcacaatgatacaggtagtgcgggctcttccaacccaaaatatgtttcgcgccttcagtcaacatacctttaaagcccatatcggctatcgtagcgccaatatcattcgaataaatcaagctggagttacggaataccttcggctccttgccaaatatttgtttaatcttggtacgcatacgttccacttcttcgcggaaacaatcttcattagccaatgaggaaagaccgtgagaataaggttcgcacaagaattcgcaacatccggtctcattcaactgatgcaacaactcgattacaccgggcgcatgcacttccaactgttccagcgccacacccgagatagacaaagccaccttgaaagtatcaccgtgattctttgccatttcaatcaacgcactcagcgcaggaatatacgagcgttcggctatatcactgatgccgcgctcattttcataatcatcataataataatggtcacggcctatatcaaaacagcgatagcgtttcagatggataatttgatgtatttcaaaataaagacatattgttttcatatcctagttattgttttattatttaccatagttttttaacacctgctcatagagggcacggattctcaagccgactttctcccatgtaatgccatccacctctttctttccttcttcctgcagatattggaaaagagaaggattcgtacaaatagaatagatggcatcggccatagcgttgatatcccaataatctgtcttgattactttatccaaaatttcaccgcaacccgattgctttgagatgatagaaggagttccgcactgcatagcctctaaaggagcaataccaaaaggttctgacacggaaggcattacgaatacatcactgtttttatatgcttcataaacctgacgcccacgctggaaccccgggaaatgaaaacggtctgcaatacctcgttccgcagccagattgatcatggcgtccagcatgtctcccgatcctgccattacaaaacggatgttacgggtacgcttcaagaccaatgcggcggcttccacaaaatactcgggtcctttctgcatcgtgatacgccccaggaaagtcaccactttttctttcgagtgatcaggacgaggaatgtccagcaaatcttgcgaaagcggataaacggcattgtgcatggcaaaacatttgcgcgggtcttgatgatattggtgaataacagtctgacgggtcagctcggacacacacataatacagtcggcatgatccatgccattcttttccatagcatatactgtaggattcactttaccgcgcgaacggtcaaaatcagtagcatgcacatggatgcacaaaggtttgccacttaccagcttggcatgcacaccagccggataagtcagccagtcgtgcgcatggataatatcaaattcttgctggcgcgcaaccacaccggcaataatagaaaagttattgatctcatcatgaaggtttcccggatagccgccggcaaactccatacaccccagatcattgacgtgcatatatgagaaatcagaatagatatgatcacggaaagcataatactgttccggagtcgaagtcgaaagacgtgactttaagtaatcataatccacatcacgccacacaatgggcacttggttcatgcctataatgttcagaaacttttcttcgtcgccacaaggtttgggcaaacagaaggttgtttccatatcaccttgcagactcagaccttttgttataccgtaagatgctacagcaagaccaccatatattttgggaggaaattcccatccaaacattaatactttcatacaggtccctcctttcaataattgtatttactcaataaatataatactcgtaatatctctgccacattcatagcgaatgatacagctccacgacctttgaaaggcgggttaccatcaaacagttcaggtatagagccaatacaatgagaagtcatttcgtcttcgtagcctatcagctgacgctccacaaatcctatgccactcatcttataaatacgaaggtaagcttcaaaatagaagccagccagccaaggccatgcggtaccttgatgataagcataatcacgctgcatctgaggacctacatagttcgggttgtaaccgccactcttcgggctgagcgaacggagccctttcggggtaagcagttctttggtcacaatgtccaacacccctttcttctgacgggcatcaagcggagaatagtcgaatgctacagtaaatatcatgttcggacgcacactccagtccatcatattgccatccacataatccagtaaataaccatactcattcaagaaagtatccacgaaagcctttcccgtcttttctgccaatacatttaacgtttcagccaaattattgtttccaccttcgcccaacagttcatttgtaaagcgtaaagcattataccacaaagcattaatttctacgatatagcctgtacgaggaatcacaggacgtccgtttgcggtagaattcatccatgtgatagccttttccgttccgttggcatatagcagaccgtttgaatgcaagaaaaggttcggatgattctcccggcgaaggtattccataatgtcctgcaacaatgtaccatatttctcacggcattggtcacgcgacaccatcttggcatattgctggatacaccacactgcccaaagcaagacatcaggatgctccatttcgtacactttaacatcatcaggctcatcattaataaagtcatgaattgccttgcgggccgtttccatcaccatttcaaacttagccacttcatcaatcgccaatgtcagtcccggcagggaaataaacatatcgcgcgcacggcatttaaaccacggatatcctgccagaatataaaactcatctccctgtttatttaagaactgatgggcagcatttatcagacagtgctggaaattatcacgcggagtacgttcttccacctcctcttcaaaggttctctttaatgtacgggtaccggcctcggaaacacctcctgaaaagacaatgctttcacctttctttatgtccacttcaaaataacccggaacatacaaatcttcattaaaatcatatcctctctcctgctctttgggatactcaattccccgataccaatccggctgatagtggaattcgttcttcttgttcaattgcatatataattcgggatagcccggatacatgcatgtcttgatcccattgtccacctcctgatagtcacggctggcttgtgcgttctcatgagtatactgacggacgctgcggaaagccagaaacggacgcaaacgcaacgtagtggccgaatgtgcctccagcaaagtataacggattaaaattctattttcatgatgaacgaaaagcttttccttcttcagaatcacaccacctacccggtatatagtggtaggaactttctcacactcgaattcccggatatacttgtgtcccctggggctgtaattgtcaccctgatacttatgaagccccaggttaaattcagcgccgtgttgtatcactgtttcatccaacgacgataacaatacatggttttcatcatccagctcaggcaccggaatgacaagcaatccatgatattttctcgtattgcaatcaacaatggttgtacaatggtaagcccctgaacggtttgtgcggagaatttctttcggtaatgattccccgaggttcgtcataagagtcttgtcaaatcgtaagtaactcatagttgttattttaaggttataaatcaaatttccatatcaatttgtgtcacatattatttttgtatgcaacgctcaaaattagtaattaaatggataaagcaaaattaaatagcaaaatatttttcatttttcgctcaaatatccgtagtattgcacagaaatcagcataattatgacaaaatgaaacttgaaattcaaaaaattctattggcttttgctcttccgttattacttcttttcattctgtacaccctgcgtacaatggaaagtgtcatgaattgggattttatcacctggggcatatatcccaaagaaaccaaaggaataatggggattctcacttctccgttgatacacgccgattggggacatttatttgcgaacacttttcctcttctttttttattatggtgtctgctctacttttatcgtgatttgggcattggtatactttttttcatctggatagtcagtggaatacttacatttataataggcaagcctggatggcatataggtgccagcagtataatttattcactcgccttctttctgttcttcagtggcattctccgcaaacacgttcctttagtagccctgtcattgcttgtcacctttctatatggcagcctggtatggaacatgttcccgcagttcgcttcctccaccacttcttgggagggacacttggggggcgcagcggccggaatagccgcagctatattgttcagacacaaaggtcctcaacaaccggaacttttcattgacgaggaagaagaagataacaggagttatccggaagacgaagaagtcattacaaatccggaccaagaaaagaaagaatgactaaaccaatctttccgcctcatgaagtccaaaggaccggaagggatgaaaaaagcaataacccgctaacggaattaaacgaatgctcatatcctccctattgtataagccttttctatcttcagattaaacctttttatacggatatattctatctccatagcctttggagttatctcccaaggctatggagttaactccaaagcttatggagacaactccaaaggcttgcggagataaaacaggcaggaagaaaacccttaaccatacgtcaggaaaggtttaggaatccgaataaaatattttaaggatgaatctgattacaaggccacatactccttacagaaaaaagtctccctacgcccttcttttaaaaagaaaaactataaaaccttgtttcagggaagcacacctttggaacaacaaaaggtccggacttggaaaagcccggacctttattttatatccatcaatacaagatattaatacacctctacctttgcagcagcagccttgcacttgtcacgcaaagcgtccaagtcactgccattaggagcataacaaaccacaactcccatacggcggttcaattttgtataaggtttaccaaaaatacggagataagtatttgtctccttacaaacttcctcttcaccacgataacggggagcttccttgctggcaattggagaaagaatcactgcactggcccctatgcgttcttgtgtaatttcagggataggaagtcctaacaccgcacgcagatgcaactcaaactcatttaaattctgagtacctgccaaagtcaccattccggtatcatgcggacggggagaaagttcggagaaataaactccgttttcatgactcaagaaaaattcaactccccagattcccgcaccggtcaaagccgccgtcactttatcggccatacgctgtgcctccttcaaatgttcgggatcaatgtgcgccggctggaaactttccctataatctccccctttctgtacatgtccgataggcggacagaacaaagttggaccgtttttctgagtgacggtgagcaaagtaatctcactatcgaactgaataaattcctcaatgatcaattctttaatatctccacgactgccttcacatccataatgccatgcctgttccaactcatccgcgctcttgaccaaagactgacctttgccggatgaagacatcaaaggtttcaccacacagggaaaaccaatctcttttgcggcctcctgcaattcttccaaagacttggcatagaaatacttggctgtctttaatcctaattccttagctgccaaatcacgaatggccttgcggttcatcgtgaaattcactgcacgggcactcggcactacttgaataccttcctgttccaaatgatacagacgttcggtacggatagcttcaatttcaggcacaattatatccggcttgtgtttggctaccacagcatccaacgcatcaccgtcaagcatactgaacacttcaaattcatcagccacctgcatggccggagcacctgcataagagtcgcaagcaataacatactgccctttacgttttgccgcaatgacgaattccttacctaattcgccagaacccagcaataaaatcttcttagtcatagtatttatatatgtttgatattccttacaaaaaacggagagttgagaacaagacacctcttgattcccaactttccatctgcaaagatagtgtattttataaactatacgatatcattgaagcaatatttggatcattcagtacaaagaaaacacccactcccaacgcgatgagccacaatacgataaatataattttggttacaatggacatgggttgccaacctccaaaatgacgcatcagcatgtgtatcagtcctataataggaataccgataaccagaatacctgctacggacatagcgacagtcaaccccggagagctacccaccgtagcccaattaaccgcaggcagcacctcataaagcacagccggcaatgcagcaatcagtcccgtagccgccatcagcaatgcaaaaaagacaatcaataatacaaacaatacaggcgcacagcaaatagcaatgaaaacaagcaggaacttgataaggaaccctgccacagacacaatcccctcccctatcttttgcaagatactcctaggacggtctgagcgtacataatcattcactttttcaaatccgtctgttacagtcttgcctatattctccatattaatagcagcccccttcatggcgagtttctcgggagcggtacgcgccataggaataataatccacgctatgatataagccaatatcaccccatgaacaaagaaaccaagaaccaatagaatgatacgtacccaagtaacatcccatcccatataagcagccagtccggaagccactccacctagtaccttattgtccggatcacgaaacaagcggcgcatagtggttcctttttgtttttccgaacccgatgcttctccactttcttcatcggaaagatcttcgggtttacccatccgggctatgatttcttccacatcttcaatggtaataacctgtttaccttcattcaaacggtcggtaaacagctcagagatacgtaattctatatcatgtacaatttcttccgctccctcctcacgacagaagtgaatacgcaggttagttaaatagttatccaacaaatggtaagcgtcttcgtctatatgataaacggtacctcctaaatttatggttaaagtctttttcattgtatcctgtttttaattgttttttaaatgattcactgtattcgccagctcctcccaggcagcctccagtccgctaaggaatgtttcaccctgaggagtgagactataatatttacgaggtggtccctgagtggactctacccattcgtatgagagcaggtcatcgtttttcagccgggtaagcagcggataaagcgtcccttctactacaatgagccgggcttctttcaatttttgaatgatatccgaagcatatgacggctctttgtgcaacaacaataaaatgcagtattccagcattcctttgcgcatctgagatcgtacattgtctacattcataatctataatactttgtttggcacaaatatatgtattatacaagtaccttgtattacatagttctactattttgcataaattaatatttaaacaagaaaaagaaaggaatcccctttttttcttgcaaaaagtttatctttgcctctcgttataacactaaaaagatataaagatcatgtttaccataaaaaaggcaacgaccaatgatattcagttgattaacgagatggctcagatcgtgtttccggctacctaccgggaaattctttcaaaagaacaattggattacatgatggactggatgtactctccgaaaaacctgcgtaaacaaatggaagaggaagggcacatctattacatagcttacaaagatggagaagctgccggatatgtttccatacagcccgaaggagaacatttatttcatctgcagaaaatctatgtacttcccctttttcaaggttgccggttgggcaaagcactatttgagcaggccgtcaaagcaattaaagaaatccatcccggaccttgcgaaatgcatttgaatgtaaaccgtaacaataaggctttacaattctaccaacatttgggaatggaaaaagttgcagaaggagatttccatataggcaacggatattatatgaacgattatatcatgggactgaaaatctaaccctatcttacaaaaacaaaatggacgaatatcgtatcaatggattgaccataaaagaaaatttgctgcaactggcagaaaatggaaataaaaagtttaccgaatcgctgcatccgggaatagaaaatgtattgggtatccgcatccctgccctaaggcggttaggagcacaaattgccaaagatgactgggagagttatctacagactgcggatacttattatatggaggaacgtatgctacaaggtatggtaataagtaatctgaaaatgaaagacacgcaagcatatctttcactggttgcccggtttattgccatcatcaacagttggtctgtttgtgacacctttgacttttacggcaaacaacggtttgtggacaagaacaagaaaagggtctggctatttttggaagaccggatgaaatccgacaaagaatatgaaatacgtttcggagtagtaatggcaatggctcattatattgacgaagagtatatagacaacgtattgcaatggatggaccggatcagtcacgaaggatattatgtgaagatggctgtagcatgggctttatccgtatgttatgtcaagtttcctcaaaaaacgatgaactatctgaaggaaaatcatttagatgactttacttacaataaggcactacaaaaaatcatagaatcttatcgggtaagcacggaggacaaagaaatcatccgcagcatgaaaagaaaaaacaaataatgtccatttaccgcaaagaggctttgaatccttccgaaagaaattcaccattcatattcggaaagattcaaaccgctccagcagctattaataatcgggaaaagttattcctcccaaaccaaataagctgaaaccagccaatgattcaatttattgccatctacctgttgtgcctcagggatacttaccttaaaagaatgtttaccggccgacaagtcaccaataacagcctcctcaggcatcacatcgctacccggacaccaattggaacgggacaaatccgaagaagccaaaggttcttcaatctcttttgtcgtataccccttatcacctatatatgcggcaactcgtggtatcagccatactcccgtggccggattaaaacggcggaaagaagcacagtcatcacgccaaggaatgaaattcaacacctccttgccatcaacagacacgatgttccgtttctccacaaactcatctccgccactatgtcctccgtgacctgttacaatatacttcaaacgaacattcttggcagctttcggcatatcaaaatccatcaccacatctttgcgtgagaaaatatccggataagtctgtccgatataatacaccgtattcatcaaaggcttcacacggcgctccggcatcacgtcgcaagtgatcttactctccttcacatccaattccatactggccacatacccctcggcagtccatgtatcaatataaattcccacgtatgcctctctctccaatgccggataaagatcggtaatatcctgcacccaagtcacactcttttcccatttcgggatatatacaggacgcctcttgctgctcaaagaatcattatccgaactataataccccacaccgaacggggtcataaaacgcatcagttcaagggtaggcacataatcctgacccggaacaataccaatcattttttcatatttggtactgtctaccgcaggaaacgccctcttgccttcggctatattcatcagattaatcaccgattctttgggaagcacaaaacaagagccagatttatcccaacggtcaccattggaagctacagttactttcagggtaacatccacatcccttttataatcgggcaaggttattttctttaaaatgatacgcccgtttaccagacggatcactccgtcagcattggcaggagtataattagggaaagaatcgggacgaaaacaaacaggggttttgtcgaatacttgaatatgagtatttcccaatgccggtaattctttgtgatttgcagcatcggccggcatcataaaagttgccgccacagccagtggggcaataaaggtcagcaggttcattctttttaattataggttagtaatcaagggtatataaattaatttcacaaaaaactacacgggcctacacaaatcgtccgatctgtataaatccatgtagtctataataaaaaaaggaattattgatgctgttcacgcaacaaatcattcacagtcttcaccgggttaaaggtactcaacggcacttcaacaaaaacagtgttccagtcactcattgcgccgttccacaagcccggaagctccaatgctttcagttctctaccgttctttgatttataagagataaaacctgtagccttatccacatacttcaccaagtcgaatttgtttcctttataatcgcgtaccgcacacaccaaatccaccggattaaagtgagtacccttctcgaacatctctttcttgaccggatcattcatgtcaatctgagaactttccaaaatttgcaatgaaacagtaccatccgcattataagccaggaacgggccgcctcccggttcacccacattcttcaccataccgcatacacgcatcggacggttcaacttcttacgcagataaataaccagatcggcatcttccagatccttgatatccagtttgcggcaacataaagtctgctgtaagaaacgaatgatctcttccagctgcgcatgtgtatatttaccgccatccagtaattccaaatattcaaatacctgcttctgcagagtaaccagtacccccgcaatcagctttttatacgtaacagtatcctctttcaagcgatcgggaaccacattatctatattcttgataaagataacatcggcatccaaatcattcaggttctcaatcagcgcaccgtgcccccccggacggaacaacagcttgcctttatcgcggaaaggtttgttctccatatcggcagcaaccgtatccgtactcggcttctgttcagaaaacgacacatcatattccaccccgtatttctttgcataaacggcaaccttctcttccaccagctttgtgaacaactcacgatgttccgtagaaacggtgaaatgcacattcacttttccggtcttgcctgccgcatacaacgcaccctccaccaaatgttcttccagcggtgtacgcacaccatccgcataccgatggaatttcaacaaccccttcggtaatgccccatagttcaagccggcagcttccagcagattggctactataggtttatactccttcccggccatcaaagcatcaatatcctttcctgtattatccatacaagccgcattcaagtcattgtagaatgcgaagctatgaatatggtcgaaaaatttcttttcgaaatcagtcttcggaatattgtaatcagcccccaggaattcgaacaaattcttgaacatgcggctggcagcaccagaggcgggtacaaacttcacgatggttttctccccttccttatatgtatcccatgcttccaaataatttttcatttcattttcggcgggagccatgattcccttttcaacagaagcggctgcatccaacttcaaaaatgggaaacccttttcaaagcaagccagttgttctgcaatctgctgctcggaaattccttttttcactaataagtctttgtcttcaggtgttaacataagtacatgattttatatggtttaaataaattgttaccttattctttcactattaattgcccaaaaatacaaaaaaatgcgagaacactacctaataaataaagaaaaaaactacctttaccctcgaaaagatttcacgtgttatggaagaaaaagcatttttcacagccaaagagcgtgagcaactgttcgccctctataaacgattgctgcaattatccggcgacaccttgcagaagggtgattgccataagttaaaaatacacctcataaaagcagttgccgaaggtaacctgccacgaaattgtttcggaatgaatcctatcatcaaagatatgcagaccgctgtcatcgtggccgaggaaattgggatgaaacgggcttccatcctggggatcatgctgcacgaatcggtaaagaaccatttatgcaccttagcatctgtacaacaggaatatggagaggatgtagcggggatcatacgcggtcttgtgaaaatcaatgagctatactccaaaagccctaccatagaatcggaaaatttccgcaacctgctgctctcctttgccgaagacatgcgtgttattctgatcatcattgcagaccgcgtgaacctgatgagacagataaaggagactcccaatatagaagcacgcacccaagtagccaacgaagctgcctatctgtacgcaccgctggcacacaagctggggctatacaaactgaaatcggagctggaagacctttccttgaaatatactgaacacgacgtatattatcatataaaggacaaactgaacgaaacgaaagcctcccgtgacaaatacatagccgcctttatcgaaccgatacagcataagctggaagaagcaggattgaagttccacatgaaagggcgtaccaagtccatccattccatctatcagaaaatgaagaaacagaaatgtcccttcgaaggagtgtatgacttgtttgccatccgaatcattctggactctcccgtcgacaaggaaaaacaagaatgctggcaggtatattccattgtgaccgatatgtatatgcccaatcccaaacgtctgcgcgactggctctccgtacccaaaagtaacggatacgaatccttgcataccactgtaatggggcctgaaggcaaatgggtggaagtacagatacgcaccgaacgcatggacgagatagcggaacgtggtctggcagcccactggcgttacaaaggcgtaaaaggagaaagcggtctggatgaatggctgacctccatccgggaaacactggagaacgccgacagtgacctggaagtgatggaccagttcaaactggaattatacgaagacgaagtattcgtattcacccccaaaggtgacttgtacaagatgccgaaaggagcgaccgtactggactttgctttcgccatccacagcaaactggggtccaagtgtatcggagcaaaggtgaacggaaagaacgcacaattaaagcaaacgctgaacagcggtgaccaggtagaagtcatgacttcaaacacccagacacccaaacgcgactggctgaacatcgtcaccacttcgaaggcaagaaccaaaatacgccaggccatcaaagagatagaagcccgccagacagagttcgccaaagaaaccatagaacgtaaattcaagaaccgcaaactggaatacgatgaagcagtgatgatgcgcctgataaaaaagctgggatacaaaaccgtaaccgagttctaccaggacatagccaacgagacaagagatgcgaacgacatcatcgaaaaatacctggaactgaagaaaaaggaaacggaaaaccgggaagatattgtctatcgcagcgccgagaatttcagcatgcagacagcacaggacgacaagaccttcaaagaggacgtactggtcattgatcagaatttgaaaggactggacttcaaattagccaaatgctgtaaccctatctatggcgatgatgtattcggatttgtaaccatcagcggaggaatcaaaatacaccgtaccgactgtcctaatgcacgggagttgcaatcacgtttcgcctaccgtatcgtaaaggcgcgttgggctgggaaaagccacggcaaacaataccccatcacgctgcgcatcgttggccatgatgatataggaattgtgacaaatatcacctccattatcaataaggaaaacgatatcctgctccgttccatcagcatcgactcgcacgacgggctgttcagcggcatgatgaccgtaatggtagatgatacttcaaagctggaatcattagtaaaaaagataaagacagtaaaaggagtaaaacaggtaaacagaggataaactcaccccaaacttaaaaaaatgaatgaactgcataaacgactaaaaagctttacatacgcctggaaaggcgtatgtagttttttaagcaaggaacacaatgcctggatacattgcgcagccatcatcgccgtaaccattgcaggcatccggtttgaaataacacgcaccgaatggcttgtcatcctcctgtgctttgcaatggtactggctgccgaagcattcaacacagccatagaacgcctggtaaacctggtatcaccagactaccatcccatagccggagacgtaaaggacatagcggcaggagccgtactgatttgcgccatctttgccgccctcatagggttgattatctttgtcccttatttttaaaggtgttaatttaccatttatttcactaacagttaaagaccttttataaaaaaaacagtaatttagccccgataatttttaaaaagtggaactaatgaagaaaattttgctttcaacattattgttgattatagggttaaccacatacgcagccgtatggcaatctcaaggagaagcagaaataacctttgagaaaacaacacataacttcggttcattccccgagtctagcccgaaagttacttgcgttttcaaattcaaaaattcgggagacggtcccttggtcatccatcaagcgatcgcatcttgcggatgtactgttccccaatatcctaaagagcccatcaaaccgggtgaaagtggacagataacagtgacttataatggagccggcaaatttccgggacatttcaagaaatcaatcactatccgcacaaacgggaaaaatgaaatgacacgtctttatatagaaggtgatatgaccccgaaaggcacagttgcagaatagaattctcacatcataagagagaggatgtatcaaaacaaaagaagattcgagtttgatacatcctctttttatatccggaaaacactgccccgcctgcctgtatccaagtaaagacaaaaaaataagaaaaaaagaacatttttccccaataataagccactcttattctgattaaaataacgtactttgcagcaaatttaagagaacaatgacaaacaagctattattctttgtcctgctggccctctgtttcagtggctgtgacatgctggaaacccatccatacgatgtacatattacaggagaaagagaactgaccaacaaaaacatccagttgatagaaaacaaaatgcaaggcaaaaaaacaatccgctttgccatgatcagtgatacccaacgatggtacaactctaccgaagatgttgtaaaagccctcaatgcccgtggtgacatagactttgtcattcacggaggagaccagtccgatttcggcgtcacaaaagaattcatatggatgcgggacatatttaacaaattccagatgccctacgtatgccttttaggcaaccacgactgcctgggtacaggtgaagacgcatacagagccatttatggagatcccaacttcgccttcacagccggaaatgtacgctttatctgcctcaataccaatgcgatggaatatgattattcggaaccggttcccgatttcaattttatagaaaatgaactgaacaacctgtcgcctgaaatagaaaaaacggtattcgcaatgcacgtaaaaccttttgaatttgtattcaacaacaatgtagcaaaaatcttccaactatacgtcaaccagttccccaaagtccagttctgtctttacggccatgaacacaaattcgcagtagatgatctattcaacgacggagttctgtatttccaatgcccctgcatagacaaacgcatctacttattattcaccattaaagaagatggaacctacgattatgaaacagttgaattttaaaaagatatttctgaacctattgtggccactattgccttttacggcacaagcccaagaaaataatacactttactccatcttatccaaagacagcatacttgtctcctctccttccgttcaaaaccaagaggaagatattgtaacccaaatgccaaaccggcaccataaatacgacaagcgcgtacaccgttacaggcgtgcgtgggaagctttgatccccacccacaccaaattacagtacgccggtggaatgggcctgttatcctggggcataggctgggattatggaaaaagaggccaatgggaaaccgatcttcttttgggcttcatcccccgctactcatccaaacatttcaagatgaccatgaccttgaaacagaattatatcccgtggagtatctggctgggcaaagacttctcgctggaaccgctgactaccggaatctatttcaacaccgtattcagcgatgatttctggacaagcgaacctgagcgctatccccgtggatactacggattttccacccgtatccgcacccatatctttctgggacaacgcgtccgtttcgatgtgcccgaaaagtaccggaagttctctaaaagcatcaccgcattctacgaaatcagcacatgcgatttatacgttgtcagtgcgttcaacaacagttatttgaaacccgatgactatctgagactatcatttggattgaaatttcagatattctaatcaaatcatgaggatgtttctctattttttcactatttttgggcatttattatgataaatttcaaaaataacaacatagagaaacatgaaacaagaagaagaaaaatcggttggattgcccgataacgcgttccgacctctgaaaccgggggaacaatatcaccccatcatgtcaccaaacaaaaaatatcccgaagtaaacctatggtctgtgctatggggtatcgccatggcggtattattctcggcggccgcagcttacctgggattaaaagtgggacaggtttttgaagccgccatccctatcgccatcatcgccgtaggtgtatcgggagccgccaagcgtaaaaacgcgttaggtgagaatgtcatcatccaatccatcggtgcctgttcgggagtcatagtggcaggagccatcttcacattgcccgccctttatatattgcaggacaaataccccgaaatgacagtcaacttctttcagatgtttgtcagctcactgctgggaggtattttggggatcctgttcctcatccccttccgtaaatatttcgtcagcgacaaacatggcgaatatcccttccccgaagccactgccagtacgcaagtgcttgtttccggcgagaaaggcggaagccaggcaaagccattgctttttgcaggactaataggaggtctgtacgatttcattgtagccacattcggctggtggaatgaaaacttcaccacccgcgtatgcggctggggtgagatggttgccgaaaaagccaaactggtgatgaaaataaacaccggtgcagcagtattaggcctaggctatattgtcggcttgaaatacgcggctatcatttgtgccggttcattggtggtatggctggttattgttccaggtatggccctgttgttcggcgaccaagtgctgaatgcatggaatccggccttgacacaaaccatcagcgaaatgtcacccgaagttatattcaaggaatatgccaaaagtatcggtattggtggtatcgccatggccggtgtgatcggtatcgtgcgctcatggggcattataaagagtgctgtgggactggccgccaaagagatgggcggcaagaaggtggaagcaaacgtcatccgcacgcagaaagacctttccatgaaaataatcgccttcgggtccatcttcaccatcctgctgatcttactgttcttcttttttgatgtgatgcatggaaatgtattacacagcattgtagccatcctgctcgtagccggcattgcattcctgttcaccaccgtagcagccaacgctatcgccatagtcggcactaaccctgtatcgggaatgacactgatgacactgatacttgcctcagtagtaatggttgccgttggactgaaaggtgctaccggcatggttgctgcactggttatgggtggtgtggtttgtacggcactctctatggcaggcggattcatcacagacttgaaaataggttactggctgggcagtactcctgccaaacaggaaacatggaaattcctcggcacactagtatcggcagcaactgtgggcggcgtcatcatgatcctgaacaagacctacggcttctccaccggcgcattggcagctccgcaggccaacgcgatggcagccgtaatagacccgctgatgaacggtgtaggcgctccctggctgctttacggaataggcgctgtgctggcattggtgctgacctacttcaaagtacccgcactggcttttgcgctgggtatgttcattccactggaattgaacctgccgttgctggtaggtggagcggtgaactggtatgtcactacccgcagcaaagacgaggcagtgaatgccgaacgtggcgagaagggaactttgctggcatccggattcatagccggaggcgcattgatgggggttgtcagtgccgccatgcgctttggcggtatcaatctgatcaacgaagaatggctgagcaacccgttgagcgaagtgctgtcaatggccgcctatatcctcctgatcatatggctggttaaagccagtatgcatataaagaaaaaataaccctttttcaaataccgtgaaaataaaagctatatgaaacgaatcttactaatgagtttacttgcaatctctaccgcattatctgcccagaaacctgtagagttggaattatggcccgatggcgcccccaactccaacggcatcaccactcccgagcagaaattagagaacaaccggatttccaatgtcagtgagcctacccttaccatttatccggcagccaaaccgaacggactggctgtcgtggcttgtcccggagggggatacatacgcctggcaatgaatcacgaagggcacgatatggcagactggttcaacgcacaaggcatcacatacgccgtattgaaataccgtatgccaaacggacaccatgatgtaccgttgagcgacgcccatcaggctatccggctgatgagagaacacgccaacgaatggcatattcaaaaagtgggtatcatgggggcctctgcgggcggacatctggccagtacggcagccacccactatacagccggaacgcgtccggattttcagatcctgttttatcccgtcataagcatggatctgtccaactgccataagggctcacgtgacaatcttttagggaaaagcccgtcagaagagctagtgagactttactccaatgaactgcaagtaacaggcgacactcctcccgccttcatcatgcatagcagcgatgacggagctgtacccgtcagcaacagcgtgagctattacctggcgctggtaaagaataaagtccctgcttccctccacacctatcctatcggcggccacggctggggtttccgcgacagctttacctataagcgccaatggacgggagaattagaaaaatggctgagagaaatactgtaaaaaagcaaggagatctggcaaaacaaaaatgactgctccgaaaagttacagatagtaattataacacttattcattggccattacctgtcacaggtgtggtataaacgtatttgaatacctatgcgacattatagaccgttgtgccgcatggtttcccaatacctctatagaaaaatatcgtgatttacttccgggcaaatggaagcagacacaaaaatagccgccccaaaatctggacggctatcttttttatagcttatacgctatcgcggaaggttgtaccaatacagagtttgatgcgaccctttctttagtcttttaggatgctcaaattataaattcatatttccaaaaactggattttgacacacccactttctatttccgataaacacctgcatctttatctgcagaagacaaaaaacaggcattcgtttctctttcgcttattttcttgcgccaagttgaatatccaaatgatacaaagccacatcaccacccagcttgatcttgtccaaaataccctgaacggtagcttcctcttctacctgctcgcgtacaaatccccacaagaaatcctgagaagccttgtccttttcagcagaagcaacatctaccagtttgtcaatcaattcggaaacatggcattcatgcttgtatacatgctcgaacacatccagcggagaagcccattcctgaggaacagcatccacagcccccaccttggcttgtccgccacgtttcatcacatattgcgccaacacatcagcatgatcactctcctcatgagcctgcgctttcatccatgaagcaaaaccttcatagcctttcgcagcgaagaaataagacatggaaagataaagattggccgaccacatttcggctacaatctgagcattaattgcgtcttgtaatttttgtgaaatcataatttttattttttagttaaattgtaactgttgcaaatatataatttttctagcgattaacactatgtccattcacctttttataaaaattatattttatctcatccaagtctttgcgattcaaaagaaaagtcttacctttgcacccgctaatacgggttattagcattaattcaaatcattaattataaaaacattatttagaaatggcaactaaaatcagattgcaaagaaacggacgcaaaagctatgcgttttattcaatcgttatcgcagacgtaagagctccacgtgatggtaaatttactgaaaaaattggtacttacaaccctaataccaatcctgccacagtagatttgaattttgaacgcgcacttcattgggtaatgtgcggtgcacagcctactgacacagtacgtaacatcttgtcaaaagaaggtgtttacatgaaaaagcacttgctgggcggtgttgccaaaggcgcattcacagaagcagaagctgaagctaaattcgaagcttggaagaacaacaaacaatctggtctggctactttgaaggctaaactggatgaagcaaagaaagctgaagcaaaagctcgtttggaagctgaaaagaaagtaaatgaagaaattgccaagaaagtagctgagaagaaagctgctgaagccgctgccaaggctgaagcagaagccgctaacgctcctgctgaagaagcacctgctgctgaagctactgaagctcctgctgaagcataattcaattttacttcaaaaagaacagctcctctgatctatatcggaggagtttttttatgctcttatccgaggaatcaaagggagtttatctcatcttccgaaagtccggtaacttttgcgatttcagctatggaaagcccggcattcttcaaatttcctgcaatagctttggctttcatccattcaccttctgcaatgcctttctgaatagctgtattaatcacattgttccaatctctatatactttcaaactctcctcataggcataaaggttctcttttgagaactgagcaatttcggcagcctcaaacagccggttgaacacacgttcctgaagggcagtgggacgttccatcaaacgggccagattcttgagcacaaacatccatttatcaaacaacgtatccaactcctgctcggttttatggaatttaggcatttccagatacacaaaagtcagtttgtcaaaaaacacttcatgagtagttgtatccatcagcttcacttcatggcggaagccggaagacgaaacatcatccaaggcaaaattcaagataccgatcacatacactgctttcagttcatagtcccagatttcccctttaatagcctgttccctgataggataggtagcataataaatactccggtccttgaaaaactgttgctcccctctctgcatttctatcagaatcttttctcctttttcattttcacaatagacatcaaagacagcccggcggtcaatctctttgctgcccagatgctctgtattcaagtaggtgacatcctcaatgacctgcttgccatcgaacaaggcattcaagaagccaataagaatctctttgttcaagtcggttccaaacaataatttgaatgcaaagttcgtatagggatttacatatctttcacgcaatccttcactacacataagcgtttgatatttaaagttattttaattctgttgaaagcagttcaatacaaaggaacgaaaaaaagcggattttaagaaagttatctgctaataaattgttaatgttccaattgtacttacaattcatgtacaatgacaacacattctatccttatctcttcatgaaaagaatatctccatcttccctaaaaggatgaaaagccgataaattcatatctccaaaaagaaaaaactatcggcctatggtgcttgcttcttttctcccaagaaattattccaaattaacccatgttataacgggattatgatcagaactacgataaggatcttctctataataagatgtatatttaaatccccaataagcaggctcactggcattgatatcccaaggagcagcaccaactatttgtgaagtcagcgtaggagaacttaaagaatgatccaaatagccaacctccccacgataacaataactccaagccgcaggtgaatatttctttagcaaatttatatacccagcatccgtaaacaccttaatggcatcctccataccgtagctgttcaaatcacccaaaaccagcacatccgtatcttcataataagcaacaagctcattatatactttcaaacactcacgcgcttccataaccctacggtcggcagaacctccctgaccgtcattcttatctataccactagttttagctttaaaatgattcatagctaaaatcactttcgctttatcatccttcagttcaaaacattgaactatgtaccgcatcttcagattatcaaaattatagcttttaaactccttataaggcaaaactttcactttatcataaataaaaacatttgtttgtacctttgatgatttttgtccgggagtattcaaccaagcataccgttcttcccctaacgcattgttcaaagacctacaaagataatccacagtaaaatctccctgttctacttcacaaatagcataaatatccgctttcgcctctttcaatgcagctaagattttagcatgctgacgcaaggtttctgcatttcccgtattaccatacatataaaaattttccgcattgaaactcatcactttcaaattataatcatttacagtaggagcgacagaccgagcattataagaaactgacggcttttccgttaatgtaaaatgataaccggaagtactataagtcactttacctttaaccccagccatctcacttcctatacgaagtgtgttacacgggtcaatcaaagggaactctgatgtaatcagcaatttatcaacctcctgcttttctacccatttggaatattcaacaaccgacgggaggtttacatccgcaaatgcacgtttcaccttggaagagacaacaatagttccttgaggtttcgagccgctatacgtctgagtgacaaaaagcggattgacaattgttacttctttaccagctacagacgcagcccattcaggagaaaaatccgaaggaaaagttaccttcaaattatccttttccggaaattccatttcttccttatccgcagaatcgctacaagcaaaacaaaaaagggacaaaaggaagagaaaacatacttcactttttttcataccttatcattcaaataagaaaaagaaaagggagttcatacttttacagctaaactcccttttgctcattattaagaaaataatttattcagcctcatccaatgattctagaacgaaacgactttcctcttcgctccaaacaatctttgccacataagaagcggtacccgtactagtataaatcgaagaaataactttataattagtcacctgtccgtccacaaagactggttccggatgaactaattcgataaacttcacaagtcccaattttacctgttctatacaataagcatccatctcttcatccgtagtcaaattggccattgctccggttacatcataatactttttacgcgtatatccttttgcattccagttgccataagcagaacttgcgccataataatattctccctgacccactttctgagtatccagataaccttcatcaaaatttgccgccacataatcaaccacaagctgaaaatcttctttctgcatggtgatggtttcaaacaacaatccagaaggaacagtacgtttaaatacccattcattctctttataatcgtattcatccacttctttgtttacgatggtttccgattcatttctcat

SEQ ID NO: 3898 - DNA, 5004 bp, Unknown
  gut microbiota DNA sequence
aatcaagagtttgcttgcctgatggtgatttgacgtttgaaagaaccacagcattgtctattataatatcaaaagactgcggagtggcactcttctctcgtgtatctccatcctggttaatcgtttcccattctgaatatgcatacataaccttttggttctgctctatttgcacaggatagcttacttcatccatattgtccatgtcatttttggtctgtccatatatcctgcatactataccggaacaatctgtggatgacacggtcaaatattcataacttttaccactgttcgtacttgaagttgagctgtaaaatctatccaaattaattgtgatacttcttatggattgcttgaaattggctgtaatagtactgttggaaccatgcagggtggcggtagtggttgaactgcctggattttcgatagttacatcaccacctataattgtccagcctgtaaattcatactcactctccggagtagccgtaatactgatcggcttttccacctgatattccattgttcctttcggattagttgttccgccttcacctgcattgatcgtcagtgtgcgttttttttccttgaatccacaatggaaagtatggtcctgacctcctaagtcaacatcgaactctgaagtcccggattgtgcataatcgtatttcttaggttgattagccggccctccataaaaatagttcacctcatatcctgcatcaggatgggcttcaacaggaacatttttgcgtccgtcatacagtcctgctccagtggcataccccccggtaaaatcaacccttccgtctgaagagcgggctgaggtttccagcatcccctcgccttcgatgatgatacgtgtatcaccggtagggaccggttcgtccttttcagaatcctgttccattatctcctcattctggcagcctgtgaacatggccacgaacgccgccaacagtaaaaatttaacttgtttcatacttcattcttttttaaaggtttattataattgtatgtatcatttctttttcttatcgtccagcacgtcggcatcgatgcgggcttcgaacgtcgcataaagcacgaaccggttgaaaaaataataagtattgcgtgtcttgctgaaccttatgtcagcccccatcagccggagttcctccaggtagttgctgacggtccgttcactcacccgcatcctgccggccagttccgcacggctgccggtactttcctttcggatcagcctgtacatccggttgatccgttctatgtagctgacaacggaaaggctcgtcatatcctctcctccagtccggtctgttccaggaatctgcggaaatacccctcctccaggtacaggcatctcatcaacgcctcctttccctccctggcatacacccggcgaaggagcgggaaatccgtggaataaatgttccatctgatcagcccctccgccctccggtcaagttccgggcagtcagttccttccatccgatacctcacggagaggaagtacaggttcttcagcctgtatttctcaagaaaggaaatatccttcgggcatgccttcagcccgtcggcggcgatgcatcttaatacaagctgttcaatctcttcctgaattgtcatatccataccagtatggttttatagttctaccgttctttcttatctcataatgcagatgatagcctgtgcttctgcccgtgctcccggcaaagccgataacagcccctttcccgagctttttgccctccgtcgtatagtaagctgccagatgtgcgtaaagcgtttcaaagccgtaggaatgccgtatgatgacgcatcttccatagcctcccttccttcctgcgaaaacgaccgtaccggaagcggtggcatggaccggtgcggccagctccaccgccatatcgactcccgaatgaaaactatgttttcccgttatgggatgaatcctgcctccatacgggctgcttatcctgaacttgtctttcaggggacatgacagagggagcctgtctgccaccccgtaccggtaaagtatgtcccggcaagcttccaggctttccagacggctgcatttttccagtgccgtatcgagcagttcccttccgttttccccctcgaaagaaaaggggaagaacaatatgagcatcagcagtttcatctggatatcctccttaatatcctgtccgcttcatcttccgttttctgctcctgcaggcttctgaacacttcctccgctcccagaagtgacttgtttttaagtttgtacagaaagtgccggccgccgtttctctcctggatctcgatgatgagccttttcttgtcaggaatggtaaacttgttcatggccaccgtgaacgtccggctctcatgtgcaggtatctcctccgggtagtcgaaagcgaacaggatgttctgctcgatctgctgcaccgccgtcttcttgtgaatctttgcatcctggatatagaaccgcatgaaatccgtcgtatagcctatctgtgtgcggtttgtcagcgtcattcgcagcagcaggatgtccccgtcgatgaagatgtttccgacctcgaactccatgccggcgttcttgtccttcagtcccaggtccaggggaatcctcttcgagattgcctgcctgatcctttccttctgttcgcttgaccgttccctctcgtcaaggatggccaccctttgcgtcttttccttgtcaatgacaaagctgaaacgttccgggaaaggggcataatggagattgaaagtgtagaatttccccccttcgaccactgccgagatgttcgtgtcttccgtaaactctccggtggctttcactgccaggatgttgtccactccctcggccttttcaacctccacatttgtactgccatagtccacataggtgattccggccgggaaaatgaggaacatctgcctgtcctttcccaccggcagtgtatggggcgcgggtgcctggccgtccacacgcacatagctctccaccgggtgggcgttatagctgatggcataggagtagaacttcgtgtcggctgtcaccaccgacagggtagtctcacccgggaaattctcctcggccgctttcaggcgtatgatctccgggcagttcccgactttctcaccgatgacatagtcaccgccgatactgtaatacttcacctcggtagggaatatcaggtgcagggtcttctcgtacccgatctgaaggggcactgccggaagctcctcgatcctctgggctttccctgaaaggaaaacggacaggaacagtcctgttatgtaaattctgttcggtttcatggttttctttcaattctatatctttgtatgctaattttaaagttgtttgcttatgaatacaaatctcaatcagttgctcaaggatcttgaaataggtcccgcttatgtcaagatccttatttgcctcttggggtgtacttttatgctgtacccgaccttttttcacttcacctgttttttccgggaacttcctgtatacgaacaggtacttttcacatcgggcagttccgctttgtatacgggggtcggaattcttctttcagcgataagtccggtaaagtatccaaggatactctatacccctttggcgatgctttcctcttcagtaatgataagtcttttcatttgtttattttttctgaatgaggagtgcaaccgtttcaagctattctcaaccgttctgtcggtaatgtatctgctgcagttcattgcgggtggcatttccatactcaaggaaaagaaaggagagaaagacaatgcacattactgactcccttataaaatccgcgtattcatatactgtttgcaagaaagcggagaagcccataagcacacagtcagccaccaaaaagcaatgaaggtatcctgttgattcatatcatgcaggatctcagtattgcacagcaaagcgctcctagcgcacaaaacagcaacagcagccagtaccagttctcacgtatgaatgcccccaggtggctttcccctttccgtgccttcacttcccgcccgccttccggttctgaagccagacggagaaggattgcctcaaatgtcagtacggcagccattgtgaagaaaatgccggcatggctcaacaggttttccattttgctttagtttttattttcattttcattctttttctttctcatttttcccttgtcctcttcaggcagtcctccggttccgccttcctacccagattccggctgattgttccgtgccccataaagaggggctatcactataagtatacatgcaattcctaatactatgatgaataatagtcggatcaggtaatctgctttttcccaaataattcccatatcacatcgtttttttaattctttatttgatcagactctttcaggaaccgtgccacatcgacggctggtctttcctctccctgatatcatgcaatttatttcatggatgtttcatttttcttttccttatgatattctccagatatacccaacatcttattataatcttttcaaagatgtcagtaaacaagagtatatttaaacagagtaacataaggatagggacagcatatccccaagccccaagcttgttccaaagttcttccatgtcatacagtttttaagttattcaatctgtcaaactctttcaggaagcgtgtcacgccgtcaaccgggctttcctctccctgatatcatgcaaatctatttcatggacgcttctttgcatctgtccggtcccttcctgacgccttcttcttttttccttgaatattcatagtaactcttccaaaagcccaaaatgtgggaaacaatattaagggtgagaagaaagcagaaaagtaagatggtcacagagccgtttttcgataagaattcttccatatcatacatttttttcatcattcgttattgtcactttcagagtccgtttataatggcttacaggtacacaaggcttgccaagtccttgtct

SEQ ID NO: 3899 - DNA, 21900 bp, Unknown
  gut microbiota DNA sequence
gaaaaggaagtctatatcttcacttctcatcgtgagccggcattggacgggttacattatctttacagctatgacggctatcattgggatagtatcgcaggttcatggttgaaaccggaaataggaaataagactccttattataattatttcactaaacagaccgaagaacagaaatatgctcccaattcgatgatgcgtgatccgtccatgacccaaggcccggatggaactttccatttagtgtggacaatcagttggaatggagaacagggatttggttatgccagttctaaagacttgattcattggagtgaacaacgcgaaattaaagtgatgaaagactctttgactaacaatgtgtgggcaccggaagttttctatgatgatgaaaaggaacagttcatcgttgcctggtcttctgccattcctgtagaaagatatacggcagccgatagtttgggagctaataaaagtcaccgtgcctattataccacgaccaaggatttccaaacgtttactcctgcaaaggcgttttatgatccgggatttaattctattgacggatttatagtaaagcgtgataaaaacgactatgtattaattataaaagacaatcgcaagcctggttacagtgatttgttctgtgtatccgggccatcggcagaaggaccttatgctgatccgtcagtaaaatttgcaccgacttactctgaaggtccgtgtgccgtgaaagtaggtgatgaatggttgatttattttgatgtttatcgggaaggacggtttggagccgtgtctacaaaagacttcaagaactttactcccattgacgatcagatttctattccacaaggacataagcatggtactatcataaaagttcccgaatcagttttactcaacctgaaagcggaggaagctaaaagattccctcaaaaagactagttattacccagaattgtctgcttgaataagttactttgggcttttgaaatttataagatgaatgcacaaatgaaaaacaagaatctagtattattattccttcttctgatggtggaaggagggctgctttcggcagcagcacagagcaaatcgtcggtttataagccttggagtcatggacaactgaaagtaagtaaagagaaccgttatctgatgaatgcggacggaactccctttttctggttgggagatacgggatggctgttgcccgagaaactgaatagagatgaggctgcttattatctggaacattgtcgtcaggcaggtttcaatgtggtgcaggtacagactataaatggagttcctgccatgaatttctatggccagtattccatgatagatggtttcaattttaagaatatagacagaaaaggagtttacgggtattgggatcacatggattatattattcagaaagctgagcagaacggcatttacatagcgatggtatgtatctggggagggcttgtgcgctccggaaagatgaatgttgaagaggccaaagcgtatggtagatttttaggtgaacgatataaagatgcccctaatattatttgggtaatcggtggagatacttatgctgaccgaaatactgagatttgggaggcgttggcgaatagtattcttgctgtggacgagaatcatataatgacctttcatccgtttggtcgtacatccagtgctacccatctgaataataaggagtggatggatatgaatatgttccaaagtggacacaggcgttatggccagaaaaaaggagatggtgatacttctgttacgggattggaggaagacaattggcgttatgtagaagaggctttgtccatgactccactgaagcctgttctggatgcagaacccagttatgaaggtattcctcagggattgcatgatcctgcccagccacgctggcgtgactgtgatgtgagacgctatggatattggtctgtttttgcgggctcttgcggacatacatacggacataataatatcatgcagttcttgaaaccgggtacacctggtgggtatggagctgatggaatagagaaaccttggtataaagcaatgcaggatcccggcttcaatcagatgaaatatctgaagaatctgatgttaactttcccttattttgaacgtgtaccggatcaaagtgtaattgccggtacgaatgggaatcgttatgacagagccattgcgactcgcggaaaggattatttgttagtatacaattactccggaaatccgatgtctgttgacttgactaaaatcagtggcgcaaaaaagaaagtatggtggtatagtcctaaagatggaaaactttcttttataggagaatttgatagtaaaattactccctttacctatgacggcagttataatcgggataatgaccaggtattaattgctatagattcaagcaagaattatatttctaccgaatggctggaacttcctatggtaaatcaatagcatttttaaggaatacagccaaaaagtcttattaagtcttaatgaaacgggaaaagtcaatgcggaaattgtaattttgaaaaaacatatttacaaatgaaacgcattggcttgttcttattcttttgtattctttccttgcatggcatagctcaggttgaaaatgacaaggatacgctcatcatccggcaagataaaatcaatgagtttatcaatgagatgaatgaggctgataaaagtatggattttataaacgaacctcctacgttgacacctcccgttttatctgatacgttgcggatgccaaaatttgatcttactccccgtgaagaaatgcctaagatatccccttatattttttccggaaatcctttcggacatgattatatagatggacgtgcttatcagattaatagtacggggattctgagtggttatcattcttttcaagggttgccttctataggtgaggcacgtaatgccggagtgatgtacacacagcgtctcaatgattttataaccgtgacaggaggagtatatgctgctaaatacaatgtatatggagtccgctttaatgatttaggtgctaagggaaagctgtcttttcgcattaatgacagaatgaagatcaatatgttcggcacatactcggtgtataacggatatggtatgactcccgcctcacagctttttatgaaccagaattcatacggaggcactttggaatttaaaatatcggatagtttcggaattgaagcgggagcagagagggaatttaatccgatgacccgtaaatgggaaccccatcctattattatgccggtattctataaataataatttgtgtatctttacggcatgaatgaagagatagaagagtattacgaagagttatacaggctttatatagatgaaaaccagccattggaacgccgttacaggcaattgcgtgaatcattggagcgtgtggtgcgtgaaaagatacaagggaatagtttgcagaccactgatttggccgcccgtattaattatgtagccactcaatatgggctggatctgaaagaacagaatcagttacatacctttcgcctgacttccaatgatattttgaaccatcgtaagtctcctgtaaaagaagagttcctgcgtgatttgcgtgcagtggcatacgcatataggaagatgtttgcacaggatattccattgaagttgttctcagttcttcccaagcaggaaatagcatcttcagggaaaaaagaaaagatggaatacatccgccgcatccgtgtatgctttgattatgccgatgatacctatttgtatgtacatcctgtagatgtaatagctgatgaacctatacgggttgtttataataaacccggtatcaatcatgaatttgaagaaaccataaaggaactttggcgatatgcccagcttaatctgctggatgtttctgtagatagggatggaatttataccccttcttttatcgtattggaaccggattatttgatagatatcagttcattggcggaatgttacaaggattatggcagccatccggcaaactattttttgagccggctggtgccgattgataatgcccgccctttgctattgggaaatatagccaatctgttcctggatgaatggatacatgcaggtgaggaggagccggactatatagactgtatgaagaaggcattccggcagtatcccattgaactggctgcttgtgccgaacttcgtgacccgtccaaagagaaagagtttgccaaggattgccggatgcattttgagcatatacgggacgttgtacaacacacttttttggagccggggtataatctggataaaaaggaggctgtgctggaaccgtcctatatttgcgaggcgttgggcattcagggacgtctggactatatgcagcgggatatgagcagctttatagaaatgaaatcgggcaaagcggatgaattctccatgcagggaaaagtggaacccaaggaaaataataaggttcagatgctgctatatatggcagtgttggaatatagcatgggacaggaccggcggcgtatgcatccctatttgctttatacccgttatcctttattgtatccggccagagcatcgtgggctcaggtaaggcgggttatcaatttgcgtaaccgtattgttgctgccgagtatggggtacaattccataatcatcctgattttacacgcaacttgttggcacaaatcaatccggaggtggtgaatgaaagaaaactgagcggcagattctgggaacagtatttgaagccctctatctcgcgtttccgggagaagctgtcggcgttggaacctttggagcaggcctatttttatatgctttataatttcattacaaaagaactttatacctccaaatcgggagatgtggattatgaaggacgtgcaggggcttcagctctttggctgagtacactggatgagaaacgtgaggcgggagagatattatatgatttgcagataatggaaaatagggcatcacaggctcataaggcttatatacttttgtctattccgcaatatgatgaaatgtttcttcccaatttccgtacaggagatgtggttgtgttgtatgagcgtaataatgacttggataatgcgaccaataaaatggtttttaagggtaatattgagcagattacagatacagaattgcgtattcgtttacgtgctacccaacgtaatgcttccgttttttctccggacagtcgttatgctgtagaacatgatacgatggatactacatttcgcagtatgtatttgggactctccgcttttctggatgcgaatacggaaagacgggaattattgctgggacaacggcctccccgctttgattcgtcttttgatgaagctatagcgctgaccggtgatgattttgagagggtggcgttgaaagctgagtcggcccgtgattattttcttctggtgggacctcccggaacaggaaagacttcgagggcgttgcgtagaatggtggaacatttctatgcagcatcatctatgcagatattgttactggcttataccaaccgggctgttgatgaaatttgtcagtcactgtcctctatcaccccctgtatagattatatacgggtgggaagtgagctttcctgtgatgtacgctttagaggacatctgttggagaatatattggcggaatgcaacagtaggagagaggtgaatatccgtatggcagattgcagagtatatgttggaaccgtggcctctattgcggctaaagctgaactttttaaattaaaacgttttgatgtagccatagtggatgaagccacccaaatattagaaccccaattgttgggtattctgtgtgccaagtttgccgatgaaagaaatgcagtgggtaaatttatcctgataggtgatcataaacagttgcctgccgttattttgcagaatagcggacattctgaagtgcatgatgagggacttagggaagccggactttttaatttaaaagattctctgtttgagcggctttatcgttttcatttaaaagaagaatctcctaaagcgatagatatgctttgccgtcaggggcgtatgcatccgggagtggctttttttcccaataaagcattttatgccggaaaattggaggctttgggattacctcatcagttggagcacatagaggctccggtacgttttatcccttcgaagcaagatttggagagcgtttccggaaaaacaaacagatatgaggcacagattgtcgccggtttagccaaagaggtgtatctggctcatgaagaggaatttgatccgaatcgaacgttaggggtcattactccttatcgaagtcagattgctttgatacgtaaagagcttcaggcattggctattcctgctttgagtaggatttccattgacactgtggaacggtatcagggcagcgaacgtgatgtcattatttattctttttgtgtgaatcacctctatcaattaaggtttctgcccaacctgacagaagaggacggtgtacagattgaccgtaagctgaatgtcgctttaacgcgtgcacgcaagcagctttttatcacaggagtccctgaaatattaagtcataattctatctatcaatatcttctgaaaactatttattagggaaaaaaataccacaggctacttaggtgtgtagtctgtggtgaattctttaattaggcatcaaccggtttgtatttggggaccaatgctttcatgataatccaaccaaccaaataagctacggcacatacacagaatatgatgaagtagccggcaggttttccttcgaatcccataaaagtcatattcgtttctgctgcatagtcaaacagtctgccagatcccatattaatacagaatgaacctataccacctgccataccaccaatacctacgatagtagcgatggtgcttttggggaacatatcacctactacagaataaatattggcagaccatgattggtgtgccgcacctgcaataccgataataatgataggataccaatatgaataattgcctaaaggttgggcaaacaatgccagcagtgggaacaaggcaaagataagcatagcctgcatacgggctgcatatggattcttacctgttttattaatgataatagtaggtaacttaccaccataaatagataacatggtaatagcatataatacgaaaatcaacatttgtgcggtacccgtatctgaagcgaaaccgtatacatccgaaatatatgccggagtccagaacaggaagaaccaccatacgccatcagtcatgaacttaccgacaaatacagcccatgtttggggaaatttgaaacattgcaagaatgaaatcttcttgttgtcgaagtcgttggcagcagcttgttgttctgctgattcttcaggattgttgttgtcttgttcaatatattccagttcggcagcattcacgcgagggttgacattgggtttcttatagaggaacatccaaagtcccatccaaatgaatcctaaaccaccgataacgatgaaagccatttcccatccgttgcccacaccaatactttggaaataacgtgccaaaggagggatagtgatcggagcggctaaagcacctactgtagaacctgcattaaagatggaagtggaatatgcacggtcctttttcggaaaatattcggctgttaccttaatagctgctgggaagtttcctgcctcacctacacctaatacgattcgggcagcgataaagtaataaacgctggtaatggcgatagttgaagcgacggctcctgttgcagaaagcatctcttctgcgttatgaatacctaatgtttcttcggttgcccaaccgcacaatgcatgaagacaagctcctaaggaccagacaaagatagcccagagataaccttttttagttcccatccagtcaatgaaacgaccggcgaacaggttggcaatggcatacactatagagaaaatagctgtgatatctccgtaattcgaatccgtccagtgaaattccggagcaatgaagtctttccaggttagtgaaagcacctgacggtcgaggtaattgactgtagtggcaaagaatagcagaccacagattatccatctgaagtttgtcatcttctcacctactttttgaaatgtactcatgataatagatttaattatgtttttcttattagacgcaaaaataaccattctgtacctattctctatgcaaaaattggtggaaagcctgtataaatcggtacaatggtaagatttctaaaaaaatcattctgaatgtcgcaaaaaaaactgaaaacgagttgatttcttgcaacattcagaatgacaagagttaatgagtaatggtgtgtaccattctacttatctcatatctgtgtattttatttcatccttgtcactgtatttcaggttttcacctcccataccccaaataaaggtatagttgctggtacctgcagcggcatggatagaccattcgggagaagtgatggcttgttcattgtgtaaccataccagacgctcttcttgcggttcgcccatcaggtggcaaatggcatttccttcaggcaggttgaaatagaagtaggcttccatacgacgggtatgtgtatgggccggcatggtgttccatacagaacccggagccagttcagtaagtcccatctgtaattggtttgtaccgccgtttttcactctttccaatacatcttttacaattaactgatttacaatacggtcgttgctatcttccatttttccataatgatctgagatagctaaagcatactgtttaggatttgctttttgaagcttggcgtcggtagtgatcaattgagtaacgtatggcttgtaagccggtgccgaattgatatagaatttagccggtttggcagcgtcattacttttaaaagtaacttctttattcccgcaacctacatagagggcttccttgtatttcataggatattctttaccgtctacagtaactacgccatcaccgcctacattgatgactcctagttcacgccgttcaaggaagtaagtgatttccggacccagttcacggaaagtttccagcttcaaaattttgtttaccggcatagctcctccgtaaataagacggtcgtaaagggtgtatgtaacattgatttcatccggcgccatcaccttttccatcataaatgaactacgcagacgttctgtatcatagtgtttcacatcttgcggatggcaagcggtctgtactttgtaatttacttgagctgaagttgccaaggcagaaacactcagcatcattgcaatcgctaattttttcataatcattatctttaaattttaatttttcattgttttctggtatttaatgatggaacgacggttcagcaccattaagaatagtgttatcagtactaaaattccggaaccaatccatttgaatgaataagtcaaatggaaaatagtccatgagaaaggacttgaagcaaaatccaacgcaccaccttcaaaaccagacgggatgtttacggcagcatcttgtgtcttggcgtatacatcatgtgctgctttggtgaaataaggagccagatctgttacaaaatacagaccgatggccagcacaacaaaaccaatgatgaaagtctttactacatttccttttgtgataggtaatatcaatgggaatacatagaacatgccagctaatgaagccaatggtaagaattcattgcccggaagcaccactgccaataagatagtaacagggattaatagtaatgatacaaccaacgtggccggatgtccgatcaccaaggcaggactcataccgatatttaagcctacagcacccttaaacttcttggcgatcagttcgcgggtagcgtccgaaatgggtttcaacccttcgatgaacaggctggtaatacggggaatcaactccattaccgctcccatcttgatacctaaacctagaatataaggaatcttgtctactatttcttgtccgttcttgcaagataatgcaccgatgccacatcctaccaggatacccaagaagagaggttcgcctaataaaccgaatttctttttcataccttccgcatcaatgttcagcttttcaaatccgggaattttgtccaataccttatttataatgagagcgaatggtacgaaacctgcacagaagggctgcggaatagaaataccttccattttatcatagaaaccttgaaatttgtctgctgtgtaatctgctaagattaatgtgatgatataacagataacagctgcgaagaatccccacaaaatactatctgttgcaaaataaactacggctccgataaaagcaaaatgccaatagttccataaatcaatgttaaccgtacgggtggttttagtcaataacattaagatgttaacggccagacataccggaataatgaatgcccctacggaagtgttataagctacggctgcagcagcaggccatcccatatcgaatactttcagttgcaggccatatatttcgaccactttgcttaaggccggacccagactgctggtcagaagtgcggtaaccactgatagaccaacgaaaccaacacctaccaacaaaccgctttttaatgctttgctgaatttgattccgatacaaacgcctaagattgtaaaaattataggcatcatcaccgctgctcctaaaccgatgatataactaaaaacttgttccattctcttgtgaattaatagtaaatgactgtgttttctacaatagtataaattaaaaactgccccaaaaataaaaccttttctcaacttatcaaacctgaaagacataataattagtaaaaagacaatttttgaacgatttttatcgttatcgtgcacaaaaataaccgttttcgcacacgaataccaaataatacacttagtaggttgaaaagtgcacactgcttttcgaggaaaatactacttttgtttcataaaataaataggtctaatactaaaaataaatgtcttcatgaaaaagaattctatttgtaaaattattgtgtccggtttgcttgcggttgttcctttgatgggcatggctcagcaggtttgtggtaataagccttggtctgtacgtatggcggaatcagaaatggtgcgttgtcccgaatcttggcaattggattttcagacccgtttgaagtgggattactgtcatggcctggaacttcaagctatgctggatgtatatgatgcatacggtgataaaaagttttttgattatgctgtggcttatgccgatacgatgattcatcaggatggttctatcgaaacttataaactggaggaatataacattgaccgtctgaattccggcaagatgcttttccgtatttacgagcagactaaggacgagaaatacaaaaaagcattggatttattgcgcagtcaattggatacgcatccccgtaacgccgatggcggtttctggcacaagaagatttatgagaaccagatgtggctggacgggctttatatgggacaaccgttctatgcggagtatgcttaccgtaacaaccgtgtgaatgattatgctgatattatcaatcagttcgtcacagtggcccgccataattatgatccgaagactgatttataccgtcatgcatgtgatgtgagcaagcgtgaaaagtgggcggacaagactaccggatggtcacagcattgctggggacgtgccatgggatggtacgcgatggcttgtgtggatgtgctcgactttataccggaacacgaagccggacgtgagtcggttatcgaaatattgaataaactggctgcccagattaaacgtacccaggatcctgcaacaggagtctggtatcaggtgattgacagaagcggggatgaagggaattatctggaatcctcttgttctaccatgtttgtatacaccctgttgaaggcgttgcgtaaggggtatatctgtccttcgtacatggaagtggccaagaaagggtatgaagggcttctgacccaattcatagaagtggacaataaaggtgtggtttctatcactaaagggtgtgccgttgccggtttgggaggcaagccggtgtatcgtaccggagattataattattatataactgaaaaaatacgttctaatgacgcgaaggcggtaggcccgttcattatggccagtctggaatgggagcgtttgtttcagaaaagcagttgtggaactgcatgtaaataacaggaggtgagatgatgagaaaagttttaggattattgctgttgttagtcgctgttagcggaacatgggctcaggaacgccgggatacccttgttgtttcacgcgatggaacgggggatttccgtactttgcaggaggctgtggaaagtgctcgggctttcatggattatactgttacgatctatgtgaagaacggagtatacaaggagaaagtgattgttccttcatgggtggaaaatatagatatcataggtgaagatcgtgataagacgattataacttatgatgatcatgcgaatataaataaaatgggtactttccgcacttatacggtgaaagtggagggcagtgacatcacttttaagaatctgactattgagaataatgcggctcagttgggacaggcggtggctctgcatacggaaggtgaccgtttgaaatttatcaattgccgtattttgggtaatcaggatactatttataccggtgctaaatttacccgcctttattttaaggattgttatatcgatggtactacagactttattttcggtccttccaccgctttgtttgaaaattgtatgatccacagcaaacgcaattcgtatgtaacggctgcttccactccgaaagaagctaaatatggatatattttcaaacactgtaagctgacggcagaaccgggagtggataaagtgtatttaggtcgtccttggcgtccatacgcttataccttatttatagaatgtgagttgggcaagcatattgttcctgccggatggcacaattggggcaagcagtccaatgaagaaacagcccgttatatggaatataaaaataccggtgagggcgcaaatgtttcagaaagggtagcgtggagcaaacagctgacaaagaaagaagcggaggcggtgacggtcgatgctatttttggtactcaaagtaattggaacccaatagactagattgaatttataattgcttgaagaggagacttctacgttggtggaggtctcctctttttgttgtgttgaataattggaagtcgtgaaaaatgcctaataaatccacataaaaagataaaaactacacatgaaggtaatgttatattcttaattttgcaacggtgaaactaaggtcaaaaccttaaaaaaacattttaataactataaaaacacatcttatgaatctaaaagaattagctagaaaagctgtctcaactctctttttgagtatgctttgtttggttgcttttgcccaaaccgcaacaggtttggtgaaagacaaaacaggcgaatctatgattggtgtgaatgtactggtaaaaggaacaaccaatggtacaatcacagatttcgatggtaagttttcaattccggatgttccgagtaacgctactttggtggtttcctatatcgggtatcttactaaagaggtgaaaaccggaaaagacttggttattgtattggaagaagataacaagactttggatgaagtcgttgttattggttatggtacagtaaaaagacgtgatttgacagggtctgtcgcttctgttaccggtgaaaaattagcggctaatccggttgccaatgttgcacaggctttacaaggacaattgcccggtgtgagtgtgacttcacaagacggtcgtccgggtgcaggtatgtctatccgcattcgtggaggtggttctatcactcagtctaatgatcccttgtttattgtagatggtgttcaagttagtggcattgatgatattcctgctgacaatatcgaaagtattgatgtgttaaaggatgctgcttctacggctatttatggtgctcgtggtgctaacggtgtaatattggttactacaaagggcggcaaggatggccgggtctctgtcaagtataatatgtattatcagatgaaggagaatccgaaattattggagactatggatccttatgactatgtgtataatacatgggcatatatgaagagtctgggagattcttatggtgatggagttgccagatattttggattaggatccaagtacggaaatcatttgaatgaatataaaaatatgaccactcataattatataaatgatttgatgcagactgcgtcatcttggaatcatgatgtatctttatctggtggtacagataaaactaagttttattcatcagtgaactatatggatgatgaaggtatccgtgtgaagtctggtttccagcgttggaatgcgaatttcaaattgacgcaaaagattaataaaaagttaactgcggattttgacttgcgttatagtgaaatagaagtaaatggatctggttttggtaatgcaacctctgcttacacttatcgtcctgtggataatcctttgggtgatgcttcttttactgctggatttggtcaaggtgatacaaatatggaagaaactagtaatcctttgtattacttgaatactgtagattatataaaaaacatgtaccgtatccgtgcaaaaggtgctttaacttggaatgttattaaaggtttgacggcaaagacggagctatcgttaaatcgtaattggaaccaagaaaagacatggaatgcaggacagacagaaaaagataatagttctgctaaattgaagaaaagtgatggttacggtgtgcgttgggcaactactttgaattacgaagtacaggggcttggagatgatcatagtttgtctttcttggttggtaatgaagtcttggcatcaaaatcggattatactgaaatctatggtgtagggtatcctaaaggatttactatggatgatgcgtttggtatgattaatatgactactccttcattgggacaagattattttaaaggtgagataggtactcctaaccatactttgtcatggtttggccgtgctaattattcttataaaggcaagtatcttttgactgctacattccgtgccgatggttcttctaaatttgcacctagtcatcagtggggatatttcccggcagcagcggcagcgtggagaatttcagatgaagctttcatggaaaacacaagagactggttggataatctgaaacttcgtgtatcgtatggtacttctggctctgataatattgatgcttctttatggagagagacctggaagaccaaacagataacagtggatggtgaaaaagtaaccacttatgtaccgggtgacatgaagggaaatcctgacttgaaatgggaaactactatcagtcgtaacttaggtgttgattttggtttctttaataactgggttcgcggtagcttggattattattggaatacgacaaagaatatcttaatgaaagtgcctatcgacgcagcatccggttatagctatcagttccagaatgtaggtaaaacttcaaataagggaattgaattggctttaggctttgacattgttcgtggtaaagattttaatttaggtgtaaacttgacttataattataacaagaataatattgatgaactgatggacggagtcttggcggatacgagagctatgaatgattggggttcatctatggctaagcctgcttatgattatattatccgtgaaggtcagcctgtaggtacgatccaaggttttaaatcagaaggatattatatgattgatgattttacttatgcagatggtaaatacacattgaaaccgggtgttcctgatattcaaggtattgtgaattatccggatggagttaaaggattggcagcggatggacaaactgctataccgggtatgcctaaatttgcagatacaacaggtgatggtgttgtggacgaggatgacaaaacgattatcggtaaggctatgccacagcatacaggtggttttacaattaacggtaattggaaggcaatcgatttttctgtaggctttacttatcagattggtggcgatgtgtacaatgccaatgcaatgcactcattgatgggaaataaagacaattccgctggtcagaaccgtttgaagtttgtttctgaaactttcaaatattatgatgttgatgcaaatggtgacttgatgctggtgaaagatcctacagctttggcggctcttaatgcgaatacaaactacagttctttcttctctgaatatggaatcgtaagttctaagtttattgaagatgcgtcttatttgcgtctgaatacattgacagtaggttatactttcccgaaaaattggatgaataagattggattgcagaatgcacgtgtgtattttacaggaagcaacttgttctgtattgacggatactctggtatagatccggatgtcaacacgaagaccgatggtaaggatggcttccctacaccttattttgattaccagtcttatcctaaggctagaacttatacctttggtgttaatttaactttctaattaatggagatgaatcgtatgaaaaaaatagtatattcaacacttttctttgctggaatgtttttgactacagcatgtagtgattatttggaggttggctctccttctattgtagattcggattttgtcttttctaatccgacaacagcacgtgcggcattagacggtgcttatgaacagtggagggattgtgcgcagaataaggtttttggcgatggattgttttatgctgctgatattgccgggtctgatatagaacgtcacccggagtctttctctaaccagctgggacgtcactatccggaatgtctttatcaaaacggtacttatgcaggtagctatggattgacttcatatttgaaggagaatgatatttatgctagcttgtattcggttgtgagcaaagccaatgcggtgataacatccatggaaaacgcatcgaattttgaatcgatcatcaatggtggacaatcagagatggggcaaatgtatggtgaggcgatagctatgcgtgctacggcttatcgtgaactgtgcaagaacttcggggacgtaccatacgtaggtgtttatggtgttgtgcctaaaggtttggtttcccgtgattctatttatgatgtatgtattgaagatttgcagaaagtggaacctttgatgtacaccatcggttccattcccggcattgctgctgccaataaaaattatttttctaaaacctatgtgcaggctttgattggaagaatgtgtttggatgcagctggatatcagacccgtcgtggcgatattaaacgtgtaaatggaaaaggggaaagcatgacatttgaaaacaagggaaaagaaaataatggagctacttacggacgtcgttctgattggcagaacttgtacacgatagctaaaaaatactatgaggctttgttggctgatccgggtaatgcacagtttcatttgactgatccacggggtgcctcggataaatccggacgtactttcaataatccttaccagtatttctttgaacagatgcatatggatgatgctatttatgcggatgagtctatttatgaatatcccatgcagcaaggtggtggaaatgatggtcgcccctattctttcggccgtccttcatctggtggctcaaaggcagcgtatccatgtaagagctatggacagggacgtataaatcctgcttatttttatggaatctttgatccgaatgatatgcgtcgtgacgtgagcattactatgaccggcagtaatggtaaaggggttgagaagttgattccttttgtccccaactcaaaagctgaaggcggtggcttgacattgaataaatgggatgagaaccgtcaggctaatccatgggtggctgcacagcgtaaatcaggtatcaatggtccgtatatgcgtatgtctgaagtttatttgggctatgcggaagtatgtgcggcattaggtgatgtggttacaggtaaacaatatttaaaaacagttcgtgaacgttcgttcccgcaaggcttggctgacacagatggctttattgcatcttttggcaatgatctggttcgtgcgattattgaagaacggggttttgaatatgcaggtgaaggtgatcgtcgttggacattgattcgttctggttatcttccggaagatataaaaagaatcaaagacatgactaaagctatgatggatggtctggcaactaaaggttattatgagtttgaaaatggtaatatcatttctgcttatatatggacaaaattagttgatgcaaaaactatatatggtcatcgtttgacagcgcagtgtccgatggacaaggtcaatgatccggtgctttatccgggatggcgcggacaaaaggataattgggaagaaatgggattgaattatggaaattcggctcctgctaccaatctggcaataaaagggttgtttgaaatcgtgtctgaagaagaggcagcatctcttgaaagccaaggatatgccaaagttaattggggtattgatttggttgattatagagatgaatatgataagtatctgttttgggattatgattacgtttcggctcctatctatttgtggccgtttactcctaatgtaatggctgccggtggctttacgaatggttatggctttaaacaggaataataattcattcatcaaacgagaaaataaacgtatgggggagagggcgtatggcaaatgctctctccccttttttggggtgtctcttaagaatgtatttctaaacagctcatcaatacaactgtcgcatttataatttgaactcgcctcctaccatagagttttgcaaaactgctgccactgctaccaccattttagcaaatctcttatgaatagggagatataggggtggtggcagcacatttttttatgtatgaaatacgcctgctgccaccactttttctacttttctcatattatcagtatgtcttttctactttttacggaagtgttgtcccgcacatacgtattatctcataagtaagatgaaggagcagtcaacctaaagcgtcaagctatattgtgtccatgaaaagactgggagtttcaaacagttacaaaaggacgaaactgtagttccaacccgatagaactgtagtttcaacctgatggaaccagagtcttaggctgatgaaactgtagttcagactgtagtttaacgctttaggttgactactccttcatcttacttgtaaggatggttgacggaattaatacttagttataatatcagttgactctttcaagagctatttctttgtcgggttgaaacaatcatgacttacggtcaagatggatgacagttgccaccaagtttaccaatactacggtaatcatagcaaatcggcatagaaggcatacgaattttacccaaacatcttcctcttatggaataaaaaaggggataagtggtggtagcaggcgtatttcatacataaaaaaatgtgctgccaccacccctatatctccctattcataggagatttggtaaaatggtggtagcagtggtagcagaaattacaaactttagaagagggggcgataagaaagactgaaatctttttttgataggtttgttcgcctgttgcaaaattgtgcacataaaagaccaatttttaccttgttcttctttgatagcctgttacttttgtatcaagacatattttaatcagatacgaaatgaaattgaagtttttagtaagtacaatagttagcatcatgatatggccggcaagtattatggcacaaagtgaattgattccaatgatagaaatacctgcgggaaatttctatatggggactttgggtgaagatgaaaattatgatgaagcacctatgcataaggtgcacatatctaaaccgtttaaaatgggactgaccgaagtgactaatgcgcaatatgaattgttctgtcccggacacaagttgttgcgtggtaaaaatggtttctcaaatgaagatgacgaagcggtggtgttcgtaacttatcaagatgccgttgccttttgtgactggttgacccggaaagaaggaaaaacgtatcgtctgcctaccgaagctgaatgggaatatgcatgtaaggcaggccgttactggaacttctatatggatgacaagcttcctgccgcctggcaaaagaatcaagtgataacggcttctctaaaacccttgtccttgaaagtggcacaaactcctcccaacgaatgggggttatatgatatgtgtggaaatgtggaggaatggtgtctggactggtatgggtcctatatagacaaggaacagactgaccctgtcggctattcggacggtatggcacgggtgaccagaggagggagtcataatacaccggtgaaatatctccgttcggcaaatcgtatggctatgttgccggaggacaaacatgcaatgacaggctttcgggtggtacaggcagagtatccgcagaccgctccgctttctcagccaaaagatgagtatgtcgtgtctcagataaaatggaattgggcctctcaatgtgtcacggaaccagtcttcactgctcctttggtttatgtgcatgaaccggatgcgcatagtggaacgccttttttcaagcataatcatcagccggcattgacttggtgtgataatggagacttgttggctgtgtggttttctaccaatgaagaaaaaggccgtgagatggtggtgctctcttcgcgcttgcgtgccggaagccgtgaatgggaaaagcctcgtatgttttatcagatagctgatcgtaatttgaccggaactgcattgttgaacgaccgccaagggactctttaccatatcaatggagtggaagcggccggacattggcagaatttgatgatgactttgcgtacaagtacagataatggacaaacttggagtaaacctcgtatgattgctccagagcatacgagacgccatcaagtgatagccggaacctctattacaaaggaaggctggtttgttcaggcttgtgatgccggacccggtggaagagacggggctgctgttcatatcagtaaggataagggaaaaacttggacggacccgtgggatggagcgcccttgcctgattttaaagagggagggacaggtaccactattgccggaatccatgccggagtggtgcaattgaaggatggcagattgatggcattgggacgtaacaatagtattcgtgataaagaaggacgtctacgtatgcctatgagtgtatctgatgatatgggcaagacctggcattattccgcttcggaatttccacccattgatggaggacaacggctggtattgatgcgtttgaatgaaggtcctattttgctgatttcttttactgagcatccttatcgtactccgaaagaggagcgtggaatgatgtttactgatcaatcaggaaagccttttaaaggatatggcatgtatgctgctttgtcatacgatgaaggtaagacctggcctgtaaaacgcttgttgactgatggtatttatcgttttcttaatggtggggcttggacccagttttttgaaatggatgagaatcatgctgagcctcgtggctacttggccggaacacaaacacctgataacatgattcatctgataacaagccgcttttattataagtttaatttagcttggct

SEQ ID NO: 3900 - DNA, 25463 bp, Unknown
  gut microbiota DNA sequence
tttatactatgccaagaagtatgtttatgcacgtatgtctacatgaagctacgcatatgtatgtacgggtttgtgcgtatgtatgtgagtgtgaatcatataaatccccaaaatataaggacgtttttaaaaaagatcaagagcttttcaaataataacaggaactttttggaaaagataacgagcttttttaaaaacgttttgatcttttttatcgatatcggaactctgtaaactgctatttcgtggaagtacatctctttcatatgcatttttgaaatgaaaaagtctgaaagtaccctgctttatatcaaacaggaatactttataaaaaagaatatatagttgacagcaagcgtattatgcgaaaatctgctttaaaatatagtgagggtatgagggcataagtgagagcaaatatttttactataatcatgtaagctatttataattagattgttatatgtaaaatgagagcatgagggcataagcattccagaataataatgagtatgatgttggtttgctggaataaaaaatgataccgacttatcacaagccggtatcacgaaaaaataatcactttattattttgtaatcatccagctttgtgcgctcacaaagcacggggaataaaaagttatttatatactaacactgtaaacaactactttcacaagctattgtttactcacctaataaaaggtagcttaacaaatatcacttaatgttcattttttgtttgacattacaaaggtaacacaaaaattgaaaattatactatatagttctaataacggataatattgcggtaatttaggcgttatttgagccatttatctaaccaactaaagaaagtgcgttgccataacaccccattttgcggtttcaatacccaatgattctcatccggatataataaaagttcggccggaacaccgcgcaatacagctgcattgaacgccgacataccttgtgaagcaagaattctataatccttttcaccgtgaatgcagagaatgggagtgtcccatttatcaacgaaacgatgaggagagttggcaaaggtacgttgtgccgttgcattgtttttgtcccaatatgcaccacccatatcccagttggcgaaccacatttcttctgtttccagatattgctgctccatattgaatataccatcgtgtgcgataaatgctttaaaacgtttgtcatggtgtcccgccagccaatagacggagaatccgccgaagctggcacctacgcatcccaaacgattagtatctacatatggttcttttgaaatatcatctatggctgacaaatagtctttcatacattgacctccatagtcaccgctaatttgttccaaccattccatgccgaatccaggtagcccacgacgattcggagcgatgataatataatcgttggctgccataatctggaagttccagcggtagctccagaattggctgacgggactttgcgggccaccttcacagaataataaagtaggatacttcttgtttgcgtcaaaattgacgggatagatcacccatgaaagcatttgcttgccatcggtagttttggtccatctttcctccactttgcccaaattcagctgtttaaagatgtgatcattctcgtgtgagagttgcgccacttgcccgtcggcaggagtgagggtgtagatttcatcggcggcactgatagagtgacgtttggtaattattttatcgcccgccatggctactgatccgtagtcatacatgccatcagtcagtttttttatatcaccattcagattggcattgtataccatgctggttccatgccatacaccgacaaagtacagactttgcgaatcattgttccagcaatagtcatctacgcctgattcaaaactttcggtaacaaatgtcttttgaccgtcatctaaattgtagatgcacaggcggttccggtcactttcgtaaccatcgcgctccatgctttgccatgcaatgtatttgccgttggggctgaatttaggattggtgtcatatcctttcatttcatcttttccattcggtttgcacaggttcagtgttgtgcctttttctatattataaaggtatatatccgagtcggtagatactgcgtatgccaatccttgctttttccggctggtgtaagctatttgtttagagtcgttgctccaagccagctgctcgatacctccgaaaggtttcattggagcttcaaacggctcaccttccatgatatcggtggctgctcccatcatgttaccatcaaaatcagcgataaaaggatgtggaatactttctacccattcatcccaatgtttatacatcaggtcgtttacaatgataccgctggctttgggtaggtcagggtagaggtctacagtgcgttggccgtattttatttgtgagatgaaaagaatctttttgccatccggtgaaaaagagaatccttctatgtttcctttgaaatcggaaatgatacggcgttccgtaccgtcaggattcatctcccaaatttggctgccaccactttcattgcataagaatgcgatttttgttccgccttttatccattgaggctcgctttcattccatgctgtttgagtaagcagggtgttgttctttccatcggcatccattacgtaaattacatgatggcttttgttttcgggaacactataataggctacggtgtaggctatttgtttgccatcgggggaaatactcagactgcctatgcgtcccattgcccacagggcttcgggggtaagacgaccgtctttgatggtgatttcttgcttgcctataatgggctcgtagccctgtccttcctgtttcacttcggtacaggaagaagctagcataagtgctgctgccatgatggttgcgcttgatttattcatatctaaaaattgtttttgatgattaactgattgcaaaaatacgtataaaagccggtgatgtgaaatgttcctgcatatttgttttgtttctttgtgtgtctgtggaagggtgtctttgcaaagaagagcaaatatagaggtaaccggcatatataaaaaaacagcaaagaccgctgtttttttatatatgccggtcttcgctgtttttttaaggaagtgtaaactcgttattttttccctttattcattctttcttgttgcagtcgttcctgctccttttgtaaagcttccagtttagccatcagtccgccacccggtttgccgccattcttttggctcttcttttcttttcgggcttccaacatggcaaggagtttcttttcatcagttgttttgcgcagaatcaccatagtgaggataccaatcagtccggaaatgaagtaatagtagttcaagccggatgaataaccgttgaagatgaaaataaacatgactggcatgatatacatcattagtttcatacccggcatttgctgttgtcccatatcctgctgcttcatggtgtacatggtgttcagaatattggtgatactgaacagcaaacagaagaggcttaaatgattgcccagcagaggaatgttggttccccagttgataatatcatcataagtggacaagtccggggcccataagaaactttgttggcgcaactcaatagcgttaggcacgaagaagaataaagccatgaataccggcatttggatcagcataggcaagcaacctcccatagggcttactccgtatttgctgtaaagtgccatcgtttcctgctgctttttcaaagcatcttctttcttgggatattttgcgttgatctcgttgatgtagggtttcaggacgcgcatcttggcagaggacatatatgatttgtaggtagccggataaactaacactttgacaataatcgtcatcagcagcaatacgacacccatgctcagtccccaccctgagagccaatcaaacaaattaatagtgaaccagcggtttacccagcggataatgggccagcccaaataaaccaggtcttccagttccaaatctttttgggaaaggcttagatcattgctgttcagcaaagtcttgaaatggttcggaccgaagtagaactgcatatcggtaggctgctttccggtaggatcaaagaaagttgtcatgtccgcggtatagttcttcatatatccgcttccttcctgttggggggtagaggttagggaagctttatcaaaatcttgatcggcaataagtacgcttgagaagaactgattcttgaaagcaatccaatccaaacggtcggtaacatcttcttttgcttctttcatttcgttcagatagtctgaacttttttctaccggcttgtaggtgagcgaagtatagcgctgttcgaagctgaaacctttttcaagctggcgtgcccgttgacgccagtttatattgactgtgttcagggcaggagggaagaaattctgcatgccgtttgcgcgaatagtgaaattcaccatgtaagcatccggtaaaagtttgtaatcgaaatctatatagcctccattgtttgctgccaaacgcatagttacagtgctgtctgttacgttggtaggttggaaatacatatcctcggtcaaaatattttcattctttccttcgaaagcgaaattcatgcccgaatctttttcatcaaataacatcaaaggcttgccgtcctgtccgttataatcttttaatatggctgcgcacacccgtccacctttattggtgaaagtcagttttactacattattttccagtgtcgttagctgttccgtaccttggtttgcgccatagaacatagaggtagagtctaaatgcaatgttgcattctgactctgtgccgtggcagcctgtgccagtcgttcggcctctttttgggctatcgcctgaatggaatcctgataatgtttggcacgtgccatttcttcctggctaggacggttgtagatgctgaagcctatcacaactgcaccaatcagggcgaatcccactaaagtgtttttgtccatttttacttgtttaccttattatattataattctcgtttcttatttgtctattgccgctttgataaatgacaggaataaaggatgtggtttcaatactgtactgctgtactcgggatggaactgtactccgatgaaccattttaatgtcgggatttcaattatttccactaaatcggattccggattgatacccacgcatttcatacccgccttttcgtactcctgcttatagtcattattgaattcgtagcggtgacggtggcgttcctgtatgtgttcgcttttataggcttcaaaagtctttgagtgttggtcaaggatacattcataggctcccaggcgcatagtgccgcccatattggtgatagctttctgttcttccataatgtctatcacgttgtgtggcgttttttcatccatttcgcggctgttggcatctgtataacctagcacgttacgggcaaactcaatagccatgcactgcatacctagacagataccaaaagtcggtacattgtgtgtacgtgcatatttgatagcaacgaacttaccttctatgccacgttgtccgaatcccgggcagatgatgataccatccatatccttaatctgctcttctacattagcatctgtcagtttctcgctgtttatgaagtggatatccgctttgcggtcattgtaagtggcggcttgtgacaaggcttcaaggatagatttataagcgtcttgcaaatcgtatttaccaaccaatccaatttttactttctcagttgccttatgacggcgatctagaaaatctctccatggaccgagggttggagtttcacccacgggcaatcccatcttttggagaatggttacatccagtccctgttcttgcatacgcaaaggtacttcataaatggtgggcatatcgatagactgcaccacagcattttcatctacgttacagaacagagcaactttctttttcaagtttgtgctcaattcgtgctcggtacgcaataccaatacatctggttgaataccaacagattgcagctcttttacggagtgctgggtaggtttggtcttcaattcgcctgctgcagccagataaggaacataagtaaggtgtacgcacaacgcattacgtcccatttcccatttcaattggcggatactttccaaataaggaagtgattcaatatcacctacggtaccaccgatttcggtaatgacaaaatcaaatttatatttgcttcccaataattttacattgcgtttgatctcatcggtgatatgggggataacctgaatagtctttcccaaatagtcaccacggcgttctttgtcaataacacttttgtaaatacgtcctgttgtaatgttattggctttagttgtctggatgcccaaaaaacgttcgtaatgtcccaaatcgaggtcggcttcgtgtccgtctaccgttacataacattcaccatgttcataaggattcaaagttcccggatcaatattgatatacggatcgaacttctgaattgttacattatagcctctggcttgcagtaatttacctattgatgatgaaataatacctttacctaatgaggaggcaacaccaccagttacgaagatatacttagtttctcccacgacttaatatttttaaatgttattttcttaattatcaaaatcgcaatatttatcaaagttgcaaaattacaaaatctttttcaatattgtcggatatgctttaaaaaatcatttgatgaaactgaatttatcattcgttactatataaaggaaacagtttttggggaaaaggaaaattaagtgtacttttgcacaaaactaaaattagtatgagaaaaagtatatgtttggctataatacttgctgtattctgtatggaagaagtgccggcacagaaaatagccaagacgaaagaaaatccggctgtgaaagcctattctgattcattgtctgcattaagcgcatcttattttgcttatttcaggctgtgggatgatttgaatattccggcgccccggcgggtacgtcctaatccggctttttataagttgtttgttccgcccacttattatgaagctcctataaaagaaatttttgaaataaaatggagtccggatacgaaaataatgacagctgtcgattcgctatatatgggaaagcgtgactctgcatctgcagctatatatcaactgcccgatttggaaaccttggccgctgccgaccgttggtcgaataatatattaaggaattattatttgcaatatccgggcagattggtgaataacgaactttatttggctgatttgaaaccactggaaaataatcagatagtaaaaagaccaaggaaagagagaatcaaaagtttccttcaaccggaaacaccggtggaaagcttgactacggataatgaattgttggtggtacgccctaacttttggacgcataaggggaatgggtatgttcagttcacacaacattatatttcagataactggtataaaggtggtgaaagtactaatgcgctgttgtccggcttagtgctggaagctaattttgatgaccgccagcgtatagagtttgaaaataagctggaaataaaattgggttttgttacagcaccgtcagatacagtgcataagtataagacgaatgccgacttgcttcgtttaagcagtaaactgggtgtaaaagccttcaaaaactggtattatactttggcgggcgagttcaagactcagttctttggaaattataagacgaatacgaatgatatgatttctaattttctgtctcccgcccaattggatataaccctcggtatggactttaagcagaataagaagaattattcattgtctttgttgggatctccactggcgtatacttttatgtatatcagcaatgataagataactgatccgggtgcttttaatgtggatccggggcataaaacagcgaatctcttcggttcgaaatttacaggtaatctgacttggacaattatccccagtattgtgtgggagtctaaattggagtactttacaacttatgacaccgtaattgccagttgggaaaatacatttaattttgtgttgaaccgttatttgtctactaagttgtttgttcatgcgcgttatgatgacggtgtgacactgacagaagataacaagagttatttccagttgcaggaattgcttagttttggtttgaattatacttggtaagaaaggagagtgtaagcgatatcgatgagaaccaataaaaacacggatgccgtagaatttgatattctgcggcatccgtgtttttattggttctccattttatttatgttcacccagcaatgtttgtacaattctttctgcagcgtgtccatcccaacgttccggcaaatgtcccttctgccattctcctttattcagaatgtcaagggcgtctgccaggatttcagagttttcccccaccagccggtttgtgccgattgtcactgtttcgggatgttctgcatacgtgcttaatgtcatgcaggggattcctaaaaaagtagcttcttccgctacattacccgaatctgtaatgataccccaggcgtggttcactaaatatccgaatgacaaataaggttgcggtggtaatatatataacctttcggaagtaattcctaaagcagacagcttgttttttacatatgtatggagcggcgccacgatcggcttgtctgttttttccagtatagtgcggaagatggctttcagtgttgtgtccttgttaagcaatgaatgtttgttcaatgttagcaagaggtattctttttctttcagtcccataatggagaacgctaccgggcgctgtaaacgggtacggttataacgcagcgtatcaatcaggatgtttcctacaaaatgtacatgtgcctgttcggttcctgtttgattcagattgcggttggctaccattccggccgtgaacagataatcggacaagccatctgttatcatgctgttcacttcctttggcatatccatatcgaaagagcgggttccggccactagatgagcgacttttatccctttctttttagctacgatagagcacgccatagtaggagtcaggtcatccactacaagtactacctgtgcaggatgctgttccagttcgcgggcgaaagctaccaatatacctgccattcgctggaaaaaatctgtattatctacatgcagatatacatcgggacgcggcatatctaggtctgtaaacagagaaggttccaaacttttatcttcgtccgaacctgtgtagaccagacgggcagtgatattttttcctgctgcctttgcagccttgatagcacgcattaatggggcaattttcatgaaattgggacgtgcacctgcgataattgttactttcatcttattttaagctattttctgaacacaaaaatacattttcttatcgaatttattcgttactttgcagacaaataacaaccattatgctaacatttgttcaagttttagattttataggcacgtttgcctttgccatcagtggtatcagattggcgtctgccaaacagtttgactggtttggtgcatatgtagtgggtttggcaacggctatcggaggaggtactatccgtgatgtgcttctagatgtgactccgggttggatgaccgaccctatatatttaatatgtacaggacttgcattgttttgggtaattgctttcggcaagtatctgattcatatgcataacacttttttcctgttcgacagcatcggtctggcactatttacagtagtgggagtaggcaaaagtattgctctcggatatcctttttgggtagctataatcatgggtagtatcactggggccgcaggtggtgtgctccgcgatgtttttattaatgaaattccgcttatttttcgtaaagaaatttatgcaatggcctgtgtggtggggggattggcctattggatatgtgatctgtttggtctggaagcctttatttgccagataataggaggtagtactgtgtttttggcgcgtattttagctgttaaatatagtatctgtttaccaattttaaagggggaacaacgctaaatagcacctgaaaactatcaaaacagggggtaaaaactgataaatgacggtttttaccccctattttgatagttttttctttgacacctatttaaaatgcgctatccttgcattaccgagagcatggaaaaagaatatgaacctaaactgaaagacttatgaatagcgttagttttaaaaagaacctgctgggtgtgcaagaagaattacttcggtttgcatacaaactcacagccgaccgtgaggaggctaatgacctgctacaagaaacttcattgaaagcgctggataatgaagacaagtatatccccgatacaaactttaagggatggatgtataccattatgcgtaacatctttataaacaattataggaaaatagtgcgtgaccagacatttgtggaccatacagacaatctctaccatttaagtatgcctcaggattccggctttgatagtaccgagggagcttatgacatgaaagaaatacatcgtatagtcggtttgcttcctaaagaataccgtattccattcgctatgcatgtgtcgggatttaaatatcgtgagattgccgaaaagctgggattgccgttgggtactgtaaaaagcagaattttttttaccagacaacgcttgcagggacagctccgtgattttgtataatccaagggggaaaattatcaaaaaggtagagtgaaattcttttgctctgccttttttgtttttattggtttacaatatgatattaaacatgtttttggaagctaaaaaacagcttcgaatattaactttatttttattcatttgttatatttgcaaaaggacaagacacctttaaatcaagtaataattatgaaaaaagaaatcaaattcagtttggtctaccgcgatatgtggcagtcatcagggaagtaccagcccagagctgatcagttagccaaaattgctcctctaatcgttgaaatggggtgttttgcccgagtcgaaactaatggaggtgcttttgaacaagtgaacttgctgtatggtgagaatcctaacaaggcagtgcgtacatttaccaagcctttacgtgaggcgggtattcagacgcatatgttggaccgtggtttaaatgcattgcgaatgtatcctgttccagctgatgtacgtcggttgatgtatagggtaaaacatgcgcaaggagtggatattactcgtattttttgtggtttgaatgaagttcgtaatattattccttccataaaatatgctaaagaagcggggatgattcctcaagccactctttgcatcacttattctcctgtacatacggtggattattattcttatattgccgaccagttaatagaagcaggggcacccgaaatctgtttgaaagatatggcaggtatcggccgtcctgaaatgttggggcagttggtgagaaatatcaaagataaacatcctgaagtcattgtacaatatcatggacattccggtcctgggttatctatggcatctattttggaagtttgtgagaatggtgcggatatcattgatgtcgctatggagccgttgtcatggggaaaagtgcatcctgacgtaatttctgtacaggctatgttgaaaaatgcaggttttcaggtacctgaaatcaatatgaaggcttatatgaaagcacgtagcatgacgcaggaatttattgatgattttttgggatattttattgatcctaccaacaaacatatgtcttccttgctgctgggatgtggacttcccggtggcatgatgggttcaatgatggccgatctgaaaggggtgcattcgggcatcaatctgattctgaaaggacagggaaaggaacctatgagtttggatgatttggtagtgatgctgtttgaagaagtggaatacgtatggccgaaattgggatatccacctttagtaacaccgtttagccaatatgtgaagaatgtggctttgatgaatgttatgcaattggtgaagggagaggagagatggacgatgattgataaccatacatgggatatgattttgggaaaaagtggaaaattgccgggtgcgttggctcctgaaataatcgaactggcgaaaagtaaaggctacgaattcactgatgaagatcctcaagtgaactatcctgatgagctggacaagtaccgtaaggagatggatgataatggatgggaatatggtgaggatgaggaagagttgtttgaactggctatgcatgaccggcaataccgtgattataaatcgggtgtagccaagaaacgttttatggatgatttacaacgtgctcaggatgcggctatggtaaaaagtggcttcgatgaggaaacgatccgaaaatataagcgtgctaaggcagatcctattattgcaccggataaggggcagattttatgggaagtttccgtggaaggtccttctatggcaccgtttgtcggacggaaataccagcatgatgaagtgttctgttatatttccactccgtggggagagtatgaaaagatttttgctaattttacaggacgtattgtagaagtttgcgcccaacaaggagctgtagttaataaaggtgatgttatagcttatttggaaagaacagagtttactgcatgatttaaaggtgctatatagctttttttatccgctatggcaagtgttgaatttgtcatggcggatgtttttatcttttcattcttttaaaatttgcattcattcagttatgtgttatctttgttgccatgcagaaaaaacaggtagataagaaaaaatatatgagaaagctgtatccgtggttgctgggaatgattttaggaataatgccttgtatcgtttcagcatcagaaaatgacagtataaaagtcgagagtctgcttcaaaaagctgcccggttgccggccgatagctgtaggatattgttttttgcccaaaatctattaggggttccatacgtagcgaatacattggatgggacagatgaagagagattagttgttcatttggataaggtggattgtaccacattagttgaaacagtacttgcattgagtctcgctgacaagtatgggaaaagtgactttgaaagttacaaaaaagcgttgctgtgtatccgctatcggaatggaaaacaagccggttatgtctcgcgtttacattacttcagtgattggattaaggataacgaacagaaaggaattgtacatgaacgtacaggggaattagggcttgctgtatcacaaatcttgaatttggattttatgtccacacactctgacaattatcaccggttgaaaaataatccttccatgatatcccagatgattgaaatagagagaaaatggaaaaatgttcctgtttcttatattcctaaaacaagtctgaacgtttcttctgaggagttggatataaagaatggggatatcatagcgattactaccaatataaaagggctggatgtggtgcatacaggatttgcctgttgggtggatggtaaattgcatttgcttcatgcttcatcggtcatgaagaaagttattctagattctcagactctttttgaatactctaaaaataagaaagcccacacgggggtgcgggttatttcttttttgaaaccgtagaggacgtatcttgtttgggcggaaatgtagggacgcatttcataagataaagtatcttcttttgtcttttaagcatgtagttgccaggtctgcttgaattgaatttgcgaggattgggaaggctggctgcaattagtgcgcattcttccggtgtcagtttgctggcattcttgtgaaagtgttcacgagctactgcttcggcaccatagatgccatttcccatttctatagagttcagatagacttccataatccgttccttgttccaaaatagttctatcaaggtggtgaaatacacttcaagtcctttcctgatccaagaagaagcaggccacaagaaaatgtttttagctgtctgttggctgatagtactggcacctcgagggcgttttcggttcttgttttcttttaaggctttctctatttctttgaagtcaaaaccattatgctcggcaaagcgattgtcttcagaggcaataacagccataggcagatgcggggatatgttttctttaggtatccaagagtgtttccactttatatcttcaccatgaatgatttgctgggtagtacggataaacatcaacggggtaaagtaaaccggaataaagcgtaaaacgataactgcgagaatggaagaaccaaagaaaaaaagcagcagattacggatgaattttaaaatcttttttttcatgcttgtgtattaaaaccaatttcgggcagaaataacctgtccgaaattggtttattttatatgttattccaatgttgtgaccgttggttcgggcgtattggatacgctctacaataacgtcatcgatatcatttcagtgtccctgcttccgcttgctgaatcatctgtttgctggcatacatatatacttctacacgacggttctgctggcgtccttcggctgtgtcattattacctatcggatctgcttgacccaagccttctacggacttgatctgagaattacttacaccgcaacccaacagataactagccacactttgagcgcgttcttgtgacagattgaggtttttttggatactttgttcagctgtactgtttctccagccctggttgtctgtatatccataaatggatacatccatatctctgttctggttcaatacgttgtttgcaaacttacttaaggctgatttcgcttgtgcactcaaggctgcatttcctgtattgaagagaataccggaatcaaaagtaacttttacagcctgaaggccattgttatctgttacttgttctacctgtgctccttggatttgagcagcttcttctgctgctttatccatttttttcccaattaacacaccggcacctgtacctactgccgcacctactgccgcaccaatagccgcacctttaccatgtccggctattccgccgataattgctcccaatgctgcaccgccgccgccgccgatcagaccgcctttagcggtattattcatgttaccacatccactgaatactaatgtagcactcagtaataaagccataattttagtctttttcataatcatgttcattttaatatattaatgacttaatgcaaaaattgttcattaaacggcctgataatttaaagctttcttcttgataagcataaaccagatcagacaaataattcctttcatagtgctagtgatgcttatgctccaccaaatacccggcaaaccccagccccatgatacaaacaacagtgccatcgggatgcgcagatagttacaggtgacgctgattacggcaggaggcatggtgcgccccattccataaaatacgccctgtatggtaatttccagcatcataaatagttgcgagtatccgtcaatacgtagaaagacaccaccggtttcgtaagctgctttttcaggaacaaagatagaaaatatttcgtttccataacatataaaaaggaatgtgcagaaagatccgaatataaatgtcatccataaagtggtgcgataggctttcagcacacgggagatttgccgcgctgcataattctgagctacaaaggcactgagagctgtagaaaagccttgggaggtgttccaggtgatagcttcgatttgtcctccggtggtgagtgccatcagccctaaatgaccaccttgttctgtggcggttcttccgagaaacatattgacgaaagcgaataatgtattgagtgccgctaccggtaatcctattttcaaaatgtggcgtgtatattgttttttcagtttagtaaataaccgaaaatcatcccataatattttcttttgtttcaattgatagataaacagtatgcataccgtagcttcggccagccaagtggcaattgctgctcccgtagttccccagcttaaaccaaagataaagataggatctagtattatatttgtaatcagtccgataccgttaatggaaaaaggtattttgcttcgtccggcggcattgaatatccctgtaaaggcagctgataaaaagacgaatggaaaggcggttgctataatccgtagatattccacagccatcttggctatatgaggttctagttcatagatactgataataggggtggcaaagataaataacaatgctccccagctcaatgatataagtaaggacaaggtaagattatgtgatgcgaacgcacgggcagcttgctcgttttgtgccccgatggcttgtcctacgctgacttccgaacctactttgttcagaagagagatagatgtggacatccatgtaagaattcctaccgaacctacggcggctattgcctcacttcctattcttcctacccaagccatgtcggtcagactatatgccatttgtatgaatgaagtagccataatgggcattgccaaagtaaacaattgctttaggatagggccttgagtcagattcttagttcctttcattcgtcattaacggataaattgtctgcaaaggtagaaatttatactgatttctgtggggaatgctgataaaaatacttttctattactctttttaaatggtctggatgtttcataaaaaactttgaagttcttgaagaaggataaagctttttcaaaaactccaaagtcttttatgagtatattgatagaagtcgttgattagtaagcgaaaataggatatttcttcattgtttcgtttacgcgtgcacgaacttgtgcaattacttcttcattgtctacgtttgaaagaactgtctcaatcatttcggcgatttccaacatcaagtcttcttttgctccgcgagttgtgatagcgggagttcccaaacggatacctgaagtttggaaagcagaacggctgtcaaatggaaccatgttcttgtttacagtgatatcagcagcaaccaatgctttttctgctactttgcctgtcagatcagggtatttggtacgcaggtctaccagcatggagtggttgtctgtaccaccggaaacgatcgtaaagccacggtcaatcaaagcctgtgccaatacggctgcattcttttttacttgtgtttgatattctttgtattccggctgtaaacattcaccgaatgcaacagctttggctgcgatgacatgttccaacgggccaccttgtataccagggaatacagcagaatccaaaagttgtgacatcatcttgatttcaccttttggagttttcttgccccatgggttagggaagtctttacccatcatgatgacaccgccacgagggccacgaagggttttatgggttgttgaagtgacgatatgagcatatttaaccgggttgtccaacagtccggcagcaatcagtccggcagggtgggccatatcaatcatcaggatggctcccactttatctgcgatttcacgcatacgtttgtagtcccactcgcgagaatatgcagaaccgccaccgataatcattttgggtttttcacgtaatgcgatttcttccatctgatcgtaatctacacgacctgtttctttgttcaggttgtattcacacggagtataaataattccggatgtgttaaccaatgaaccatgtgacaagtgaccaccatgggccaaatttaatcccataaatttatcacccggattcaaaacggccaaaaatacagcagcattagcctgtgctccggagtgaggttgtacattagcccattctgctccaaatatttgtttcagtctgtcgatagcgatttgttcgctctggtctaccacttcgcaaccgccatagtagcgcttgccgggatacccttcagcatacttgttggtaaggcaagaacccatggcttgcattacttggtcactaacaaagttttcggatgcgatcagctcgatacctttgagctggcgttgatgctctttttcgataatgtcgaaaatcaaatcgtctcttttcatttctttttataataagtttatgtgcgatattcgattctgagttcacaaagttaagtaattttagaatataaggaaattatttagaggaaaatatttggtgaggttacggaaaaaagatatatgactttctttttgtcgtgtagtaaggtctgaagctgctgaaagagttgaagataagggcgttttgaggaaagaaaaggatataaatgtggcattatgatatctacttagaggaagcttcctactttagaaaataactcctagcgagaagcttagcacattgcggtgtcggttaatgaagatacctttttcttgggacattattccatctgtgtctttttcataaatgattgatttagagatattggtgagtccgatttcataccggaaatcaaagaatatattagcaatatttactcctaatccgataacagaacttatattaatggggtgtaattcttcttttataccagaatatccaaatccttcaaactcttcggaagtcttatgtttccatacatattccagtttgggaccaataaaaagtgccatgccgtaaggcctgctttttacaaaactataaccatataatataggtagctccaaagagtgaatcgtgctgttcagtttagcaagctcgggaagggtgttttctttattttgatttttattgaaagctatttcacctttataaatattatacataatttcgggttggatgaaatgccttttcatgtgcacccgaaaaaacatggcggcaaaatagcctactttataattattttgtacatcttccattcgttctccatctagttctaaccgactggtaaaatacatggaagagttgaaacctccttttattcccacattgatcttaggttcctctttcagaccattctttattccttgtgctgtaacgaacagggcaggaagtaataaagcgattaataaaaggagtttcttcatgagatatttttaggatttttccttggtctgtgatctgttcttttctacagaccagccaaacttcccgattttcggtcctagttcaaaatatccgccatgaacatagactaacgggttagcttcggataattcgaattttcctgtttccgcattcaggtatttatcgtcggcttttacatttaccacatcggctatgaacatatcatgagatcctagtgagatgatttcctttactctgcattctatacagagcggggattcttcgatgatgggagcactgactatttttgcttttcccggggtcagcttcatttcttcaaatttattataatctttgcccgaacgcactccgcaccagtcggtagcgaatgccatgcttttggtagtaaggttgatgacgaattccatattccgttttagaatggggtaggaatggcgttccggacgcacggatatataacacatggcggggttggtacaaatagtacctgcccatgccactgtgataatgttatattcttcttccgtacttccgcaacttaccagtagggccggaagagggtaaatcatagttcccggtttccagtcttgtttcatattcattacagtagtttgataccttctttactttgttccttttcgcagtaatgacatttcaagattccatgttctttgtcaattacatgaaacagggtggtcattggctcattgttggtgatacatttgggattggcgcactttacgatgccacgtaattcctcaggcatcaggacttgtttcttctctaccacctcatagtcacggataatgttcagttttacattcggggctactacggaaaggcggcttatttcctcatcagtaaaaaagcggtcggccacttttataattccttttttacctaattttttgctctcgaagttgtttccgatggttatgttagagtcagaatcctgcaagcccaatagggcgactacagtaaacaatttatcggaaggtatatggtctataacagtgccgtttttcaaagcggctacctgcaatgcttgtttattatcgctcatcttcatttttgtttttacttttttgcatcttctataacatcattcaaggttatgcccaatacatcacaaaggatggcctggcgcgcataaagtccgttttgtgcctgctggaaatagtaagctttcggattctcatccacatcgtaagctatttcgttgacgcggggcagagggtgcaggatacgcagattggggcgggtatgctccagcatcttattccttaatatatatacatctttcacacgttcatattccatcaggtcggtgaaacgttcgcgttgtacacgggtcatgtaaagaatgtcggcgtcagcaatggtttcttcgttaaagtctgtgtactctttgtatttaatatggtgctccttgcagtagattttatattcttcaggcattttcaactcttccggagcgatgaaatggaaagtggggttgaaatgacgcatagccatcagcaaagaatgaacagttcgtccgtatttcaagtcgcctactagatagatgtttaaattttcaagcgttccctgtgttttgtatatggagtagaggtctagcatggtttgtgacggatgttggttggctccgtctccggcattgacaatgggcaccggggcgacttcgctggcatatcttgcggcaccttccagaaaatggcgcattacgatgatgtcagcgtaattgcttaccatcatgatggtatctttcaatgtttctccttttgaagaactggttactttgggatcggtaaatccgataacgcgggctcccagtctgtttgctgcggtttcaaaactgagtcgtgtacgggtggagggctcaaagaaaagggtggcaacaactttgccgtccaagattttacggttaggcttcttttcaaactcttttgccatctccaaaaggtagaggattttctctttcgagtgttcggcaatagtaactaaacttctattttccatattggcttgtatttataattacaatttatacggagtgtaaaggtatgaaaaaaaaataaatgagcgaagaattaaaagatatttcgttgaactttgttagaaacacattctatctcaaagtttttccttacttttgtaccgttaattactagaaaatgtcatgaggaagaaatttatatacgtgctttgggctcttgtagtcggcgtactgttagttatagcgcttatattcaccgcaatagcgaaaggatggattggatatgtaccgcctattgaggaattggaaaatccgaatttaaagtttgcaaccgagattatatccgatgacggcaagatgctgggtacttggtcacttagtaaggagaatcgtgtttttgtaggttatgaccagctttcatcgaatctgattcgtgcgctgattgctaccgaagatgaacgttttgcagaacattccggcattgatgcccgtgcgtttgtccgtgctttggtgaaacggggagtgatgatgcagaagaatgccggtgggggtagtaccataacccagcagttggcaaaacaattctattcacctacggcagataatgtgatggaacgtctgttgcagaagcccattgaatgggtaatagctgttcagttggaacgctattatacaaaggaagagattctgactatgtatcttaataagttcgatttcttgaataatgcagtaggtatcaaaacagctgccaatacttacttctcgaaagaaccgaaagatttgagcattgaggaagcggctactttggttggtatgtgtaagaatccgtctctttataatccgaaacgttttaatgaacgttcacgtggacggcgtaatgtggtgcttggccagatgcggaaggcgggatacctgactgatgcggaaactgattcattaaaggcgttgcctctcgtcttaaaatatcgtcgtgtggatcataaagaaggtttggcaacttacttccgtgaatatctgcgtggagtaatgacagccaaggagccgaagaaaagtgattatcgcggatggcagatgcagaaatattatgaagattcattggcatggaaaacgaatccgcttttcggctggtgtgctaaaaacaagaagaaagacggtaccaactacaatatttatacagacggtcttaagatctataccactattgattcacgtatgcagaaatatgcggaagaggctgtttatgaacatgtggcgcaatacttgcaacctcgtttcttcaaggaaaaacggaaaaagaaaacagctccgtttactaatcagttgacagaggaggaggtgaataccatcatgaccagggctatgaaacagactgatcgttatcgtattatgaaagaagccggatgctcggaagcggaaataaagaaagcgtttaatactaaatacgaaatgtctgtattttcttacgagggagagaaggataccattatgactccgatggattctttgaaatattataaattcttccttagggcgggatttatgtctatggatcccttgacaggtcatgtgaaggcgtatgtgggtggtcctaactataattatttccaatatgatatggcgatggtggggcgtcgccaagtaggttctactattaaaccttacgtgtatactttggctatggagaacggtttctctccctgtgatcaagtgcgtcacgtagagcagacattgatagatgagaacgggcgtccatggtcaccacgtaatgccagcaaaaagcgttatggagaaatggtaactatcaaatggggattggctaattcggataattgggtaacggcttatttgatggggaaacttaatccttatcagttggttcgtctgattcattcattcggtgtgcagaacaaacagatagaccccgtagtatcactctgtctgggaccttgtgaaatttctgtaggggagatggtcagcgcttattcagcattcgcaaaccgaggtatccgtacagcaccagtatttgtaacccgtattgaggataatgaaggtaatgtattagcgaatttcactccgcaaatggatgaggtgattagtgagaccagtgcttacaaaatgctggttatgttgcgtgcggtcgttaatgagggtaccggtggacgtgtacgccgtctgtatggcattactgctgatatgggggggaagacaggtacaaccaaccgtaactctgacggttggtttatgggattcactccctcattggtgtccggtgtatgggtaggcggtgaagaacgtgatattcattttgatacgatggtagacgggcagggggctgctatggcgcttcctatttggggactttatatgcagaaagtctataaagacaagagcttgggatattctcaggatgagaaattcaatattcctgatgactttgacccttgcaaagataccttaatagatgaaacttcggtagaagaaaccggaggtttggataatatatttgaataattgaaagatttataagtaaaaaagtctgtttgcttttccttgcaaacagacttttttattgatataccttttataaaaggtgctttctctacttggtgttgtggaaaataatttatgtaaaaatagtgaaaacccttgctgtttcgtaagaaaatactatatttacaaaaagaaaatctttaccttatgaagatagggggtaattatggatagagatgtaactctgtatcagataactaatgttatggccgagagagttttccaaaaaatagataacttcaataaaggccgtagagaagatgcgggatattatgcaatcagtgtttctaccccttaccgatcatattatgcattatggcgtatatttccggacaatatttattcccctttgtttattcaatcgctggctgtcacttttaatgatgcggcagaacgtgcttttcagtatttgcagaactgtaacgtcctgctgaaagtaaaagacaatactttttttgaaccttattatggaatatccgaggatatagtcgcatttggaaaatatcgtggaaaaagattagcggaggtttattacattgatcctaactatgtactttggctggcacacaaatttgaggtccgaaatcctagggataagaagctggcaatgttagcgaaggcttttgctactgtgcattatgaaacggttatcagaaaacatcatttgccggctggcagtcgttttatcggtcagccgggagaaaaactatccgacttgcgtttagaagtcttagggataaggttacaactggacatatacaaaacaaccggatattatgtggaccagagtgtgcttgccgctgatgctgatggcaaccgttatacttttattataaaggcggcggcttccagtatgtcaccggatatgttgagctgttatacaaaaaaaatcaatgtccatgaaagtttgtatttaaaatcggctaaagttctttctcattatgagaacaaaggaataaaatatactcgcataggatatttgaagttcaaatagagaccgggcgaggtgggaaaagtacttgtcttcattcatgaagataagggcaggtggcaagatattatatgtttttattctattaagttgggaaaaacttttagtgttctgaattttcttggtgacatgccggttattcgtttaaagaaacgggtgaatgaggacggagtagaaaaattcagtttatagcaaatctcctgaatggtaaggttggaagaaatcagtagggcttttgcttcaataattacataattgtcaatccagtttcctgccagttctccgctaacatcccggattatggaagataaatacttaggggttagacaaagtttctcagcataaaaagaaatgtctctttctttataatgatgggtttctaccagttttaaaaactgtttgaatatgtcttctttatgcggcagttttttcttttttatttccagatgctttagtaggagctggcatacttcgtagaaagtagcttgtatcagatattgtatggtaaaatcacgaaacagattattttcttcactgatttttttgtaaagcaatacatgatatgttttcaataaatctgtttccgcgatattcaaattgacacatggatgattttttagaggaattaaaagagacatcattttataaaaattatctcgggtatcaaaatatttattagatatcatgatgagatgtgctttgtaatcctcgcttattttattatatttaattatttgattaggcaccatcattagtaatgtattc

SEQ ID NO: 3901 - DNA, 38778 bp, Unknown
  gut microbiota DNA sequence
tttgtgcagggtatccggcggctcagtttgaaaacgggtcagtccgaaacataagacaacgggacagatccaacttattcatcgactccgccccgttctatgtcagaataccataaaaagaatatgattattcaatctctccaaaaagctcagccagtttatttgccaaagcctcaccacgaagattttctcctaccatgaccccttgggcatctatcaaatacatagtaggaacaaatttcactttatatatatcagcaataccttcagtatccaaaaaattaggccactgaagttgttcttctttcagcgcttttgtccattccgcctcttttttatcaatagagatacttacaatctggaaacccctgtctgcatattgcgtatagagttttttcaaattaggaatctccttacggcaaggattacaccatgatgcccaaaaatcaataaggacatacttcttaccttggcacaaatcggttaaagttaccgatttcccatcttgtgacttggctgtaaagacaggcactttagaaccgatctgactatcaggagccacactctctttcaccatttttccatagcgggaatgtttagcctcttctgacaaggcatcataccacggtttctgctcttcggtaagataagaaaacaaactgatcatcatcagaggcccccaataagactctttattgtccataactaatttatagtaagtggcatctaccgtagcaaagaacaaactatcggccacggcagatgctttgtaagcttccgtagcaacgacagaatccatcaagatcttatctttggcaactctcgctttaccataggcaacacggatatccttaaacttctcgttattcgttacataaatagaatccaaggcatcacgtgtgctcaataattttacatatttgtccgtcaaaggagatcccgtcactgaaacctgtgaaaaattataattcacggttccattaaggttttcagaagtcaccttaccctccacgcttatactgccattctccaacatcagaggcatggaaccgtatgcatctttcaccatcaaccgtacagccagaggttcatccgccacccctttaaatataaattttccatctacaacagtagtatccgccaccggtttttcatgaccatgacttacaggaaatagctgtacatgggatccgtcaggaattccatcaattgcagctgtcagtgtgtaccccgttaccgactgccgggtacaagatgccatcatcaccaaaacaacggcgaatgttgctaataaatacatcaatttcataaagtctgtttttataggttatttagatacattttgagtgatagttccattacccggattctgaacggcacctgccgggaaaggcataatccaaagatgtgaagccggggttaatgtataagtctgcccttcccatgttttggatagtgcacgtgcaaaagtaccttcggcattaaacctccgggcatcagcgaatggcacaatagtgaaaatcaattcattgtctttcgaacgtcggatcaagtcaatggcttctgtcaaagttgaagcctgcaagggttgatatatctccggcagaatacgggtcttacgtaccttgttcaacacatccatagcagcagagaaatcattacctgtgacctgacgtgccaaacattcggccttgatgagatatacctcgcaagtggtcagaccagccccgttgaaatatcctttggccaaaccttgatagtaagtatcctgatttaccgtacgcagtttccagcgggaaagaaaacgcgcatcccctccctcgaaactctccgcacgttccaccggaatattaagttcgctggtagcatagttagggttaccctctccacaacggaaatagtaattctccacataatcataccctgtcgctgacggtaacgacggataactgtcttcttttgtaatagcttccttatgactgttgtaataagatatccaatcatacagagtatcattctgttccaaagccatatccgcgtatttcagcgcttcttcataattcgccatttgcaaatagacccgtgccaagaaggcataggctgctcccaaattgggatggataacagtccttgactgttggggtaatccttgttgtatggcttcttttacatctttaatcatgaaatcatagatttcttgaatagtgacctgcttgtgaggagcattaatatcggcactggttatcaaaggtacactcagtttagtaccggcagttgcagacacataggtatcagcataataattggccagtatgtaataactcatagcgcgaatcactttggcataagccattacctcattgcgttcggaatcagtcgcttcggttgcaacgggaacatgctccagcaagagattacaagtggaaatagccatataactacggtaataagtcccttcgtcctgattgttcagtacaattctgtccgctgtttcattccacagataattggcactcgtaagggtaaggctagtcagactgctttgtcctacaaatttatcattcaacagataaagactattcgttacaggaatatagccaatggtatattcatctcgcagcaatgcttcaaaatcagccaaggtagtaggaattttgttccctttgggaacaatatccaaataatcattacaagaagtcagatttatccaccccaacactgtcattatcataaatagtatctttttcatattgctctcatttaaaagttcaaattgacattacacaaataatttggtttactatatcccccaagcatccatttcacatcacgacttttagccaaagttaacacattttccatacctagcatgatacgtgcattttttacataaaacttctgacatacacttgcaggaacatgataagtaacagagagattcttcaagcgccagttatcggcatcaagtacatgaatggaagccttgctataaagatcggatgagtaagaattataatccttgctttctgacggaacatagcgtggtacatcggtatatgcctcatcaccaggctgacgccaacgtttactcacatccttacttgtcactcctaatcccggataggctatattggtattccgcattttgtgccccccttcaaaaagcagttgagcagccagttcccaattcttataacggagattggtattaatagccccactataaaccggaacagaagttcctaaatacacagcatcctccactttttgcggtgaactgcttacatggatatttccttccgagtcatacacctgaggctgccctttactatccagccctgcccacagatatccataaatggcattataaggcactccaacacggggataggcggcaggataatcgaactgaagaaaaatagcaggtgcttttacattgacataagtcactttattcttattgtatcccagcacaccacctacgttccaattccaatcttttcccataatgacatcaccggaaagagtcaactcgaatccacggtttctcattttaccattattcatggtataagtagaaaaaccaaaaccttcggtaggtactccattggtattggctaacaaatccacgcccgacttattataatattcaatagaaccgttcaatcgatttctaaacatagagaaatctacaccaatattagctgtagttgtcttttcccaccgcaaatcaggattaggacggttgctgatagtcccttgtataccgcccacatgggtattattattataataagccgtcatataaggagcagaattcttggcgatgttaccaccgataccacaactgaaacgcagtttcatcatatttataaatgaaactttaaaaaaagattctttgtccagattccaaccagcacctaccgaccagataggtttcttctgatacttggaaccagtagcaaacaaattggtacgatcccaacgaatgcttcctgtcaccatatatttaccatcatacgtgtaagccgcattcccataaaaagaaacaaaacgatttaccagttcatagatgttggagatatcatttttattgaatgatacatagtttcccaaaactccggtataagtattactcagcacccgttcatcaataagatcataagttagtaaagccggatcataattataatatttccgattattgtattccgtcttattttcacgtacttccataccaaacaaagcggtcacatcatgtttttctgcaaatgtcttgttaaaatccaattgctgacggaaattataagcacggatactattagtccccgttgtataaatattgccataaggaagattataagtagcctggccactcccacttgcatcagtagcaaatgtatttactttattacgcacagcatagctttccttatcttgcaattggcttgtcttatattcccctacttcatattgaaacgaagcagtgtatctcaaccagtctgtgaatttaaaattaagtctcgcaaaagtacgattactaaaatttttactcttcgacaagtttcttcccaattcgtccaaaggggtaatatccatactatacaatccgtaagaagaaataatttcctgttgtgacttactgtaccggtccgcagccgtgttagtatagtagcttccatcgccattcaacaacgaactataaggaacataattatatccgggtgaggtcagattataactctgcgttgtaccatctccataattcagatacgttcccaaatccagactcaaccatgaagtaagccggctagtgttctgcaaattcaatccgaaactctcgctgtcagtatatttatcttcttcccggttattcctgtaagacagcgaagcattaaatgtatttttttccgttccacgcccgatattcaagttatattgttgcgaaaacggatttcgtttaccatatttcttcacatcatcataataacggaatccctgtgaagccagttcatgtagcgtctgctccatttgtgcttcgctgatcgcacctgtatgatgttttaaaatagcctgtacccccaaacaggaatacatggatgcattgtccaacaaattctgtgcatattgggatgctccctctccttgaagattaggattcatggccgcccactccttttccatctctatcatgtcagccgtatcggccaagtgaccggtataaaaattataagggcgtactgtcaatgtcgctgaaaatgatacattcagctgattctttccggcttttttagtagtgatgactactacaccattagcagcacgagcaccatagatagacgtagccgcggcatcttttaataccgtaatattctctatatcctctatattcaaatcaggtacattttcgacccagttgcccagtccgtcagaaatagttttctctaccggaaacccatcaatcacatacagaggagtagtaagtccgttcatcgaagtcacaccacgtatcttaccgtcactataacctgctattcttccctccatcaatgagctgacactacttaaccgttgagtttccaactttttcgaatctactttcgcaaatgaaccggtagcccgttccctagagatagtctgatatccggttaccaccacctcgtccagcagttcggaggccggctccaagataattctgtaactgttcgcacttgtcaatcttactttctttgattcatagcccaagtaagagatttctatctctttcgctgtgcggagcagggtcagccggaagtgcccgttcatatcggttatgacagcagctagttcctcccctttcgtctggctcacctgacggatgtgagcggcaggcaggggatctccattctcatctacaactataccgctgatcatccggtctgtttgtgcatatgccattgttccacacaaaaacaatgcaacgaaaaccatcgccagtcgaagtagctttccgtggtaatctgaatgtttcatactcttcatagatttaatattaatactgtttataatcactttttaagttccgttttattgttaaaacagttttgcagcttatattgcgtcgatagcaaattaatgcataaaattttaaattatagcaaaaataggttatccaaatacagcaattgccgcatttggataaatttatgatagcaaattaatagattatctatttttatgcaattcctgcactttgtttctatactgagcgggagtcataccagtagccgcctgaaactggctataaaaagtagtcatggaattaaagcccaattcagctgaaatcgcctttagcggagtttggttatcaggatcggaaagtaaacggactgcctcttttgtgcggaaaccatttacaaattgagtaaaagtctgcttggtctgctcattaataatttgagagagataagtacgattagttcccaacatttccgctactttctctttggtcagcaaattgtctgtaaataccttctcctcccacaacagcgtttccaaacgcagaaataaatcctgcttcttttcatctgtcaacgaggatgaagcatatttctcaggttgcggcaaagaagttttcgtcgaatccgtaagatattcttgtaaaagagcggactggcggcctatctctgcaaactgctcatctatcttgttctgcaattgctgttcacgccggatagcgtcctgattttgcttcacaatggtaaggtacagcttattttttctgtaatataagtaatatagtaaagaggcagctatgaagatacagataaatccggctataagcaattgcatcttattttccttttccaataattccagacggttttgttttatctcgttttcctgccgttccatatcgtattttgcacgtatctcccccacagcacgttccttttccgcattatataagctatctgtttccagctgatagagcttatgatacttcaacgcctctaccagcataccatcttcttcataacatcgggataaagccttcaacaggtcacttcgatagatggcattagcctgttggtaagacagttctattccggctttcagcatccggacagcccggtcatactggtgatgctccattaaaatttcggcatagcccaaataagaattcatcactgaagaaatatttccctgttctttcaaatccaaagccttccggaaaaaaaccagcgcttcatcatctttattcaatttatgcagaatatatccataaagattgtaaacgtttgattgatcataaaagtcattctgcaccatggtgaactccgcctcctgaatatatttcaatgctgtattatagtcactcttcaaataatacatataagcggtattggttgaaccactataaatcagataaggatctttccgttcatgtcccagttcataacattcaagagcatatttcaatcctgtgctatcatttttcaaataataaataccggcaatattagaaagcaaaatggaatagagcctgtcataatgacaacgtcttgcagcttcaactcctttgaagaaataggtaagtgaacgataatagtctttttggacattcgatgcataaagtcccagcccattatatacggaacataaggcggaatcatttttattactttcacctatcagcctggcctgccctaaatgactataagcctcctttacatttcccttcatcatatgggcctgccccagacaaatatgagaataaattacagcgccattgtaatcccgttcattataacccaactcaaacaattgtcgaccataaaagatagcctgatcataatctgctttattcagatagagaaaactaactttccgaagtgcttctttgtctttaggatactttttcagatactccaactgtacattaatggcattatttatttcttcttgcgcctctgaaacaacgggcaagagtcccaataacattacaaccatccacagtttgaacatcttcattcccgtcatcctcccttttcttctttccgcatactgaactcacagccacaatattgctgattataaaaattatattccttaatgatagcaatgcgacgctcgctcaatccacctttacgccagttctgttcccaataagtgacatccggataaggagccgtagcatatcggcccgcttcctctatctgttccaaacttttccaacggctggaagcaagcgtagtagtgataaccgggaatccatgttcgtgggcataacgtgcggtttcctgcagtcgcatcttgaaacaacgcaagcaacggcctcctctttcaggctcttgctccattcctgccattcgacaacgccaggcatcatgatcataatcggcatctataatttccaatcccaaggactgggcataccgcgtacattcgtccttgcggataatgtattcctccaacggataaatattgggattacaataatagataaccggagtgacaccatgctgcatcaagcactctatgatggctgatgaacaaggagcacaacaagtatgaagcaacactttgtcggctcctcccggaacttcaagctggaatttctttttcatacggcaaatttaatagatatttgccatactgaccaacggttcgtataatttttctatatcctgcgcatccatttctatctccacttgatcaccgggaaccagggtttgcccctgaggaagtaagtttttacgattccggtgtatactacgaatgatacaatgattaggtaaagccaatgtatccacttcctttccgtcaaaataagacccatccattatctcgacaaaaagatgatagcgggcaccagccccttcggaagacttcggattatggctacggaacatcctgtcatacagcaatacattgtaaggttttatctgtaacaattcggtgaaataataagtcaacccacctaccacgatggaaggatagaacacctcgaaatgaccggtaatctccgttatcagaacaatggcagtcaaaggggtacgcaccacagccaccaaaaaagccaccatcccgatcagcatcatataactcacattctcataccctatccatccgcgctgtaccaataccaacccgaagatttgtcccaataatcctcccgtaaccaaggtaggaatgaaacttcctcccggcaaacccgaagaaagagaaaacagcgtaaaaacaaaatgaataagcatcatgatagtaagccaccggatatcatgagttccattcattccctgcatcatcaaaaactgctctccgccacctgtcagattcgtctctgttaacgatatggcataagctatgatcaataaatacaacatcttgacaggaatggagagtttcatggcaggtatcctttcttgaaagaaaggaacgatgagcgaataaaactttgcaatgacagccataagggcggcaaagataatataaagctctgcctgacggataaaagataaaccgggaacgaccgcactaatcagatgataaggagtcgtggggaacatccaactagccactcctccggctaccacgccggccaacaaggtagtaatggcggttttaggcgcatcaaaacgctcgatggattctattaccagcaaagaagaagacaacggagcggcaaaagcggcagacaagcccgcaccggctccggcagccagcaattgtttccgttcccctttcaggatatgtccccaacgggagataagtgttcctatataagaccctatctgaacagacggcccctcgcgtcccaaagacagccccgcactgagagccaacacacctccgcagaatttggccaccagttccttaaaaggatgctcataacggatacgaccgttattggccgcacgtgtctgaggaataccgcctccggctatcaatggcatacgttttaccaaagaagcgacaaagatcagaatcccccataagataaaaaacaacaatacatgccaataccacggataatgcgccgtgaaaaaagttttccgcacatcaaagaaataccagagaagatagtgataaggcacagcaaccagtcccgtaagcagccccacgaatatgctcacgaaatacagacgggcatcaatcagcttcagtttccatatttgccatttgcgcagattgctccactccttccacttgtttttccatttctccagtttcatatccggaataaacaaatggaaaagagaagggtttatttaaacaatggctttaatagttccggtatttctatttcatttgctttcagcgcttccaaacattcacgccctttatcggataaagtaaaatgcatctgccgtttatccttatcccccaaattacggacgattaattctttctcttcaatggaacggatgactttagaggtatgcgaagcagacaggcctgtgttttccgatatcacactggctgtcagcgtatctccgccaatgcaacaaagtgccattgcctcattcaatgacactccatattgttccatcaagcgggtttcaagttcagagagagccttgaacagctctctcatgacacatattgattttattttctccatgcaaatttaaataaacaagtttacattcgcctgttcggcacggttcatataggttgccactccgccaatagtcacatgatccagcaattcctcacgtttcacacccattacatccattgacatctggcaagcaataaattccactccgttctgaatggcttgagtacgcagagattccagtgagtcgatatttttcttattcatgatatatcgcatcatcctggctcccattccacccatattcattttagacaatctcaactttaaagaactggaaggcagcatcatgccgaacatcttcccccagatatctttcttcaccgcaggcttgtccaatcttttgatagcattcagcccccagaaagtaaagaagatggtcaccttctttcccgtagccgccgcaccgtttgcgagtacaaaagtagctaaaactttgtccaggtcgtcactgaacagaataaaagttttccctttatcctcccggcaaacctccgaggaagaagattgcggagtacttttctcaacaattacctcatactttcctgctcctgactttactgagacaaaacggttcccggtagtctggcaccatgcttcggcatcgcgggggaaaccggcatccgtagcgacaatctccagacgttcgccgtccgccagttcttccatactcttcttcagcttcatgataggaccgggacaagatatgccacaagcatccacttttattgctttcatagaaggaatgacggaagaggcaatagtataagcttcagcagaatctttactgtgttcagaatgatcaacttttgaagaatcagaacttgaagatccggaatttgagaactccttcggcttgggcagaggagccgttgccgctttatacagtttcaaacctcctattaaattccttacttccccaaagccattctgtaacaatatattagaagccagataccctctcaaccccactccacaatacaaatagaccggcttatcctgaggaatctctttcatcctttcgcgcatatcatccaaaggaatattgacagcccccttcaaagcaccgagtgcaaattcatcgggagtacggacatcaaccaacgtaactttactcaaatcggcagcctgcaactcgcgccaataaagaggcttcatctttccgctcagtatatttccggctacatatccggctactgctacaggatcttttgccgaagagaaaggaggagcgtatgcctgctccaaagccatcaagtcatatacagttccgttatgcttaatcacttgcgagaattcgtcaatacgtttgtccactccgttataccccacaatctgcgctccaagtaatttcccgttcacaggagagaaggttattttaatggacatctgtaaagcatcgggataatatcccgcatgggaaccggaatggatggttgccgacaaataatcaatgcctgcctgtttcaaccgctttgccggaaggcctgaagcagcgacagtcatatcaaaaattttggcaatggaagtaccgacagccccttcgtatgtaaccttatttccaaaaaccatgttatctgccacaatacgcgcctgacggttggccggaccagccagataattcaaccacggtctatcagtcagcggatgacggaactcgatagcgtcgcccaccgcataaatatgctcgtcggaagtctgcaagtaatcgttcaccttaatgccgcgcatctcccctatctccagtccagcctctgtcgccaatgaggtatttggacgtaccccgatggataacaacaccatatcggcaggcagcctttcgcccgatttaaaaataacctccagtccgttgaccgtgcgctcgaaagaagccaccgccttttccaggtagagatgcactcctttctgcaacaaatgctcgtgcaccaaagaagccatagagaaatcaataggagccatgacttgatttgccatctctacaaccgccacttccgcaccggcttcctgcagattctccgccatctccaacccgatgaatccggccccgatgattaccgcccgtttcaccttatgctgctgcaagtaactcttgatagcatcggtatcattcacattacgtagggtaaaaattccttcattgtcaatgcccggcaagggaggacgaacaggcgacgcacccggagaaagcaataatttgtcataactctccgtataagttttcccgtcggaagtacgaatatccactgtcttatcggcagaatggatggctattacctcggaccgggtacgcacatctatgttaaaacgtttcccgaaagcctccggagtctgtacaaacaatttttcccgctccgcaatcacacctcctatataataaggcagaccacaattggcatacgaaatgtattctcccttctcgaacaaaatgatttccgcctgttccgtgtttcttctgatacgtgcggcagcagttgcacctcctgctacgcctcctattactatatacttcataatcgaactattttatttgatttaatattttccaatggaaactttatgcaaacatacatgatatttcttataataaaaagtttcctatggaaaatattatcaagttaactctttttaaggagaaagaacattccgggtattaaatagacaatctctattgttgtttgatattttattccctaccttcgcaataaatttcaaaataaataagaaattgaatcgaacagacgcacatcatgttatctaaaatagacttgacgcagggaggcatcaccggcactctgctacgttttaccttacctatgattataggctcactgctacaacagtgttacaacatagccgacacgctgattgtaggacaatgtataggttccggcgcattggccgccgtcggttccgcctacacgctgatggttttccttatttccatcctgctgggattgtccatgggaagcggaaccgttttttccttgcaatatggagccggacgaacggattccctacgccgtagcatctatgtatccgtcctgctgatcggcacagtaacattgattctaaatatagcggttttcgtctggattcatcccatcctcaggatattgcagattcccaaagatatttatggcatgatgtatgattacttgtggattatcttttggggaatcggctttacctttatctataatttctatgcggcattgctgcgtgccataggagatgccgtcactcctctttggtttctggcggtttccgttgtactgaacatcgggctggatttgttctttatcttgcagttggattggggaatcaagggagcagccatcgccacggtagccgcacagggagtatccgctttgggaattatgggatatgcctacgtgaaataccccgaactgagattacaccgcaacgacctgcatttcgaccgtcactgcctgaaagagatcacttcgttctccgcactgacctgtgtacaacaatcggtaatgaatctgggcattctcatggtacaaggattggtcaacagttttggcactgtagtcatggccgcctttgcggcagcaataaaaatagactcgtttgcctatatgccggtacaggaattcggaaatgccttttccacctttattgcccaaaacttcggagcgagaaaagaggaacggatccgcaaaggagtgaaaagtgccttgattaccaccgttctcttctctctggtcatttccattctggtctttttattcgccaaaccattgatgctgatttttgtccgcccccacgaaacggaaattctgaacatcggtatcagttatttacgcatcgagggagcgttttattgcggaatcgggattttgttcctgttatacggatattatcgtgccatccgtatgccgggaatgtccgtagtgctcacagtggtatcgttgggaacccgtgtagccctttcctattggcttgccggcattcctgccatcggggtcatcggaatctggtggtctattcctatcggatggtttatagcggacgtcatcggcatcatatattataaacaacttaaaaaggaaacagcaaaggaagtaccagcaccatgacaatgcccataataatctgcaacggcagccctacctttacataatccataaaggtatattgtccggcgggcatcaccaacgcattgggcggagtggagaatggagaagcgaaacacatacttgcccccagtgtcaccgcaaagagaaaaggtacgggacttacccctatctgcgttgcactttgcatcgcgataggagccagaagcactgcggtagccgtgttgctgataaacatcgtcatcagggaagtagtgaaataaatacccgccatcagcgccaacggtccgtatgttcccagttcactgaccagactgttcgaaatgtattcggaagcccctgtcttttccaatgccagcgacataggcagcatggccgcaatgagtacgatgctttcccagttaatggttttgtaagccgcctccacattgcggaaacatcctgtcagtaccatcaggatacccgcaatcatcactgccgtcaccggagctaccggaatgaagtcgaacaccatcattgccaccatcagcaccatgataacggcagctaccggtgctttgtaatccagcgtgacctttgcagcctcggccagcggttgtcccagtaccacccagtcggcatcctccttgctcagccgggcgatattgttccatgtaccctgcaccagcaacacatccccgctatgaatccgctcattgcccaagtcctgcaacaaatattccttcttccggcggatacccagtacattcacattaaacttgtcacgaaagcccgccccctttatcgtctggtttatcagattggaggaaggcatcaaaacgatttcagcaatacctatgtcataaaaatccaatgaattggctgagtttttcgcttcttcggtagtatgctcgtccagcatctccagcagataatcttcggcaaacaactttattttctcaaaatcccccgtcacatacagaatatcctctttctgaagaaccgtaccgggatcggccagcttctgagtaattgttttcaggaagcggtgttgtgacatatccccacgacgcacctccagtatattcaatccatacttacgccggatatccaactctataatcgtctttccatgcagccgggagtcacccaccaccctcaaccggaacaaattactggatagcccgtattccttcaccaactgtttcagggatttgcccgaatgaacattgtcttccccgtttttcccccgtttcgaaagaaaccatttactgagcggaagcaacaccaaagtacccactgccacacaaataatccctaccggaaaaaaagagaagaacgaaagcggaggaaaaccggccgaagtcaacgcattttgaataacaaggttgggcggcgtaccaatcagtgtcatcatacctcccatactgctggcaaacgccaacggcataagcagacgactgggattcatgttggcactgactgccagactgaccacgataggcaacatcagagccaccgtacctgtattgctcacaaaagccccgatggcagaagtcactaacattacaagcaagaataatttcaattcactcttacccgctaatttcagaatgtgtgaactgatcattttggcaagtcctgtctggaaaatcgctccgccaaccacaaacagccccaccatcataatgacgaccgaattggagaatccggacaaagcctcgtcaggagtcaatatctgaaaaatcaacaaagccactaaagcacaaagagccacaagatccgaccgtatcttgccatttacaaaaaatactgcggacagtacaaggataataatcgtaatgagcataagtattaaattattgttttattcattcgttgttgcatttgtacaagttctttttgcaaaataaaaaatatattccgataatagaaacaaaccccgaatgtttttgttcttaaaagaacaacatgaacgacattttcatctaaaatttatgtatttttgtagccttatagaaaagaacagacatacaaatgatggaagaaacaacctgcaaacctgattattcgaattcgatggcggaacatctgggtatccggtttctaccctccaccgaggatgcggtacatgccgaaatgcctgtagaccatcgtacttcacaaccctttggtatgttgaacggcggcgcgtcactggctctggccgagattgtggcagggcatggctccatgtcgctatgccgggaaggcgaatatgcctgcggagtacaagtaagtggaaatcatctgtcggccgtgcccgtcggaggcaaagtattcgccaccggcaaactgattcaccgcggcagatcctcgcatatatggaatatagatatcaccactccacaaggacaactggtttctactgttcgtgtcgttaatttcatactgaaaaagaaatgaatctaccagatatacatacgcaaaaattattggattgcctgacacacagccgcctcggtttcgccctctaccggttaccttggacagacgaatgctacctggtattgcaaacctcgggcgatgtggaacaattagcggacattcaggaactgaatggaaagaaaggatttgtcatggctcctttccggatatcggaggaacatcccttggtacttatccgtccggatgtcaccgcatacgactggagcgaaatcagcgaagcactgtcttcactggaatgtgcggatgccctgctcacctgcaaaagccggcagagtgaactctccccttttgtttccgaagaaacggataaagaacaatatacccgcgcattcgggcgtttcatcactcccttacaagagaagcggttccagaaactggttctgtcacgttcttccgccagacatatcggagatgatttttcaccactcggcgcttttgtccgggcctgcaacaactatccgcgcatgatgatttacctatgccacacccctgcttccggaacctggctgggcagcacaccggaaatcttattaagcggacacggcaaagaatggcacaccgtggccctggccggtaccatgccgatgcagaacgaagtgatgccgacagactgggacaagaagaaccgggaagagcagggctatgtggctgattacatccgccggatcgccaaaagattcggcaacaagatgacggaaaaaggtccttataccgcccgtgccggacaattggtacacctcaagaccgatttttatttcttgttgaaaaatacagaccatataggcgatttattgcaagaactccatcccactcccgccgtctgcggcctgcccaaagaggaggctttccggtttattccggacaatgaagggtacgaccgcagttattattccggattcaccggctggctggacacagaggggcataccgatatctacgtcaatctgcgctgcatggaaataaagccgggtgaagccatcctgtatgcaggaggaggaatactggcttcctcggaagtagaatcggaatggatggaaacgggagacaagatgaatacgatgcggagcatccttcatcctgactttataaataaataaatggaaacaattaaagtagaagaataatgtattcagacaaaaagaacatacttcagttggtggcacttctcaaagcgcacggtgtgcggaaaatagtgctttgtcccggcagccgtaatgctgccatcgtacatactctggccaatatagaggacttcacttgttattctgtaaccgatgaacgcagtgccggtttttttgccatcggcctatctttacaagggggaggccctgccgcagtatgctgcacttccggttcggccctgctgaacctgcaccctgccgtagccgaagccttttaccaacaagtacctctgattgtcatttccgccgaccgccccgctgcctggataggacaaatggacggacaaaccctgccccagccccatgtgttcggaacgttagtcaagatgtctgtcaacctgcccgaagtacatactgaggaagacgaatggttttgcaaccgccttatcaacgaagccatactggaaaccacccaccacggcaaagggcctgtacatatcaatgtacccatttccgaacccatttaccgcttcaccgccaaaacacttcccgaagtacgtgtcatcacccgttatcagggactgagcgtgtacgaccgtgactataaggaactgatcgaacggctgaacaagtacaacaagcgcatggttgtggtaggccagatgaatctgatttacctgttcgagaaaaaatatgtgaaaccgctttataaacatttcgcctggctgacggaacatctaggcaaccagaccatccccggcattcctatcaagaatttcgacgccgccgtttattccatgacaccggaacgccaggaagacatggcccccgaaatactgattacctacggcggacacatcgtatccaaacaattgaagaaatacctgcgcaatcatcccccgcgcgaacactggcatgttgccgccgacgggaagatagccgatttatacggttgcctgaccaccgtcatcgagatggatccgtttgagttcttggaaaaaatagctttcctgctggacaacaaacctacccattatccgctgatgtgggaaaactattgcaaaaccattccgatgccggaccttgcttattccgaaatctccgttatcggaaaactcatccgggcattgcccgaaccctgtgccctgcatctggcaaacagctccaccgtgcgctatgcacagttatttacagttcctccccaggtggaaatctgttgcaaccggggagtgaacggcatagaaggctccctgtccaccgccatcggttatgccgccgcttccagcaagctgaatttcatcatcataggcgacttgagcttcttctatgacatgaacgcactgtggaatcaaaattacggtgccaacatccgcatcctgttactgaataacgaaggaggagaaatattccacaccctgcctggaatggacaaatcaagccgttccagggagtttatcacagccgagcattacaccaccgccaaaggctgggcggaagaacgcggctttatttacatgaaagtgaccggagaagaagagctggaaaaagcgatgcagccattcacctcacccgagacacggatgcaacccatgctgctggaggtgtttaccgacaaggaaaaagacaccaccctgttaagagaatattatcacggacttaaaaataaaaatgaataatggaaacaagagaatggaaaaccatcaaagaatatcaggatattctgtttgacttttacaacggaatagcgaaaatcaccatcaaccgtccgcgttaccgcaacgcgttcacccccaccaccacttcggaaatcagcgacgccctgtattactgccgcgagtgccaggatatcaatgtagtggttctgaccggagcaggcgacaaagccttctgcagcgggggagatatgcacgtaaaggggcatggcggctatatcggcacagatggagttccccgtctgaatgtgctggacgtacaaaagcaaatccggtcactgcctaaaccggtcatcgccatggtaaacggttacgccatcggcggcggtcatgtgctgcatgtggtatgcgatctgaccattgcctcagagaatgccattttcggacagacaggtcccaaggtaggcagcttcgacgccggattcggctcttcctatctggcacgcatcgtagggcagaagaaagcccgtgaaatatggttcctttgccgtcaatactccgcacaggaagcactggaaatgggattggtcaatacagtcgttcctttcgaccgcctggaagacgaaaccgtggcatgggcagaaaagatgatggagcacagcccgctcgctcttcgtatgatcaaagccggactgaatgccgaactggacggacaagccggcatacaagaacttgccggagatgccaccatgctgtattacatgacagaggaagcacaggaaggaggaaaggcatttttggaaaaacgcaagccacggttccaggattatccgaagttcccataaacaaactacaaattcaaagcatggacattgaagaattcagaaaatattgtctttcgttaggtgacgtttccgaaaagatgccatttggcaaatttgctgcaagatatgattccatccttgccttttatgtttatggacacatgttctgttttatagacattgacaatttcacttttgtcaatgtcaaatctacttcggacgaaattgagtatataaaagagagacatgtttcagtcggcaatcccatcaaccaaagtctgaaacattggcttcaacttaattttgatggtgatattcccgacacgagcatatacacatgggtccaacgcgcctttgagattgtcagggataaatataccaaaccaactacacataaaaaaaaatgttccaaacccaaattataaaaaaacaattacacttcaagcaacctgccggtacttccagaggagtatatactacccgggatgtatggtacatcctcctcaccgacaccggcagccgccactatggcgtgggtgaatgcgcccctctccctgccctgagctgtgatgatatcccctcatacgacgaggtgttggccactgcctgcaagaacctggaaaagaacggggaaatagaccgggaagccttgcttccctatccgtccatcctgttcggtatggaaaccgccctgctgcatttccgggcacgcagcctgcaattctggcacaccccgttcagcaaaggcaaagagggtatccccatcaacggactcatctggatgggaaactttgacgagatgtaccggcgcatcggggaaaagatgcagcaaggtttccgctgcatcaaactcaaaataggcgctatcgactttgaaaaggaactggagctgctggcgcacatccgccggcatttcaccccagcccaaatcgaactgcgtgtagatgccaacggtgctttctctcctaccgatgccctcgaaaagttacatcgtctttccgaattccagctccattccatcgaacagcccatccgtgcgggacaatgggatgaaatggcccgactctgtgccgccaccccctttcccattgcactggatgaagagctgataggcatcaaccggcgcgaccggaaaatagaattgctggaaaccatccgtcctcagtacattatcctgaaaccttctctgcacggaggaatcagcggctccgaagaatggatggaactggcggctgaaagaggcatcggctcatgggtcacttccgctctggagtccaatatcggactgaatgccatcgcacaatggtgtgccaccttgcagcccgccctcccccaaggactaggtaccggcttgctgtttaccgacaatatagactatccgcttcacatcgaaggggactgcctttggttccaccccgaagaacgagaacccgatttactaaactggctgaaacaatgacaaaattctgcaccaatagaaacaaacaaaccattctgatagaaagcatcccctactccaattgggaaattgaaatggtaagaatgaatatccctgccgacaaccgaagtttccggcaggaacttttctcctttctttccgaatggtttgacccggcagacaccctgctggtacatacttcaggctccactggcaaacccaaggaactgtatgtagaaaaagaacgcatgatggaaagcgcctgcctcacctgttccttcctcggactacaaaaagaagattccgccctgctctgtatgcccttgcaatacattgccggaaaaatggtggtagtacgtgccttggtagcgggactggacttgctgcctgtcaccccctccggacatcctttaaaagacctgacaaaagcccccgtctttgccgccatgatccccatgcaagtctataactcactgcaagttcccgaagagaaagcgatattgcaacaaatcagacacctcattatcggaggcggtcctatcgactcccaactgaacgctgcgttaaaagatttcccccatgccgtatggtctacctacggcatgaccgaaaccttgtcacacattgccctacgcagactgaacggtcctgaagcttcagactggtacacccctttcgagagcatacagatccgtctgagtaaagaaaacaccttggtgatatacgctcccgaaatttgcgaaaaagaactggtgaccaatgacatagccgagataaacggacagaaccaattccgcattctaggcagaaaagacaacacgatcaatacaggaggagtaaaagtgcagatagaacaagtagaggccgcattgaaagaacacctgtccgttcctttcctgatcacctccgcccccgacgaaaaattcggagaaatcattgtactgcttgccgaaggacaactgcccgacgacatagaacagacctgcacacatcaattacctccctactggcgtcccaaacgttttgttccggtattcaaacttcccctgacagaaaccgggaaacccgaccgtgccatagccaaattactggcgcaaaaataactccgatccattcataaagggtgaattcaaaaaccaatcaaacggtctttttgaattcacccttctttctgtaaaaaagaataattttccgtgttctcctacaacttacggaaagctcaaattgttttcctatcagtatattaaaaaaatcaaatacacgtagtttttttccgttttattttcccttatgtccactactcccggtggaatgtatcattaaattctaattttgtgaagctagatttgatacaaagtatgttatataataacccaaaaccacaggataccaaagaaggactgtccgaccaagatttcagtatttatatggatgcgcacacagtgcctttcagcaaatacccctcttatatgccggcaggagttttgggtatatgtaccgaaggaaatgccgagatccaggttggcctccggaaatatgttatttgcgcaaacgacattcttattttcatgccgggattcctggtttcatttataaaatccagcccgactttcaccatcgactattgtactttttcaaatgtccttttttatgacgtgatcaatggaagtatcaaacgttttccgaccggttttcatacctacacccagacccactgcgtctattcgctatcccaagagaaagcggaacagttctccatctatttccggttattatacaacagagccacttcgccaacttatttatttacaaaagaatctattaccaatctgctgaaattaccttttctggaactttatgcagactattacagcacggtaaaagaacataaagtcaccaccttgcataaagaagaaatcggatacttttttctggatttgctgttaaagcattacaaagaaaacaaagaagtggcgttctatgccgaaaagttgcatgtttcctccaaatacctgactgaagccttgaccctggtaagcggaaaatcccccaaagaatggattatacattataccctgcaagagatttacgcactattggagaatccatccatcagcatacaggaaatcgttcaaagaacccggtttgccaatcttgccaccttaagacgtttcttcaagcgacataccggaacatccctgttgcaataccggaaacaggacttatacaaaaataatcaataggtacctcaataaaaaaatcagcccgttccacacattcttccggaacgggctgatccctctatctaccaaaacttgttgttttccttactatactcaaatccggccgccttcagttttttcaccaacagctccttgtctacattcatatcatcacaaagctcgtccagcgaatgatagcagtcacgaagtttcatattcaccatgctgaaaagcatcatcgggtcatcaggtaattccatatcaatatctcctttttaaaaatcggatgcaaagttacaaaacttttcataatgatatgtattccatcgccaaatatcggtttgacaaaaagttatcccctgctttttattctatcagtccgtcagcttcaccgtttccatcttccccggaaccaaagtaagacgcgccgttccatccctgtctatctccacttccatataccgggcccggataatgatccttccatctacagccagtaccccccactggcaggaactgtcctgataggcgcaataaccacccaccggatgcaatatcctccgatagacaggtggaatcaaaatccgctccgctgtcctcagcccccatttcactcctatttgaaaaggtacggcctccacactcctgctgattatacgctgccgtttccgttcatactcgcacttctcctcacgcaagcgtttctccacacgctcgtccgcctgtcttcggagcaatgccaccgcctcatcaaaatcctcactccggtccgacggacggttacaggccacataacgctttccatgccctttctccacatggtaataccgtccctcctcatccatcaccacaatactttgatccggcaaccgtccgctcaggtaataagcacgctcctcatccccctccaacagacaaacctgcggttcacaacaaaagcctccatcttccatgcggcggcatcgggaaggcactctgccatcgtacatcttcacataaaaccccatccacacgatggacgaagaaggcaacccgcatgtattggcatacacctgccttgtcctgctgtaataagtacggttcgcctgtaacaattctatgctcccgtatctgaggacacgcgggcggacagaataacaccggccgttccgtaaatccacataagacaccgaattcccggcatgacggacttgcaacaaatcatctttcagaaacctcacctcacggcaatgccccggttcggccaccaaagcccccgtatcatccagtacccggacacacccgttccgaagcctccccacggcaaaacgtcctttgatactcaaaacctctttaaacgaagcgtccggcaacatctcatctcccttttccaatccccaaagacctgtttccttatctacaaatgccctcagcctgcatgacggtgactgctccttctcatccggcaaagcctgctctctgatggaagaaagcaaacgcccgtgctccataaccaccaccaagtccccaccggcttcagccggcctttccaccaccggaaaagcggtaacggaagcatcacagttcatccgtccgggcaaactcccctttcccgccatccgtccccggaacatagcatcccagttccatcgctgtgtaggaagcccgaaaatgcggtacagccccacattgtctatcagcatacacgcctccttgccctccgatctccgcaatccgcgccctacctgctgcaaatatttagccagtgacaaagtaggacgggccagttgtacaaactccacatcgggacagtcgaacccctcgctgaatacatccacattcaccagcacctcgatttttccatgtctgaactcctccaccatccgcttacgctccatagcaggagtcttgctgtccacagccaccgcattcactccccgcctgctgtaatactccgctatccgccgggcatgttcaatgctgatggcatacaccatccccttcttgccggaagcaaactgcctgacactgcggtacaggcgctcgataccgggacgcctgttcagtaccgcatccatctctttcacctgataatccccatcggccccccgtttctccagaccgtcaatgagccgctgctcctcgctgccgggacggatggatacataatcgaacacagacaacacgcctttttcaataaactcggcaatactccacgaagtaaccagtacctcgaacagttccgtgaaccccctacggttcaggcggcaaggtgtggcagtcacacccagtttctttgcggcaggataacgcttccacatctccgtgtaagaagcggccaaggcatgatgagcctcgtctatcacaatcagtcccggagcatcacccgcctcattccagtgccgggacagccattggacagacatcaccctgaccggagtatcctccctccggataccatatttagccagcgtttcctccatttgcgccaccagttccctacgatgggcaataagccataccccgctgccggcagaagacacgaactcactgaccacagatgccagcaaatgtgtcttgcccgtaccggtaggcatctgcaccatcacgctccggtgagctttccacgcttccatcagacgtgttttcatctctatctgataatcccgcaacataaataatttgccgatttgctaacgtgccaatggagtaagaggataactgaaaaaattatttactagccagcatattattaatctgcgcccgtatattggctatcgtaccgcccgacacaagccgtttggcaaaaggtagcaacgacttgatgaaagccgctttcaccaccgtgtgtttgtctacattcctacagttctcatcggccagcatctttcctaccaccaccgccagttcgcgtgccgtggtacactctcccaaaagtatcttgtaagccctcatcacctttatatcgggtatatagaccgatacgtaaaattcatcatccgacagttccgccggctcctgtgccggcttctcatccgtcacactttctgtactctccgttttctcagaatcttccggttggtcggcggcctcatcaccccggtcgccataaaagttctgaatggcggaagacgccacaggggcaatcagattgtttccgccataaatatttatcatcatatcaggtttttcattcatatactatttcttttctctattctttaattattatcaacagatcgttaatcaaaatccatattttatcaatatataatcaatagcatgcaccaatagtaaacagatagtaaacggttatgaaccgatttccatacgtcattccctacccgtatatttgtgcagataaatcaaaatcaatttcttttatgaaagaatacatcatgtcatttttcaatgcacccgtcaccaataaaatacccacatgtatatgcagtgtggcagggcttcatacctacatcagcaccaatccgcaactggaagaactgacgcgtaaagtcagagccggactcggagacaagcaagtgttccgaaagaataaacagacccttttaccgtatgtcactccggcaggtatcttctcttactgcaaagagcaatgcatgcaagttccttcgggcctctttgtcatagatattgacgaactggcttccaccgaagaagcggcaatgtggcgcgaccgcctctttgccgatgaagtgctgcaccccgtactttcctttgtcagccccggaaaccagggagtaaaactgtttatcccttaccgcataaaccctttcctgagcgtggaagaatccttcgacaatgccctgcacaccgcatgggagtatctggaatggaaatacgagctgaaagtggacagggccaatgccgacttgtccagagcctgttttctgtcgcacgacggagaagcgaaaatcaataaccataaatattaaaaaatgaacgattctatttctatcttggaacagctggtaacagccatcgaacaagcgggagtcaatgtggcccccacctatcaggaatatatgccgctggcctttgccatagccaacagttgcggagaagaaggacgcacccggttccaccgcatctgccgcatatccgaaaagtaccaccacgatgaagcagacaaactgtacggacatgccctgaccaaaggaacaggcagaaattccctgggaaccgtcttccatctggcagaggtggccggggtgaaaatggacccgaaacttgcaaacttgcagaacttgcagtctctccacacccacacacgtgcgcgcgtatcctataatgcccatccggatgcttccgacgggactccgcccgatgccgttttcacggacccagcctcccccctgtccgacggcgtgtccaagaccatcctccctgcccgacttccctctttccccgactaccgctggcccgccttcctgcaaggaatcatagactgcggtaactctcccgcccaacgggatatcctgctgctgggtgcggcaaccgtgctgggaagcactctcaacaaactggtaagttttgtgtacggacgaaagcacaagtatccctgtctgcaagtgttcgtcaccgcgcctcccgcttccggcaaaggtgcgctgacctgggtacgccgtttggcagaacccatacacaacgcgctgctggacacctaccgggaaaaaataaagacctaccgcatggaaaagaccaaatgggacactttggggaaggaaaaggcaaatacccccgaacccgaacagccccagctgaaaatgctcctcatagccggcgacaataccggtacaggcatacaggaaaacctgatggactccggaggcgtaggactgatatgcgaaaccgaggccgacaccgtgagcaccgccattggaggcgaccacggacactggagcgacctcctccggaaatgtttcgaccatgaccggctggcctacaaccggcgcaccaatcacgaataccgcgaatgtaacgtcacgttcctctgcgtacttctcagcggcacgcctgcacaaatcaagccccttatcccatcggccgaaaacggattgttctctcgccagctgttctactatatgcctgccattgaagaatgggaagaccagttcaacgaagcggatacagactatgactcccgtttcctggaatggggggcacaatggaaagaagtgctggacgccatcaccgcttcggtgagcaacatcaacatgaagctcacccacgagcaaaaagagatattcaacttccactttgcccgtgtattcggacgagcctccgccattcacggtaaccagatgaaaagcgccgtaacccgtattgccatcaatatcttccgcatcataagcattatcgccctgctgcgctctctggaatccctgctgccgggaggcgaaaggagcggtgagccacaggaaaacatcgtgcgtaccctgctggactgtcccggactgaccccgtcggcccatattccacaagaaaacatagcagacggaatcgtaccgcaattcaacctctccatccgcaccgacgacttttatgccgtgctggccctggtggaacctctgtaccgccatgcatgccacattctctcgctcctgcccgcaggaacccccaccgcaccatcggcgaacatgactcccgaaaccctgttcgactgccttcccctgcgcttcacccgcaacgaagccatcgacaaaggagaacaggtaggagttccggcaggctcggtggactcgctgctgaaacgtatgaccgaacgcggacagctggtcaaagtggggcgtggcgaatacgaattcaacgcgcgcatgcacacacgtacgtgtgtgggtgtgagagagagtgcaagttctgcaagtttgcaagattcctgaatttaaaatgtataaatatgaaagatttcctttatttcccatccatgacaaaaggtagcctggctctgctctattttcccggttcaaatccccggatagccacccggcatctgatgaggtggataaacggctgtccccctttgatggaagagttatccgcaacgggttaccatacctcgcaaaaagtcttcacgagccgccaggtgacactgatcaaccggcatctgggcagccccggatagccctgcaagctctttggaacaggatgaaagccataaagtgccacaaggtgtcataaagcgtcagcacgcatttcacagtacctatctttgcaatgtcaacaatgagggagccgatacgttactaaccttcggcctagcatgttactaacatgtaaccccatacgttactaaccttcagccttacacgttacctacgtgcaatccgcaagaaaagtaaagtattctccctcttcactgacgaaattcattttttatttttcatctcttaaaaccctatttatcatgatcaactacagcacctgcatgcgtggtaaccccaccgacaaagacgcggccaagaaggcgtatgccaacgcccagtactcacaagtaatgacactggacaagttctgttaccacattgccagccacggatgtgtatactcgcgcgccgatatccaagccatccttattcttgccgtggactgcctgcgcgagcagttgttgaacggacagcagatacagatgggcgatctgggcgtattttcgaacagtatccgaagcctcggcgcccattcgatggcagagttcactgtggagaacatcaccgaggtgaacgtactgtgggctccgggcgtccgtttcaacaacctgcgccaagatgccgaattccaactggttcccacgcgcaaggcagccgccgaagtagtgaaggcattgaaggccggaaagactacggtagacctgacgggcaattcttctgccgccggcattgccgctgacgacgctgacacctcccgcattccagccgcctccggcgaaccggcagacgaaaatagctgaccggcttgttccgctccacagagatagcatgatgtgattatggaacacgggcgacacggattcttctttcactcccccgtgtccgtccgccagttccgtaacctccttttgttccattcgcattttaaactgacaaaaaacagatatttccatgaatgaatccaaccacgaatccaagaaaatcacctggacacaaatcctccgggcagttatccaggcagccatcgcggcactcaccgctttgggcattaccagttgcgcatccctcatctaaagaacaaacacaacattttccaattctcaatttattatgatacaagaaacattcccaatgataatcggtgaggaagaaatgaaaaacgaacgccaactcctcaccgtagaggacggaccgctgatgcaaggacgcgaatcagtgcgatacctcatcctccactgtagcgccacacgttgtgacaaagactatactgccgagcaattacttcgtgaccataagacccgtggtttccggactgtaggttaccacttctatatccgtcgcgacggcaccatcacccagcaccgcaaactgctggaagtgggggcacactgccgtccctggaaccgttgcagcatcggcatctgctacgagggcggtctggatgcggacggacatccggcagacacccggaccgcagagcagacagaacagcttaccttgttgctgatgcgtctggcaaagctttttcccggtgcccggataaggggacatagggatatgagcggaagcatcccgaaggcttgtccgtgttttgacgcggaaggggtgttcggatatttggaaaggtaatttctttttccaaggtttccttttgccagtgttcgtttctgctctcaagtagagagtgatactactggcagagggaagttttactaagatcatccggccggtaccgacacaccgaaacagactatcatatagataaaaatccttcctgttacgggttattgtataatccgcgtttatttttaaagctgaataaatcctgatcggataatcttctttattattaaagctccgggaacaagcgctctcgttcccggagctccccctgcacttttcacaaaggacaagggttctgatctaacattagtgccggctatgttccatttccggccggcagacggaaataacaggctgcaaaaacaaagttttttaactgctaaattactaaggaccctcatcgagaaggatcgttaagaacagcccgttttactaataggcattcttctcgccacggaagacattcgccaccgtcctgtacatgatgtaaaggtccagaccgaagctccagtgctccaaataccagatatcaccacggatacggccctccatgtcttttagttccttcgtttccccacggaaacccgtaacctggctccatcccgttatacccggtttcacaaaatgccgtaccatatatttattgatcagccttgaatattcctgcgtatggagaagcatgtgaggacgaggccccacgatactcatatcccccaacagcacattgataaactggggcagctcatctatattcgtcttacgcattatattgccccagcgcgtcttgcggggatcatgctccgtggcctgtatcctatcggcatctgcatttactttcatactgcggaacttgtaacaataaaactccctgccgttcagcccgttccgtttctggcggaagaacagcgggccgggcatggtcaatccggtcactatcgccaccacaatcagaataaccggaaaaagcgtacaaaggaacaccgatgagactactatgtcaaaggttcttttcagcaggcggttccccggccaacttaagggatcggggcgaaggcccaggtaagggacgttccccatgatgttgaacgacatacggtggtggagataattgcgcacattgggcacactgaagaaatgtaccagatggttctcgcagtaatcaatcagagaaacgatgacctctctgtcttttgagggcaggcagcagaacaggtaatgtacataatcatgtttctccagatattcctgtacctgcgccggctggcccaaatacggacattctaccgggaaagcaggattcgcctgaccgtcaaaatagcccacgaccgaataacctgtatcttcactgcccgacatctcatggtagatttccaggttgttgtccgtacttcctaccagtactacaaaacgcgtatgtttcttgctcatacggtaaagcctgatgagaagacgaagagtgaaacggaacgaaacaagacacagaaacaggaggaaaaggtactccagcatgaacagggaggctatatccgcatactttcctacagaaaggaccagaccgcccaggaggacaaacaggaacatattctcgaacacacgtttccatatctgaagggaatgcactttcctccggtgaagcactactcctgaatggatggcgcaaagggcgtaacataacatcagtgtaagcatgacttgcagaacggtggttccaccaacctgcaggctatcccactgcatctcattggacagcttgctgaaaagcaggaatagcagaccgcaaagaaaggtctcggtgacaatcacaaaggtctcgatcaagtggttgtaggatgctaatttgtctttcatagtggtatggggggtaagtttaaagatgtatgccgtattatccccaactgggattctcattatctgttcttatacatcgactcataatatttttcatattcgccactggtaatatgatccatccattcctgattgtccaaataccaacggaccgttctctctataccttcttcaaattgcaaactaggctcccatcctaattcgtgtttcagtttattgctgtcaatcgcatagcggagatcatgacctttgcggtcggtcacataagttatcagacactctgaagtgccttccggatttcccaacaaacgatccacggttttgattattacttttatcaaatctatattcttccattcattgaaaccaccgatattatatgtatccgctgttctgccctgatgaaaaataagatcaatagcacgggcatgatccacaacatacaaccagtcgcgtacgttctctcccctaccatataccggcaatggttttccatgacgtatattgttgataaaaagcggaatcaatttttccggaaactgataaggaccataattgttagaacagtttgttacaacggtaggcataccatatgtgtcatgaaaagcacgaacaaagtgatcactacttgccttacttgcagaatacggactatgaggctgatatttggtttcctccgtgaagaaggtcccgtcaaattccaatgccccatatacttcatcggtggaaatatgatagaaacgtttcccctcatacttttccggcagggattcccaatacaacttggctgcctgaagcaaagccaatgtacccatcacattggtttgtgcaaaagtaaacggatctttgatacttctgtccacatgactctcggcggcaagatggataataccatccacttgatatcgcaccaataattcctgaatggttccaaaatcacaaatatccgcctttacaaaaatatagttcggtttgtcctctatatccttcaaattggccagattaccggcataagtcagtttatccaagtttataatgcggtattccggatacttgtttacaaaaagacgtaccacatggctgccgataaaaccggcaccaccggtaatgattatattgcgtttgaatgaatccataatttaaaatattgttttaattagttattgttgagtttccaattccagcatacatttctttagagaatctttccaataagggatagtgataccaaaagtttccttcacttttgttttatccagcaccgaaaaatgaggacgttccaccttactggggaactcatcgctgtgacaaggctgtatgtcacaattatttccgctcaattcacaaatttccttcgcaaaatcataccaagaacataccccttcattgctgaaatgatagacaccttgacgatccagcaagttctcttcgattatgttatagatcaaagcagccaaatctccggcataagtaggagtgcctacttgatcaaaaaccactttcagtgaatcttttgttgaagtcaattgccgcatggttttcacgaagttcttaccgaaaggcgagtaaagccaagctgtgcggaaaataagatatttacatcctgcttttaccaaagactgttcgcccgccagtttggtttttccatagacacccaacggatcagtttcccaagactcacggcaaggaatgtttttatcccctcggaacacatagtctgtagatacatgaataagcgtggcacctgtttctgcggcagcaacagccaaattctccacagctttgttattcagcaaatcagccatagcaaaatcatcttccgccctgtctacattcgtataagcagcacaatttacaatcacatctatctgctcctttttcaacatattacggacagctgtcgcatctgtgatatccagttcatttacatctgtaaagagataacgattccggctgtctaatgacaccctgcgcatctcattgccaagttgaccattggcacctgtaacaagtatattcatcattcgtatagattaatagtgtagtcaaacggagagtcatagtctttcaacaaaggatgtttcaaatccttctcacttaaaatggcctcggcaacgggtattttccaatcaatacccagactttcatcgcgcagctgaatgccaccatcagcttgcggtgcatagaagttatcgcacttatattgaaaaaccgctgtttcactcaatacggcaaaaccatgggcaaatccacgggggataaagaattggagatggttttcctccgtcaattccaccgcaacatgctgcccgtatgtaggacttcccttgcggatgtctaccgccacatcaagtacggcaccttttacacaacgcaccagcttgctctgagtataaggcatttgctgaaaatgcaacccacgcatcacgccatacgatgacatactctcattatcctgtacaaaattgacaggcatcaccttttcattaaactcccgttgagaaaaagattcaaagaaatagcctctttcatctttaaagatgcgcggttcaatgaccaccacaccttctattcctgtttttataacctccatatcttaatctagattttctttgcctgtacgttccacttcatcaatcactttgagcagatactgaccgtattggtttttcagcatcggtttggcaaggtcacgcatcttatctgccgttatccagcctttgcgataagcaattccttccagacaagccactttcaaaccctgacgtttttcaatgacttctatataagtcgaagcttctgccaatgaatcatgcgttcccgtatccagccaggcaaaaccgcgtcccaacgtctgtactttcagttcacgatcttccagaaaacgctggttcactgtcgttatttccagttcgccacgtgcggaaggtttgatgttcttggccacttccactactttgttgggataaaaatagaggcccaccactgcataatttgatttgggctgttccggtttttcttcgatgctcaggcagttaccttccacatcaaattctgccacaccataacgttccggatcgttcacccagtaaccgaatacagtagctttttgttcttcttccgccatacgcacggcttcacgaagaagagaactgaaaccgttaccatggaagatattgtcgcctaataccaaacatgcagaatcattaccaatgaatttctctccgataataaaggcttgtgcaagaccatcgggagaaggttgttcggcatactcgaacttcacaccatagtctgatccatcgcccaaaagacgcttaaagccgggcagatcatagggagtggatataatcagaatctcacggatgcctgccagcatcaaaactgaaatagggtagtaaatcatcggtttgtcaaagatggggagaagctgcttgcttactcccttggtgatggggtacagacgggtaccgctaccaccggcgagaacaattcctttcatacgaataagttatagtgtttgttattttaaatgtactttaaatatcactccgcctgacaaatgcttacattctgtcatttctaccacagcattaatataatctttccaaaaactatattttaacccacagtttatggtacgactgtcgtattcagccattacattaagattgtttaatgccttcacaaagaaatttgtacccgatagataaaaatgaaaatttactccaacagccggaccgtttaaatgatagtctttccgtttattgtataaataagcaacatgaatgcctagctctcccctatttttgaaataaaaatgcttagtaccagctatataatatcggttccaatgtccattacccatctctcctactccaccaatgccataatcatctttatcagaatttcctaatatatcattggtacttggatcattcgcgcccaatacaatctgaggagtccattctttccaccacccttctttccatatacgcaaccgccctgaaaactgtcggtcctggttacaatatttcccccaaacggaaggtgggaaataagtactaccatgttctgccttatgcaaggtacaagtatatccgatttcgagccaaggaaaaatggtgatattaatgtagtaattaaacgtatgataattccaatgggcaggagtagcagccacatccaaataagaagctccgaacaggaatgtcttatcccgttgcatatcggcagtaggcatgtgcagaagtccggtggttccatacacatactgagaaaaaccttcctgccatatcatacacagcagaaaaacaaataaaattttcttcattaaaacaaaaggcaggaaaaacaacaatcaaccttgttccttttcaaatttatcacgataaaaattatagtttaaagaacggtatccggagaacagtctttttaaataatattgattggcaaaatgtacacttgtcaaacaacgcaacaatctataaggcaaattgcttttgccttcatccaacaacaccattaggatgaatgccgtttcctcttgtgcggaaagttgtctatactctttttttgccaaaacctaattattcatgatgatatcatgaacaaaggtagcaatttattgtttctgagaaagtaaccaataaaaatatttttcgtgtttatctatcaaactttcccatgagtattcgttccgaatttcttgcaaattgttttcaataaacttattacg

SEQ ID NO: 3902 - DNA, 11176 bp, Unknown
  gut microbiota DNA sequence
aaaaaagttttttccgataaaaaccgctatctttgtgcgcaaggaaaacagttattatactatgaatcataccgtcgaagacttgtctttgcttaatgctctccgacagggggatggtaatgcttttgaccatttattcagaagatactatcctatgctgtgtgcctatgcccaccggttggtgtcgctggaagatgccgaagagattgttcaggaggtgatgttatggctatgggagaatcgtggggatttgataatcgagtcttcattgaatcagtatttgttcaaaatgacttatcggagggtcttgaaccacttgacgcgggaacaggtgaaaaccaaggctgaagctgccttttatgagcggacacaggcggcattgtgtgaagtggactatggtcgttttgaggaattggaccggaaaataaaggaggcgatggctgctttgcccgacagttatcgggaggcctttgtgatgcatcgctttaaggaactgagttataaagaaattgctgaagtgctggatgtgtcgccacagactgtggcttaccgcatccagcaggcattgaagctgcttcgtgtttccttaaaggattacttgcccatgctggtatggttggtgggctgaaaagtacctcccccggagtttcccctgttttttctttcaaatccttcagcctcttcgcaaacgcccgtcaataaagaaaagcggctgaaggatttcctcccggaattccttcagcctagtgtagaagtttcagctctttatggtttgagcttcgtttgtagaagttttctattatattgtttcgttgtatatttactttattgtcaggtccgtgtcgtttgttgccgatacgttttccgtttcgttctctggttcgggcaatttctcttttccgtagaatcccggcatcggctcatagatggggttgcgcggaatggagatattgcgcagttttttatctttcgccaactgagcgatataacgtcccgcggtagctcgtgtcagtccgcataacgattcaaacttccggcgtgtcagcacgctgtttgtcaggaagtattccgtcagtgcctcgtctatactctctcttgtcaccggcatggagtgcggcttgtattttgaacgctcggtcttgacgtcgctcaactgatgcttcaggtatttgtccgcacggaatgtcaccgatttgaatttcaccttgttggcacgtgtggagctgggtgtccgtgtctcggggcaggtaagcgatatatggaaatatcctatcccttcgatatgtacccgggcaccgtctttcaagtagtaggccagtttctcgctgagcgagatgatggttgccttgatgtccgccacggtgagcgaggagccatactgtatttcccgcgccagatagtcggtgttgatgcgctgccagtttactacacgggcgtgatagcgcttcttgcgcgtacctatcgtattgggtgattcataaaattcaaatttgatagccattcgcttatttgtttttatccggttgtttatgctttcttgtacggaagagtttgctgcaacttcctttcaagttaatcgtttcactttagtgatgaaatcatatcactctagtgatgaagttatatcacttaggtgatgaaatttcatcattctagtgaaacgattaacttgacggtgcaaaagtatgaaatagtcttgataaaaacgaataatttcccagttattttcgcttagtcacttttttgcggtagtgtggggtaaatgcttgtaaaagggtgttttgagtgttatctttgtgatattacacaaccccaaataatgaaaaaggatgaaaaaattagtggaaaaattactgagttggtgcaaaaagagtatgaaaatgaggagatgcgtgggaaaaagcacggctccggttaccgggcagtcggtggggcaaaccggaaatgcggagggggtgttgccttcaacggctacggaaacggtggataaaattgttctcccagcggctgtcgaaacagctggcatggcagaaactatcgatgaaaaggcggcttttggcaaatcggggcgcaagaaaccggagaatatgctggaggccttgcagtgctttttgactgcacggtataatttccgttataaccttctcaccgaacagacggagtatcgtgggaaagagatgccggatgaagagtatgccatggtggctcaacgtgatttgaatacattctgcttggaggcgcattccggcggcatcaactgctgggataaggatgtgagccgtctgctccattccagaaaggtggaaaactatcatccttttctacattatatgagccacttgcctcaatgggacggggtggatcgtgttactccgctggctgtgcgtatatcgcgtaagccgatgtgggtgaaagggtttcaccgttggatgctgggtgttgccgcccaatggctggggcaggcacaggattgcgccaatgcggtggcgcctatgttggtgagtcgtgagcaggggaagcgcaagtcttctttttgcaagattttgatgcctaaggaacttacaccttattatatagacaagttcgacctgacgagcgagagtggatgtgaacagaaactttcgcttttcggattgatcaatatggatgagttcgacaagtaccgtgccggacagatgcctgccttgaagaatctgatgcagatgaccacactgactttccgcagggcacatcgttcggcattcagtcatctgccccgtatcgcctctttcatcggtacgtccaatatgacggatctgctgactgatcccacaggaagccgccgtttcctctgtgcggaagtggatgataagattgattgtacaccgcccgatcatgcgcagctgttcgcccagttgaaagcggagctggccggaggagagcgttactggttctcggaagaggaagaaaaggagatacagcacagcaaccggaatttttataaaatgcctgccgaacaggaattgtttttgcgttgtttccggatgccgcaggaaggggagttgttcaagccctataccacgacggatttgttcaattatttgcagaaacattatccggcggccatgcgtggggtgactccgaaccggttgggcaggatgatggttgcattagggatacagcgtgttcataccgagtatggcaatgtgtaccggctggtgaagctgaaggattcttccgcagcctgaaacctttttccggtgtgatccttcagccggaacgcccttctgcaaagggtttgcggaagggctgaagcttttgaaggatttttcagggggaatcgtataaggagaaataaatgaaaaagattgcttggcgatttgtttgttcgacttttttagtggtggtgtttttatctataaaaacatgggaagtgacagtttacatatttattacattgtttcttcttgggattgtccggaaacgagatgctccaagtttcatgctgctccgggagatactttgcagttgaaagtttctttccggtcggacagcataggggtgtttgtccgtgaatttcatatctatggcaactttccctttttgccatttggtctgacggtggagggcgattgcatataaggcaagctcatagcatataagagaaagaattaacaggataattttgtttttatcgaaggtttattgctaactttgctctaccatcgtaatatggatgaaaagcacaaccgatatacaaatgagcaaaatgcctggaaattcttttaatgatatctatacctcttattataagaagtcttttttctttgccaaatcatacgttcataatgatttggcggcagaagatattgcctccgaggcattaataaagttgtgggaaaagttgaaggccgagcctgttgaagagaaatatatcttaccattgttactgacaattttgaagaacaaggctttggactatctaaagcacgaggaggtaaaacgcagtgcttttgaagtgatggccgactggcaacaacaggaattgtctatccgtatgtctgccttggaagcgtgcaatcctgatgagattttttcggaagaagtggaaaaaatcatcagtgctactttaagtaccttgtcggaacagacgcgacgagcatttattttgagccgttttgaaaataaatccaataaagagattgccgaagagatggaaatctctataaagggggtggaatatcatatatcaaaagcattgaaagtactgcgggtgactttaaaagattatcttcctttattttatttcttcttttattattaagcctgaccggatggggatacggatgtttttgaggacaaaaatgatttttttatatttttcttcattttcttttagggtagtttcttcttgagtcgtttctaataaaacagcatagaatatgaatcctgaattattgcaaaaatatatagccggaaatgctactgaagccgaaaagcagcgtgtgaccgaatggatacaggaaaatcctgagaacatgcgtgaatatatggcacaacggaagttgcatgacatggcattgtggcgtacggaacctgtggcggaggagaatagccgggaaaggaaacatttctcgttacgcggagtatgtatggaagctgccaagatagcagcggtattggcgatcgtcttgttgggtacacattattggacaggaaaacatcaggtaccggaagacaaaacatggcagtctatttatgtgccggcgggccaacgggcggaattgatgttggcggatggtacgaaggtttggttgaactcacgcagtaccttgactttcccgggaagtttcaaagggaatatccgaaatgtgaaattggatggtgagggttactttgcggtgacaaagaatgtggaacagccttttattgtagagacgaacaagtgtaatgtgaaggtgctgggtacagagctcaatgtaatggcttatgcagcggatagcgtatgggaaacttctttgttggaaggtgctgtagaaattttagtgcccggttcgaataacagtggaatgaggctggaaccgaacatgatggccagcttgaaaggcaacagactggtgaaaggacgcatcaaggaggtcgattattttttgtggcgtgagggcttgctttgtttcaatgatatatccgtacgtgatatgatagagaaactgaaactgtattatggggtggatattgtagtaaataatacccggattctaaagaaccgttatacaggtaaattccgcacgaaagatggggtggaacacgtactgaaagttttgaaactcaataataagtttacttatacaaaggatgatgagacaaatgtgataacaattaattaacccttaaaaaagaatatgcctatgaaataacacacctggtctaaaaaagaaatgggatagtgctgcaacaccatcccatggaaatgtcaatgacgcattgacaattttttctcaaataatcttaagttgaacctaaaattagtaatgcaaatatatgaaaaatattttgtatcaggaatctattgtagaaattaaacatttattccgtatgatgagaaacacactcttagccctgtttgtctttgccggaacagcttttgccactgagtcttattctcagacaatgaaggtgactgttgtggcggataacgtgtcaacaggcaaggtaatcagtgaaatagaaaaacagacagattatctgtttgtgtataatgtgaacgaggtgaatctgaagcgcaatgtgaaggtgaatgcgcagaacaaatctgtagccgaagtgctgaataaggtttttgaaggtactgatatttattatgccatggagggtaagaatatcatgctgatgagcaaggcgaaagacggggaagctgtccaacaggcaaataaagtgacaggtattgtgaaagatgcgaatggcgagccggtaatcggtgccaatgtaatggttaaaggtcagtcaataggtacgataacagatatagatgggcggtttgtgttggatgccccgaaagatgccgttttacagattacgtatatcgggtatgtttctcaagaagtgaaagtttttggaaagaaagaacttaatgtagtattgaaggaggatacagaaactcttgatgaagtggtggtggttggatttggtacgcaaaagaaagtgaatctgacaggagctgtaggacttgctactgctaaagaattagaatctcgtcctgtgacttcagctacacaagccttacaaggattggtacctggtttgcagatatcaacaagtacgggtgaactggacaagaccgcagatatcagtatccgtggtacaggaactattggtgagggttccagcggtgcacctcttattctaattgatggaatggaaggagatttgaatacagtcaatcctcaagacatagaaaatatttctgtattgaaagatgctgccgcatcatccatctatggttcccgtgcccccttcggcgtaattctggtgactaccaaatcgggcaaaaaaggaaagacttctgtaaactataacaatagcttccgtatatctactcctgtaaatatgccgaagatgatggattcctacacttttgcaaactttatgaacgccggttcgcttaatcagggtggtgggcttatctttacagaagacctgatgcaggatatgctggattggcaagctgccggaggtggaagcacggggggagtaaaagcttcatccaacggtcaatggggtaaaccagactatgatccatttacaacagcttgggctaatacaaattggtatgatgaagtttacaaatcttcaagtttttctcaagaacataacgttagtctaaatggaggaagtgatattgtagcttattatgcttctttcaattatttggatcaaggaggacttttgaaagctggtgacgatggacttcatcgttacaatgtaacagctaaaatcaatgctgatttgactcaatggttaaaattcaattacagtacccgttttactcgtaatgatgtatggcgtcctaccagtttcaacagttctttttatgaccagttaggaagagctacttggcccaatatgcccgtaaaagatcccaatggctattataccaataatggttggactaatccagtccaaaatcttgttgaaggtggaaaacgtaatgcacaaacagaccgtctttatcaacaagcgtctttagtaattgaaccgatcaaaaattggattacacatgtggagtttaattacagtataatgaactcatcggtaaaagaaacttcaattcctacttataatcatgatgtggaaggcaatttaatagatactcatggtacgtcttatctttatcaagatcagactaaagagaactatctgaacctaaatatttatagtgagtattcccaatcttttaataatgcccataatgcaaaagttatgcttggcttccagacagaagatatgaaacaggaattttcttctacaaaaaagtatggtgtaatgatgggggggatgccttattttgatgtcacaaccggattggacggacaaggtaaccccaaagcgacagaagcgggtggaaatgggaaaagatggaaaacggcaggtttcttcggtcgcttgaattacgattacctgggacgttatttggcggaaatcaatatgcgatatgacggttcttcccgtttccgtcgaggaagtcgctggcaatggtctccttcattctctttaggctggaacatcgctcaggaaaaattctgggagtcgctgacagatatagccaacacattaaaattgcgtgtttcttacggtgaattgggcaaccagaatactacagcatggtatcctacctatcgtgatatgatactgaagtcttctaatggaacatggttgcaagatggagtgaagcctaatacagcagagccgggaaatttggtcagcaattctttgacttgggaaaaggttcgtacttgggatatcggttttgattatggctttctcagtaatcgtttgacaggtagttttgattactatattcgttatacggatggtatggtagggcctgcacctgaactcccatctattttgggtacatctgctcctaaaaccaacaattgtaatttaagaacgaatggatgggaactatctattggatggagagaccgtttgaaaaacgggtttggatatagtgctaatttaactctttccgatgctaaaacaattgttaccagctatccgagcaacgcaacaaatactatcggtttgaacaaatacgttgaaggacgcgaagtgggcgagatttggggattggaaacaataggaatagcaaaatctgaaaatgaaatgcaagcccatctcctttcccttcctaatggaggacaggatgcgattggttccaaatggtctgccggtgatattatgtatcgtgatttgaatgaagatggaaaaatatctaaaagtgcgggtacattggatgatcatggagatttgaaagtaataggcaatagtactcctagatatttctttggtattgacttgaatgctgattggaaaggattcgacatacgtttattctttcaaggtgtaatgaagcgtgatttttggggtacaaataatttctgtggttatttgtttggtgcttatggaactcaaagtatgtggggggctcgtggacttaaggaacatgaggattattttcgtgcagaggatataggattgtcaggtcataccattcctgcaaatcttgacgcttattatcctcgtcctattttctccgaaggaggtaagaaccaagaaattcagacacgttatttgcaagatgcatcctatatccgtttaaaaaatttccaattaggttatactttcccagcaaaatggatgaaaagtatgggtttgaccagatgccgtgtgtttgtttccggagaaaatctttggaccggaacatcattgtcttctttgtttgatccggaaacaattagtggcggtaatggtggtaatgcttatccgttatcaagcacctggtcttttggcttaagtttaacactttaataatacgtatacaatgaaaacaaaacatatattcttatctgtactaatcgcttcggcaggatttgcatttactgcttgcgatgactatttggatgaagtacctgaagcatctatttccccggaagtatattttacagaggcaacccatattcaagcctctgcagataatttgtactctgatattcttccctctcacggaactggaaatacatacggcatctacaaagatgatgcaacaacggacaatcaaatagaagttacagctcccaatcgttttacttccactttgtggaaagtggacaatgcggaaaacagtaattggaacttcgataaaatatacaagatcaattttgtattatcgaatgtgttgcccaaatttggggataataatgctaatgggaacgacctgagcggtaatgccaataccatcaatggtgaccttaacagcataaaacactatatcggtgaattatttttcctacgtgcttgtgaatactttaaacgttatcagttgtttggagattttcccataattatctacccattgccagatgacaaagaagcattgagtgaagccagtaaacgatcaccacgcaatgaggtggctcgctttattctaagtgatttggataaagctattactttattaaaagctaaaaacatgccgacgactagaattaatgcggatgctgccattttattaaagtcgcgcgtagctctatttgaaggtacttggttgaaatattttaagaatacggcttttgtacccaatggtaacggttggcctggcaaggcaaaagattacaattccacttatcaatatcccagcgggaatattgatagtgagatagattatttcttagaaatcgccatgacagcttctaaagatatcgcagaacgctacaaaaataagcttacagaaaatacaggtaccctgcaacagtcaactagcgaagctgcaaacccctattttgacatgtttgctcaagaagatttatcttctgtcgatgaagttttgttatggcgcagatacgcttataacttagtacaccacaacgtaaatgtctatgctagctggggaaacaatggcgtaggcgtcacccgtagctttgtgaataactttttgatggctgacggcactcctgtttatacccacggtgattatatgaacggagacggatattatatgggagacaaaaccatacacgacgttcgtcaaaacagagacagccgattggttatctttctgaaagaccccggacaacataacatcttaataaaagatgtggttggtgagacagccaatgttgaagaaacttatccattgattaccattacagatggtgcccgtcgttatgtaactgggtatgctttacgcaaaggaggagctttccatcagaaatattattccaattcaaaaggatataccgcctctattgcttatcgtgcgacagaagccttgttgaattacatggaagccagttatgaaaagaatggtactttggacggaacagcaaccgaatattggaaaattattcgccgtcgttctcatgtagatgaggattttcaaaagaccattgctttaacggatatgagtaaagaggctgaaaatgattggggagcgtattccggtggtaaattaatagacgcaactctctataatatacgtcgtgagcgccgatgtgaatttatggcggatgggcttcgttatatggacttatgccgttggcgtgctatggaccagttgattgaacatccttatataccggaaggtttccatttatggaatacccccatgcaggcttggtatacagatttgctgtatgatggatcagacgcatccaatgtatcttcacctaatgtcagcgaatacttgcgcccttaccaaaagaattctaaacagacctgttataatggttttacttggcgtatggctcattatctgcaccccattatgattaagcagtttttgatcaccgcccccgataacaaaacagtagagaattctcctctctatcaaaatccatattggcctatagtaccggatatgcctgctgaaaaataagtttcagggcattctaatatcttatgattggaatgccctgat

SEQ ID NO: 3903 - DNA, 57639 bp, Unknown
  gut microbiota DNA sequence
actaatgttagtagacctacttcaagtcgtgtcagtagtgccgataaagttaatagtacattgtcattttcagcaggtggttttagtacaaagtcatttaacggcagttccaatcaaacggttaatattccaacacataccagccatttgactaataatagtgggttcattactagtagtgctagtatcagtggtaatgctggtagtgctacaaagctacaaacagccagaactattaatggtacttcatttaatggtactgctaacattactacggcaaattggggtactactagaagtatttatatccaagatgctacagctactaataccagttcggcagttagtgtaaacggtggtggtaatgcttatttgaaattaccaactaacattaaagtcggtacacttacagctacaggtgaagtgactgcttattctgatattaggcttaaaaccagcattcagccattagagaataggggttacattaaacctgttacatataagaaggatggtaaggatagtataggattcatagcacaagaagtaagagaattatatccagaactagttatagaagataatacagaagataaatatctatctgtcaattatgcacagtatgtagcagtattacaagcacagataatagaattgaataacagagttaaacagttggagaaatggcattatcaagtacaggaataacaacaagtctggtaggaaatgcaatagggagcagcagcaggaatgttggtactctatgcagttcctcacttataaatgagtggtctaaatggaaacctatatcaagtaatgtaggtacaatgacactagcggaattgaagaacaggaattatggtataagcatactgtcagccaatacaccagattcattggtgacacagataaagaataatagtaatctgggatataagtataataaacctataggcggtgctaacagtccttataggttgggagattttagaaactatgaccattcggcagcgatgcctgttggagcaagctataaaaatggtgacagtgttaatgttggtggtgttacttcatccaatcacgcaagctatgagaaagtattgatgggtattgaaaatatggatggtggggattctgcaacttatctcagtaaagataatctgtatacagtttatgataatagtgggaataagataggcttaaaaagaggtgcattagtgacagatggtacaaatacagtatggtatagtgataagctgtactggtggactacacagatgcagaagtttaaaggtaaaacagtgacagtatatgagttttataccaatgcaaccaatacgcctactaatgcttatgtagctaatgccaatgacaggtttttagcactgccagaaccagtatatactatacaggttaagaatgatgtaccagcaggaagcaagattgttaatactatatgtactgccaaatttactaacagtactaaccagtatgtaagttatgaaattaaatttagtgcagttggcgcgacttatagaggtggcacgattacaaatgttagagcagtattaagtaaggatagaaatggggttaatgttattgcaagtacattattaagtaattctctctatattgcagatgaaacaacttctcaaacattcacaggacaattatataatagaggtggttcaatgatggcgtatttgttgatttattataataattcaattcaatacacaactggtatattagccgagatgccagatatacagtaagcactttaaatttattaagactatgacaaagaagatgaaattaaatgtacagttggtggtagcagccttattgatattggtgggctgtgggctactgattgcgggatttacagtagcaccattaggaattatccatagtagtgtactggtagcttttggtgaaacttgtacctttgctggtgctctattcggagtagattatcattatagggtaagacaataaataaatttagcctgtagtcctttattggattgcaggctattttattagctttgcagtatggaatatatagattactattataaggaaattcagtattatgctatagttgaaggtgacagatgttattctgtgaagccagataactttgctactgtttggttggcaggaaactatgtgcctacagtagactttgatacctttaatgagcagatagaatttgatggggacaaagaaaaactgtatatgttgtgctgctatataatatatgtaatagaacagcattactttgtaaagctaagacctacggctaaagagattaatgatgaagtagataaaatgaatgaagtagccagtataaccattactgataagggtggtaaaacattcacatttaataccgaatatgcgatgaagaatgtgatggatactattcgggctaatacgactgccgatagttatgaaacggacaaaatatgtaagttaccagaagtggctaataacacctacatacaaagtatgttcgctatagaactggctaacttcctgcattactactttcctgtaaagaggaagaaggatagtctggttagcaccaatgaacaggatatgattctaaagattctgcatctatttaaattaacaccttatttagttaaacgaagtcgatttagacagttattaatgctggctgataaattcaaggagaatctaagcggataaacttgcaaggtcagttattacctgtaacctttataaaatggaagcagtggaatactaataactggctagaagtagaatatgaaatgctaaaagaaggagaaactgttagctttccacttttagaaagtaacaattaattctgtggtagtctgtttaatgagccataactttgcaccagtaaaacaaataactggtgtgccagatacctaaataacttccgcagggcagcggtgataacaatgataagaaaagaagaagtagcaaagtatggaacttggtttggtaaatcaaccccagaccacattattaaaagatgtgatgaacagatagccaactgtcagaaatggattctgaatctagagcagctaaagcaggaacaactagttaagaaggcagaaggtcataaggaagaattaaaagctatgttggctgcaatgggtgaagaagaaagaagtaattttattaatggtttaaacagatgagtatggatacacaaacaaaagaattaatccagctttggaatttactggaattggggtttgaattaaaccttagatatgctgatacaggcattattaatgaaggtgatgaagatgtagttattaatgttactgcaatagctgaaactgctgaacagtggaatgaacctatagagcctaaacaggtatctatgtttgaagctgttggtctagtagctgtagtcagtttggttaatgattatatggaagaacctgttgcatacaaaagaggttctgttaattcattagtaaagctgattggagataagctattacagacttttgaagggaaacaagttaaaatagatttttaaatcaatagccagttatcggtaatggtagctggctttaaatacttatggtgtatgatagtagatagtatgacttatgaagaaataatatctgagtttaagaaggactgggagaattattttccaaatgttctgcctagatttatgaatgatagcaagtatcggagatatatgcttaaagaagccaaggataatgttcctgtattctttaaaccaatagaactaactagtaatagaggaaataaatatattttacagataaacagtaaaggtaggtctgattacaaaagaggtgggctaatgtttttattgtttatgtactatcatagaccagaaggtatatatgcagtaatgagatgtccgcaatctagctgggatttgaaggaagcatcttataatatctatattccgcatctgtttgataggtacagagaacgagaactacaggacattcataaaccaaagatgcagactattatagagttctttaagaataacggggtaggtagatatatagatgtgactaatgataagtatgatgataatatattcttcactattactaatggcgtattactaggaggtaagttagatgatgggaatactttattaaggacttatataacctttgatatgcttagaggtgagcagattgatgataaggaaagattaatagctagagtaaaagagtatatagagaatgaacagtaaacaacattaaatactaataagtatgagaatattagaaggaaaagaattagatgatgctttaaagcagatgcaagaatgggaagctaagaaagctaaagctattgaagatgctttccaaagagggatagcaacaggtgaagatattactactttattatggacttatacagatagtaatctcagatgggaactatttgcagaccttgctgagaagggcaaactatctgatgaagcctttaataaaggactggctatagcttggactgagggcagaggtacaggggattttagggctatacaatactttatgaggtgtaagaaggaattagtgatgaatgaagaagaactagcctattataatagtttgcccgataaggttactttgtatagaggttgcagtatagaagagtatgaagatgaagatggagatagctgtttcggtatttcttggactaccagtagagatgtagcagagttctttgcatttagaaatgagcaggaagatactgctgtatattctatagaggttgataaggaagatataaaggctgtattcttatctaggaatgaatttgaagctatatgttttggcggtgatgaagccactttggttacagatgaaccaacagaactatatactaattatatggaacgaaagaagcaggaactagatgaatttatgaataagtaatgaatgaaggggaatggggtaatattttaagctgatagtgctttaaaccccagcctaccctactttccacgaactgtagaatttgaatatctaaaaccttaatatttcattacagatacattttgctagactatagcccattaagacacatttaaagcgtaaatctatagctgatggtgcaacatatacaacaaaagggaagctaatcacctcccttttgtgttaatctaagttaaaatttagattatgtattttataactagttgattatcagtgttattcttgactgtcgtcattatcagcaggtttcatgtttgtataaacggtctgaacatcatcaaattcttccagacgctctaccatcttgtctagagtttcacgttgttcaggagttacatcttttaagtcattgggaatatatgtgaaatcaccacccacttcttcgaaaccacattcttccaagtgtttctgaattgctgcgtagctcttcggatcaccatagatggtgatagttccttcttcttcatcttcgtcgaactcatcctctacattatagtcaatcaaatccaggatcagttcttccatatccattccttctttcttcttgaaagtaaatacacatttatggtcgaacaagaaagctaaggaaccggtagtacccaagtttccaccgaatttgttgaatactgaacgcacatctgctacggtacgggtagtgttgtctgtcaatgtatcaacaaatacagctactccgtgaggaccatatccttcgtaagtcatacctttgtagtcactggtatctttacccattgcattcttaatggcgcgttcaatgttatccttcggcatgttttcacgcttacaagtagcgatcacaccacgtagggtcgggttattttcgggttccggaccacctgcttttacagctatagcgatttgtttacccagtcttgtaaatgttttggccatgtggccccatcttttcagctttgtagcttttctatattcaaatgctcttcccattggattgtagttttataatggttatttttattattatcttagttttgcacctagtttgttttccaggttagcaatcagtttggacatgatcttgtcaatctgtttgtcgttcagtgttgcgctttcatcctgtaacaagaagctcactgcataactttttttacccggttccagattcttgccttcataaacatcaaacaattctacttctttcagcagtttcttttcagtctcataggctattttttcgatttctgcaaactgtatgttcttgtcaatcaacaaagccaagtcacgtttcacagccgggaacttggaaagttctttaaagttgactttagccgacttgatggctttcatcagttctttccagttgatttctgcataatatacctcattgtctatatcgaatgctttttgaatcttcttgctgatgatgccgaaggtggccaataacttgccgccacgtgtgtgtacgctgatggctgttgaatagatatcgttggtcaggttgccgaataccacgttgccgaaattcaatcccaaacgggtaaagatgttcagcacgtatgcttttaattcgtaaacactgctgttttcatcgggatgggcccatgaattgctgacgcgtttgccggttacccacaatcctaaatgatattcttcagcataagccgcaagcactttttccgggtttttcttttctgcattataaaaatagcagttaccgaattcaaagaatttcaaatcggcgttcttacgattggcattgtgctggatactttccaaaccaccgaataacaaagtttgacgcatcacgttcaaatcgttactcaatgggttcatcaagtaaaccaaattttcgttcttgtatgtttccgacccttcgtaataggaagcggcggtcagtgaattgttcagtatttcattgaaaccacaacctaccagttgctctgaaatcagattttgtaatttctgggagtaatccacttcacctttggtggtcaggctggatttcaaggtagtaggaatctccacattattatatccgtagatacggagaatgtcttctactacatcgcaatcacgttgcacatccacacgataggggggaacttgtaaagtcaagccttcgggtgtttcgttcacaatcttcatttcaagactggtgacaatgctctttatggtttccaccggtatggtttttcctatcagtgagtggactttctcataattcagctctactgtaaaatcggctatcggggcagggtagttgtctttaatttcagaagaaatagtacctcctgccagttcttgaactagtaaagccgcttctttcaatgcataaatagttccgttggggtcaataccacgttcgaaacggaaagaagagtctgtactcaatccatggcgacgggctgttttacgtacccaagtcgggttgaaataagcgctttccaaaaatacatctactgtctgctcggttgttcccgaatccagaccaccgaatacgccggcaatgcacatcggttcttctgtgttgcatatcatcaggtccttgtcggataatttgcgttccacttcgtccaaagtaacgaatgtagtaccttcggcaacagtcttcactacaatcttaccacctttaatcttatctgcatcaaaacagtgcaggggctggccgtatgcgtgaaggatgtagttggtgatatccacgatattattgataggacgtactccaatcaggcgtaatttgttttgcagccattcgggactctcttttacagttaccccttttatggaaactccggcataacgcggacatgcttctgtattctctacttcaatggcgatgtccatatcatggttatccactttaaacgcttctacagacggacgttttaaagtggcttgtttgccgttttgaatcaggtaggcatacagatctcgggccacgccgtaatgtgagcaggcgtccgcacggttcggggtgatatccacttccagtacgtattcgcttttgatattgaaataatctttagcgggagtacccggaacagcatccgccggcagtacgatgataccttcgtggctgtttccgataccgatttcgtcttcggcacagatcatacccatagattcaattccgcggagctttgatttcttgatggtaaaacattcttcgccatcgtatagcttggtgcccaatgtggcaaccaccactttctgtccggcagctacgttagcggctccacagacaatctgtaccggttcgccttgtcccaaattcacagtagtaacatgcatgtggtctgaattgggatgaggttcgcaagtcagcacttcgccgatgacaataccttccagaccacctttaattgtttggacttcttctacgcctccggtttccaaaccgatggaagtcagcgcctcggccacttcatccggtgtcaaatcgaagttgacgtattctttcagccaattataagagatattcatatatgatattttttatgtatttccaaatgacctgcaaatttagtaattattttcttttatcctgttatttatccatcacagattactcagattaacacagatttttctttgagggaaataatccgtgttaattctgtgagggataaataaatgtcagaacggtaaaggtccttcgggaataggggcttcgaacggattattgtcggcaggtgcggcatcaggagatgggggaggtacactgttgccgccaccgttcattttggaacggataatacccggtgcctcacccggcataggcacgatgacatcatcgtccggattctggaagcgggcgaattcgccacggaaacgcagcagtacatcacctacggcaccgttacggtgcttggcgataatgatttctgccataccgtgcaagtcgttccctttttcatccgagtagattttatagtattccgggcggtggataaagcataccatatcggcatcctgctcaatagctccggattcacggaggtcactgagctgggggcgttttccgtcaataccctcacgactttccacaccacggttcagctggctcagtgcgatgatggggatgttcagttctttggctaaccccttcagtgaacgtgaaatggtactgacctcttcctgacggctaccgaatgacattccgctggcattcattaactgaaggtagtcaatgataatgatttttactccatgctcgcgtacaagccgtcgtgctttggtgcgtaattcaaagacggacaaggatggtgtgtcatccacatacatcggagcatcgtataattcttttattttataatccaattgtccccattcatacggagccaactggccgctcttgattttctcacccggaatttcgcacacgttgacaatcatacggttgactaactgtacgttggacatttcaagagagaacaaagccacagggattttcgcatttaccgccatgttctttgccatggaaagcacaaaagccgttttacccatagcggggcgggcggcaataatcaccaggtcggaattttgccagcccgaggtcattttgtccaatgcatggaaaccgctttccagaccactcagcccgtccgttcgtgccgccgctttttgaagcatctcatacgcttcctgaatgacagggttgatttgcgtataatccttcttcatgttctgctgcgagatttcgaacagttttccttccgcttcctgcatcaggtcgtccacgtcttgggtttcgtcgaaagcctttgtctggatgttgctggtaaaggtaatcagttcgcgtgcaagaaacttctgcgcgatgatacgtgcgtgatattctatgtgtgcggaagaggctaccttgccgcttagctgtgttatgtaaaaaggaccgcctgcatcttccagttcaccggtgctgcgtaattgttcggccacagtcaagatatcgactggttgctggcgtaaagccaaagaggtaatagccgaataaataagttggtgacggcgttcataaaaagattcgggacgaagaatctcacttactaatgagtaagcatctttttctatcattaaggctcccaatacagcttcctccagctcaggtgcctggggctgtaaatgtccgtattcgtcaacaggctttgctttcgaagttttgggagtacgtgtcatttttctcgtttctgccattgtcgtctgtttaaagtagggcaaagatagaactttttgctgagttggacactcgtccattcccaaaaataataaaagaaatatgaacctgaatctacggagaaatgaacaatctggacagtaaatggtttttttatatggtaaaatgaaaagtttgttctatatttggcgctctgtccggataaaaggtggcgtgcatctttgtagaacgggcaacaatctaacgaaacacactaaaaataactatttaaagaacagaatatgattacatttcctaatgcaaagattaatttgggacttaatattgtagaaaagcgcccggatggataccacaatctggaaaccatattttatccgataaacctgcaagacgctctggaagtgacgcggcgggaaaacaatgacaaagaatacactttacacataagcggatctcctttggagggtgaacccgaagataatctggtagtacaagcctacaagttattaaaaaaagactatcccggactgttgccggtagatatacacatgtacaagcatataccggcgggtgccggactgggtggcggatcatcagatgccgcttgtatgataaagcttctgaatgataaattttcattgggactcagtacggaacggatggaggaatatgcggtaaaactaggggcagactgtgcttttttcattcggaacaaacctgttttcgctaccggaatagggaatctgttcgagcctgtggaattgtcattaaagggataccacataattttgattaaacctgatatctttgtgtccacccgggatgcgtttgccgaaataaagcctgtgcgtccggctgtttctttgaaagaaattgtaaagcaacctatggaaacatggaaaaacagtatgaagaatgattttgaagatagtgtcttcaaaaagttccctgagattgctgctataaaagatgaattgtatgatttgggggcagtgtatgccgccatgagtggctcggggtcttccgtctatggtattttcaaagcaccgatagagaatgtggaagataaattctgtggatgcttttgcagacagagagcgttggaatagtgtggcagatcagtggttagtgattagtggactgcgctgtcatgccgcaggtattaaccactaaccactatagtctatcttttacatagtgccttgaaatcacaataggtacatttttctatgatttctgtttgggtaaatgatttttccggattaaatatttcttctaataatccttgaagtcgttcacggtattctttttcatatttactgaaatcttccacagcctctttgggctttcgtggctcgcccatttgtataacgggagaataggtttctgtagcggcccgatgaatatagagaagggccggagctatcttcatcgttggttgcttgcggcacatgatggcggcatacaggaacgtctggaatacatagttggaacgtttcttgtccggaataaacagagattccacatggggtggggtgtctgcatcaccgcctgtcttgtagtccacaatacggagtgtgccatccttgctgtccatacggtcaataattcccccgatacgtgattttatgactcctttgggtgtttgtatgtcgatgggttcatccacttccatttccgatgcaataaaagtgaagggagcgtaacgtaaatcattttgtaaaagttgttttaaatatcttgcaataacggcagagttgataagttgtacgccgttatattccggtttctcgttttgcggaacattaaagaataatttcttgaatgctgtatccacataatcttgcagcttcacttcattgcgtagcaacgtttccaatgcttccttattaatgactttgccatgagtggtcaggtctttataaatatgttcggctgcataatggaaaatacttccgaatgtggcagaatctatttctgcactcacttcatcgggggcggagaggccggctacatacctataataaaattttaaaggacaatccaggtaataattcaaggttgatggagaaaattttgctttgggattggcacggacatcaaacaggctttgcatccggcgcatgacatccggggtcttttctacagtgataggcgaggtgccttggggggactgtccggcctccagaaactgacgtgtgatggggtgaggccattcaatcaggaattgcagcatgaaacggctccattcgccgcggttcagtccgtccgaactggtattgtacatcaaggtaatcctttctgcccgttgcagcagacgatagaaatagtatgcatatacggcaatcttatgctctatggtggtcattccgaaagctttgcgcaggttgtaaggaataaaggaagagtctcctcccgatttgggaagctgcccttcgttgaccgatagtaataccaagtggcggaaatccaggttacgtgtttccaatacccccatgacctgcataccaatggccggttcgccatggaatggaatattggtcgctgacaagaccttgaccagcaatcgccggaatgtttcgctctgtacggttaattcatcttcttctatcagtgtgcggaaccggttgatggtggtataggctttgaaaagcgactcccggtaaagttggttgaatgcatctgtgtcctcggtaccggaagtgtttgcctggtaaatgcctgccacttgctgcaaagtttcggacaggcgtatgcacagattcaggtttccggaaagcggagtgaaaagccgggtaaggaattcatctttacccaattcgccgggtaacggatagaaacggttgttccgggtcagttctttttccaacaattcggcttgaccggtgagttgccgggtataggggtgttttaacagtgtaacaaccgattgaaacgtgtagcggccgcttttgaaattaaatccgtgggtatgcaactccagtaaggcgatgaggaaactatatacaggagtttgcgataacggaaatcccatggtgatattgacatgttttacttctgccggcaatgaatggaggaccggctgaagcaatgcttcgttacacaatacgactgcggtttccttttccggtgtagtcagattgtttcgtatccattgaggcaggtaacgggcttgtgcattttcagtagaagatgcgatgtagtgcacctctttaggtttcgagagatttttgaataactcaccggacaaaggagaaggaaagtcgcgtaagttccggcggataaactctccggcttcatgggtgacggcttgtctgttttccttcatataaaattcgtcgtaatcccaataaaaaacagctttcccggcatctttcaattgggtgaacaacgtatgttctactttgttcagtacattaaatcctacaaaaacatatttctcgtatggaagtttgtccacatccagatgctctatgacgtggcggtacatcattccttcgtaggcaatgttttgagaagctaaggattcacggaaccctttgtagatgtttcccaatacgtcccataaagagataaaccgttctttcagcgctgttctccgttcgatggagaagttctggaagaactgccggatagcttcttcctgctcatcgtcaatgaaggtgtagtcgtccattatgttgcgcagatcctgtaaattggaaaacagtttgtcggtatccactttatttttgtcggcatcgtcaaaatcactgatcagcatttctccccaaaaatagaaatcatccagtgtttccgtactttgagtttcccgtcggaatattttataaagttcgcataccagttttaccggatcacccacttcccacggagaaaggctacggaacaattcgctgatgctgacgtatgcgggcgaccaaataggtgaatccgactcttgggcgagatactcattaaagaaaagtccggcacgtttgttaggaaaaaccacggctgtatgtgccaggtttccttccgtatgtttatataaatcggctgctaccagtttcaaaaagctttccattattctatttcctccagttcgttgttaaatacataccataaatagccacggatatgctcatatcccatatccgataataaatccatatattctttcacctgcttgttgtaagctttccgctttttaccgaatttaaagtccaccacaatcacctctccgtctttcatcatcacgcggtccggacggcgggtttgcagcactcctttttcccgataaataatggcacactcattgtatagttcccagcggcccgaataccattctttgaccagcggatgcttcaaagcccattcggtgagttttcgtatctgttcctcctgttgtgccgactctatgattccttcgaaacgcaggcgttctatggcgggaggcacatcgtccgtggtacggattacggagaacagattatgcaacagctgtccttgccggatgtatttgtcttccgcttcctcttctccccggataaattcggcagaacggttggactgtttgaattcgatgttggtttccagcgtttccagatggataggcaaacgtcgggctacagtcagcagcttgttgccggacacttgtttttcctcttcgtgagatgagagatagagcgttcccagttcgtatatttcttctccggtggcatagctctttccggtcatgtcggataaggcacttcccaacaattcggataccgttcctttctgttccgcctttccatatataatcaagttctttttggcacgggtaaatgccacataaagcaggttcagattatccacccataattgcaagcgttcattcaggaactcttcccgataaatggattgttgcatggctgtggaatagttgatgggaacaatgtcaagatcgctaaacggagcttgccggggagcacaccataccagatgattgtaagtctcattctccattttccagtcgcagaagggtagcagtacggtatggtattccaatcctttggacttgtggatggagagaatgcgaattccttccacctcgccggaagggatggtcttgctgcctagtttttcttcccagtaggtgataaaagcggataattcggaagaattgctttgcagatattccgtcacggcatcaaagaaggcgcacagataggcatcctgttgttcgatgcaggacatctggaacagattgaaaagtttttccatcagctcatacagtggcatgaggcgaagttgctccgcttcttttatgaaatcgaatggcagataatcatctattccgttcagcaatagagtgttgaggtctattcctttatgtaatacttcattctgataagcagcagccagttgtgccttggcaatccggttttcgggttgtgacaagtagcgcaggccatccattatcatacataccgccagtgaggcatccagtcggaatgcctcatcggatacgattttgtaagaggtgttcttgtcgaagtaatcggctattaaaggaatgcttctgttcttgcgcaccaggatggcaatatctttcagttgcacgccctgcgccacaagcagctccacttcttctcctaggtggtgcagggtgttttccatataggtcatgtcttccgtatccgatagaaattccactttgacatacccttttccgggatctttgtatgtttcctgacacacgtcgttgtaggcttccttcagttccttgcattcctttttttgttcttccttgtaaatgttgttcaacacctcgcaggcggctgtaaacacttcgttgttgaagtgaatgatgtttgcggcactccggcgattggtggtcagtgtctttactttgacgggaaaggcttcgatgtttgttttcaatccgttcagtatgccccagtcaccgtttctccagcggtagatggattgtttcacgtctcctacaatcaagctgtctgctccctgagacaaaccttcgagcagcaacagacggaaattgtcccattgcatacgcgaagtatcctgaaattcatcgatcattacgttgcgtatggttgttcctatcttttcgaatacaaacgaggaatctccttcttttaccaggttatgaagcaacgcgttggtatccgacagcaggaagcggttgttttcatggttcaattcgcgtacctcttcgtctatattggccagcagacggatattgtttacgtggcgcagggagagttggcaggaattggctcgcatattgttccggcttctgtatttttccgattcattcagcagaggaatcagttctttttctgccagacctaggatagcgttgcgtatgggggaggtttttttcacccattcgtcggggcagtccagacatttttccactgttacattgcggacactgtcatccaatttacccgattgtaatttattaaaatagctggctatacctcgggagccgtttttcaaatcttctactttcaccccgtttgtatccaatattccgaagaattggtcggcaaatcctttcatttgttcctgcacctcttccaaaatggcttgcagcgtttcgcggtaattcttgatacagtctttgtcccgtaatttttcccgtagtccgtttcctttttctatatatccttcatcgaagatatttcgtccgaaattctttatctcaccggaaacattccacctcttgtcatcggctattctttcttctatgtattccaacagccaatagagtacgggagattgtcggtccagcttttctatcatggagtccacggcatcactcagaacttccatattgttcagttcgatattcagattggcacccaattccagctcccgtgccaaattgcgcatcaccgactggaagaatgagtcaatggtttccacccggaagcggctgtaatcgtgtatcatgtagtgcagtgccgtaccggcggctgtccttatgttttcttggggcatttccagttcttctgtgattttctgtaaatagggatcagaatccttatcctttatccatattccgtatagctggctcagaatccgctctttcatttcggtagtggccttgttggtaaaagtcacagccagtatattacggtatgcccgtgggttctgtatcagcagctttatatattccacggccagtgtgaatgtttttcccgaaccggcagaggctttataaactaataattcaggagaatgtttcattttaaataatttgctaatttgctaatggctgcgctgtgtaccggatggtaattggctgacacattagtacatttttatttttaattaaaaaccagcacaaaaacagtggcctgtcccttttccttgtaaggcagcagggtcagtgtgccaccgctcagtctcatgatttgtttgctcaggctcagtccgatgccgcttccttcctctttggtcgtgaagaaaggtacaaaaatttgtccggctgcatcgggaggaatggcgggaccgttgttggctatctctatacggatactttcttgcggatcacaataagctttcaaggtgatctttccgtcgggagcattacctatggcttgaatcgcatttttcagcagattcgtaaccacttgggctatcaggttctcgtcggcaaagactatcaggtcttcccgggcttcgaggatggaaagggtgatgttggggcatggatgctggtgctgtgccagtcggatcatccgttccaggaaaggacggacatagaacagcgatggttcaggtgatggcagtcgtgtcagtttgcgataagacatgacaaaatttatcaatcctttacctgtagagtgaatcgtttccagcccttgtttcatttcttcattttctgctccgggaagagccagcagtgtttcgctgagggaagtcaccggagtgagtgaattcattatttcatgggtcagcacgcgggtaaggcgtatccatgaatctatttcccgttcatccaattcccgattgatatcactcaaggcaataatgcggagttcctcgtctttgatacggatgccggacacccgtaaggcaagatgtaccgttccccgttccgtattgaactgaatttgcagcttgtcacccggaactgctttttccaaagcagtcatcagttcgtccgagatgcgggagagttgtttgacatgagtcagaacatccagccccaacagattcatggcctctttgttcttttgataaacggagcctttgctgttcagtaccactatgccggtttctacaaagtccatgatgagctcataatacttctcgcgttgtgccgtttcctgttttacattgtacaaaatacgtgcgatacggttcagcatgacattgaccatggaagaatcgccaggggaggcatgttcgtaaaaacgaacagcggggtcgtcgttttcgatggcgtcgagcagaaaggctatcttccgggtattaaaagtgtacaggcggtaaaaccagcctatggaaacgaggaatgaaggtacgattacgcatagccacaaccagttgcgctgctggattagtaaggtgcaggcaatggctagaaccagtacggtaaataggcggaagaagaattgtttcacagcttaattatttattatttcgtttgaatgttcctttagttcctgtttaaaaatagattattgttatttgttttgtcatcctgaaccatcgtgaagaatgagatgagataatagatcataatccgaattttttcatcttattataaagcgtctgccgggtaattcccaactgtgccgctacagccgagaggtttccgttgcatttctctatcgctttctgaatcatttgcaattccatctcttccagtgtagagacacttgtttctgtcgcaggagccgctatttttcggggaaaatgaaaatgttcctcactcaatataccatcttcattgataatgaccgctttctctacggcatgttccagttcgcgtatgtttccataccacggatatgtccgtaacttttcttgcgcaccggtagaaagaaggatatttcctttgtcatattgtttgcagaaccggtctataaagcgttcggccaaagggataatatcttctttgcgttcccgcagagggggaatctcgatgtggatggtattgatgcggtaaagcaaatcttcgcggaatttgcctttggccaccatctcttccaaattacaattggtggcgcaaatcaaacgtatgttgacaggtatcggttcgttgcttcctactcgcaccacgctccggctctgaatggcggtgagtagtttggattgcaggtgatagggcaggttgcctatttcgtccagaaacaaagtcccttcatgggcggcttcaaatttaccagcacggtcggtatgggcatcggtaaacgagccttttttatggccgaacagttcgctttcgaacagggattcggtgatggcacccatgtccactgttatcatatcccgccggtatcggttggacaaggcgtgtatttcccgcgccagcatttcttttcctgtgccgttctctcctgtaatcagaatattggcatccgtttgcgccactttctctatcagcgtccgcagttgcttcatggcattgctttctccccaatacatagaagatacggttttagggatttccgctctcttcttgttcttggaggaattgcggcaggcagacagcaaggtttctatcagccgggcattgtcccagggtttgacgatgaagtctgtcgctccttccttgatgccgcgcactgccaggtctatgtcagcataggctgtgaaaagtactacgggcagggaggggtgtattttctttatctcgtgtaaccagtacagaccttcattcccggtattcagtccgctgctgaaattcatatccagcagcaccacttgcgcattttcttcacgtaacgcagcgggcagtgtgatgggtgagggcagtgtgacgatatgttcgaaatgatttttcagcaatagctttactgccgacagcactcctttgttatcatctaccacaatgatggttccttgtttgctcataaatatcttctgttctttttcagaagaacaaagataatgattttctctcgccaatcttttctttcagagaaaacttttcaatttcatgaattgttctattataaaatagcatttcaaatgaaaacatttatattaagcataattgtaaccatgattacatcggtagctggtgcacagcaaaaaagtttttatgactttacggtcaagactattgacgggaaggacttgccactttccacgttcaagggtaagaaagtattggtagtcaatgtggcatctaaatgcggtttcactccccagtacgccaagttggaggagttgtatgaaaaatatggaaaagatgattttgtcgttatcggattccctgccaataatttcctgcatcaggaacccggaacgaatgaagaaatcaaggagttttgtacgttgaattatggagtgacttttcctatgatggctaaaatatctgtaaaagggaaagatatagctcccctctatcaatggcttacgcataaaagtgaaaacggggtttcggatgctaagatagggtggaactttcataagtttctgattgatgaaaatggtagatgggttgcctcaatcggctctactaccagtccgctttcacaggaaattgtagaatggattgaagaataaaatgaccagaagataaataatgccctattgttattgcaccagctttccgtttttcagttccgacatcagcaggtcatagacgtatgccgggctttcgatatacaggccggtggagaagtcttccagtttgacgaatgtctccgaattgtggaatgtggagatggcttcctgcaaatccatatcattacgttccaccaagtaacggactacatcggcggatattccttcaaagaggaattttgcggtattcgtgttcatagtcgtttcagcattttaatcgctgcctctgagtgaaagaaatattgtgaagtcactttcgaaaatgtcagttcgtgcaatagttgttcttcgttaataaaattctcggtgtataaacgtagcaagcgcgcaatggtatcatcggcaacagggccaattacgatatcgtaatcgtggcaaggctgagtagtgtttatatcgcggttcgacatgacaaaacgtgcccattcccagtctggctccttgaaaaccttgactttcaattcgctcgactgcgcttcttcgaggtcaaactcaaacatagtcagagtggggtttccgctgaacatccgcgctgttcttgcggccatcctttgggcctgttccctaatgtcggtcaggtaaaatcctctgccgaaatccttataggggcggcatctgttgaggtcgatgccgtcgattgccgtatttgaaccgtggtaaagtatcatcgcaatgttcctccattgttttggcagacgatggtcaggtcatccacacagtcgttaaaagaaagcgtgtgttccacatcgtaaaattcggtgagaaaatcaatgcctttgaaacgtctgatataattgcttgcctcccggattgtcaaatcgtgacggcgcgcaaattcgacaatgaccgtcatcacataatcgattaggttcttgtccgctttctttttggacttgagcgccactatcggttcgacacccaacgcctccgctatgcggttgacagtgccaaaattaacacacagaccgttttccactttggaaaccattgctttttggacgccaatcatcaccccgacttcttcttgtgtcaatcctttgttttttcggcattgggccaaaagttctcctattttttgcaaattcgtattcataccacaaaaatagataaagtttcttgtgtaggaaactttttaactacaaatatattctttagataattattatctttccaattaaatggcagctctgctctgacacgcaagaacccgtgtgccggatgatgattgttaggaaaacaggagggaaatcagttcctttgtacatcataggttatggaacggtggttcgaaaagagttgtcgctatttttttgcttatttatttgtggggataaatatttatccctatattgtattagtaaaattaaaaatatcatggagaatgattattaaaactgaaagttatggatacaataaaagacatttggtttgatgctaaccgcatttatatgaaaacggatggtggagaaactttcagccgtcccttagaggcattccctttgctgaaggatgcaagtgacagagagcgccttgatttcaagataggaaagtttggtgacgatgttcgttgggaatcattggatgaggatattcatatatccagttttttcgatacagcggagccggattatgaaaatgagatagcaatgatatttaaacgtttccctcaactaaatgtgtcagaggttgcacgtagtatgggaataaacaagagtcttctttccaagtatatctatggtattaaaaagccgagtgatataaggaagatgcagattaaagaggctctccatcttttgggaaaagaattacttgccgtttgattaatctcttaataatagtttaggtgtgattccatttggtttcacgccttttttatgttaatttttccacaatcatagtttcaacagaaagataattaaatataaggaagatatggctagaataaacaaatacggctatgttgctgcgtgacgtttttgcatccgtcagggagatgcggtgaacaagccaagttcataccaagaaccgggcaagcatgtgatgcagacagggtaggcgtgtaccgagtaccaggtagccttgtttgctgtatcttatatcttaccatctgggcgatgatgcgtccggaagaatttgcatcaaggtaagtataccgataatctgtttcttgtttgttttttgagtaataaagaaacatcactaaaaatagcggaatatattttcgtcctatttattaaattgctatctttgccacgttttccacgccggtacttccgcaaggaagttagggaggtgggaaatatacatatatagaaaagacgtttacttgacgttttgttcttggctctacagaacttcgcaaattctaaaatccagccaaaacaaagcaacagtaggtgtctgcggggtatgtttatatccttggtgcgcctttgccgatcaaaggtgcattcaagtgtcattatacatatcggcgtgggcttctgcgttgctcgttcagactggattgggcaatgcgaaggccttgtagggcgggacgagtaacaggtacagattcccgcgctttttttatatataggtattataaattctgatttaacacataagaaccgtccggttcgggaatctgcggaaggtcatcggttgacccgacaggctgcatctacatcgtgcggattcccatcctccatttgttgaaatagcttttctccggtcagcttaatcacaagaggccgattcctcttgtactttacgaaacttctcgtaattgattgaaatgcagatatatatctgtacttcaaagctccataactatgctttcaagtgaaaaaatgcaatggtttgccatgcgtgccacttatcgccgggggatgcagatcaaggctttgttggataaagaaggaatcaacaatttcattcccatgcgttacgaagttcgtataaggaacgggcgcaagaggcgtgagctggttcccgttatcagtgatctgatatttgttcattccgtccagtccgaacttcagaaggtgaagttcaaacttccgtattttcaatatatgattgatatccgcaacgggcagaaaatcattgtgcccgatgatcagatgaggcagtttatcgctgtggctggaacgtatgacgagcatcttatcttcttcagtcccgatgaggtgaacctgcgtaaaggtacgaaagtccgtattacgggtggtgacttcgagggctacgagggggtgtttgtaaaggtgaaaggtgcgagagaccgtcgtgtggttatcagtctgcaaggggtgatagccatggccatggcgacgctttcgccggacttgatagaagtgatagaagagccgaagaagagatgacttcatttgctacgttaaatattgttatcccttgattaatggggaagtaaatgatctgataatataaatcttatgtataataatgtgtagaaccacattcatgccgtcaggcatccggctccagcagctgattcagaatcagtataaggaaattttagccagggaaaagaataatgataaattcattcatctgtatgacattggcgcgtattgggtggctttcgagcgttccgcctgtaggttgagcggtttgttttctaaaagtgagctgactttgtttcgtgtcccggattgtgtggaatatgtggtgatggtttctgttcctgccgatgaggcggagggctgtttgggtgagtacatcattttgcacgatggaatttaccggaaagtgtggtcggagcatgttttgccgatgggggattatcgtcattggcatgagatggctgtgaggtctgttttgttgtaaagaaaagtatgcggacttcgtggaccaagtaagtggtgttactttgcttatgaagatatcttacttttttcaatggaatatggtcatccgtcatgctctatagggaataccctgaaaaatccttcaaaagcttcagcctgctcgcaaacgccctacccgtgggcattccggctgaaggattgggttcaggaatccttcagctgggggtggaatgtttcagccgaactgatcttcctccgattcttagggaatcgtttttcctgaaggatattttccggctgaaacatttcacaatgcatatccttcagccggaatgccgacaggcagggtgtttgcggagtggctgaaagatctgaaggaaaaaaaaggcgtttcggcatgtagataccgttatggaaaaaataacaggtcaaatttttaaaagctcttgttctttcaatgaaaacgtcctgttcttttttttaaagaccttgttcttttcggaaaagaacaggatcttttaagggttagtaacgtgtatgccggaaggttggtaacgtgtcaccccacacgttactaatgtgtggggtgtaagattagtaatgttgcaggcggaagattgcatatcttgctagtgatacaatcataaacgtatgaagtttcagtatataaaagataaagttagtgcttatttcactaaggggaatgagcgtagtgttgcggtgaagaaaaatatcgccgtttcattagtgttgaaatgtataagtattttagtttccttgcaggtcgttccattgaccatcggttatgttaatcctacgaagtatggcatttggctgacgttgagttccattattgcctggctgtcttattttgatttggggtttgcccacggatttcgtaatcgttttgctgaggcaaaagcaaaaggggatatgaagttggcaaaagaatatgtcagtactacatatgcagtgctcttcttgctcttttccgtaattttattgataaccttggtggtgaataattatttggattggagtcgtattttaaatattgatcctgtttataaggatgagctgagtctggttttcggtttgttggcatgcttcttttgcctgaacattgtggcaagtgtctttactaccatgctgacggcagatcaaaagcctgctttagcttcgcttataagtacaagtggtcaggtactggcttttgcttgtgtctatgtattgactaaaaccacaaagggaagtctgagtgctttggctgtttctttttcagctataccgtgcctgtttcttttaattgtttctattattgtgtatcaaactaaaaaatacaagattgtagccccttcgttgcgtgacgttcgcttttcgttggtgcggagtgttgttggtttgggtggacagttttttgttgttatgttttctatgctttttatttttcaacttactaatatcattttgtcaagagtgcaaggcccagaagcagttacgcaatataatattgcttataagtattttaatgtacttaacatggctgcaaatattattttgactccgttttggtcagcatttactgatgcttatattaagagagattataattggatgcgtggtacgctagaaaaactggagaaattatggttgttatgtattcctattttagttttaatggtactgagttctgatctcttatataaattttggattggtgattctgtagctgtatctttttcattatcattttgtatggcaatatatgtattatgtcagacgggaggaaatatgtatatgtttcttattaatggaacgagcaaaatacgtttgcaactaatcatttatttgtcatttgctttggtttctattccgttgatgaagtattgttgtaagtattatggtatagaaggtatactgatagttcctactacggtatttattttgcaggcctttattggaagagtgcagatattgaagatgataaatggtacggctaaaggaatttggctgaagtgaaatgaaaaacaatatgaattatcccctaatttctgtcataactgtttcttataatgcagttttaacaattgaacaaaccattctttccgtcattaaccaaacttatctgaatattgagtatatcatcattgacggtggggaagtacggatggaacggttaatgtaataaaaaagtatgcggataaaatcgcttattgggtgagtgagtcggataagggaatttatgatgcgatgaataaaggaattgcttattcgcatggagaatattgtaattttatcaatgcaggtgataaattttgttcctcatctatattgaaacaggtcatggactttaatcatgtggcagatataatagttggtcaggatttacatgttaatgaacataataaaatagtatcacgcagtgtattacctcgaagatataatcttctgcatttttatataactaccatacctcatcaaagttgctttataagggcctctttattaaaaaagtattattatgatacatctttaaaaatagtatcagactggaaattctatttacaatcaatcgttttaggtgggcatagtgtggctgcgtataacaatgttattgtgatatgtaatcccagaggagccagcagtgataacaaccggataaaagaagaacgcgaaaaagtgcttaaagatctactcccagcttatattgtcaatgattatcagtgtttatcctgtttgggagaagaatttattgaaaacgctctttttttatttaataatcattggataagatttttagtaaaaaggggcttgcaataatggttaaaatagtaagaatatttaaatagtttatttatgaaaatagtagtgttcaaaggaggactgggtaatcaactctttcagtatgcattttataaatacctttcaagaaaggatgaaaccttttatttctacaatgatgcttggtataatgtgagccataatggatttgaattagataaatattttaaaactgatgatttgaaaaaatgtagtaggttttggataattctgtttaaaaccattttatcaaaattataccattggaaaatatatgtagtaggttctgtagagtatcaatatcctaatcatttgtttcaagctggatattttttagacaaaaagtattatgacgaaaatactattgattttaaacatcttcttttgtcggaaaagaaccaatcattgctgaaggatattcaaaactcaaatagtgttggcgtgcatataagaagaggtgactacatgaccaaacaaaatttggttatatttggaaatatttgtacgcagaaatattatcatgatgccataagaataataacagagaaagtaaatgatgctgtcttctatgttttttctgatgatattagctgggtacaaactcatttggatatacccaatgctgtttatgtgaattggaatacaggagaatccagcatctatgacatgtatttgatgtcttcctgcaaatacaacattatagccaatagtacttttagttattgggcggcacgattaaataaaaaaactaatatggtgatttatccctcaaagtggtataatacatttactcctgatatttttcctgaatcatggtgtggaatctaaaaaatggatagatgataattactcagcttatttttctgctctttattattttttttataagatataaaaagaaggctgttctttatataataccattgtctttgttttttacaatgcttcctgttgtaagaatagggggtacgtatattggtctttgtgatgcgataaattttgttatatacgggtatattcttggtcggaaagatgcaaggaaagctatattctgcaatccattgtttttacctttgtttggtaattttatattgttgttattaattgctttgtatggaacggaacggacttcattgtatgtgttgtggaaaacaatatcaaatgaaatacttttgccacttgcatttatctattttttgcgaacaaagaacgatattaaattaattgtaaatctttatttgaaagtgttttgggtgttatgtatatatggaattatagagtttctattaaattataatataattctatattggctgcaatctcagactgatttatctttttgggtagatcataccaatgatatccgatatggatatgggcgatataattcattttttcattttcccataacatttggagatgcgtgcgttgtattcttttattttcttaccttcttctatagtaaatatgaaggagtatttatatcaaggaaatcttatattaagactttgtgtttgcttcttatcggtgtttttcttgctaattcacgtgctactattcttgcattagtatttggattgttgcaatttgactatataagaaagcctaaaactctattaatcgctttttctatctttttaatcatggtcttgccgttttctgattatatattaaatgtatatcattccatatttgattttacgggtaattatgatgttggtggaagctctatggatatgagaatgagacaattagatatttctctttttctgtttttacaaaaccctatatttggtggtggcttgagtatgatttattatttaatgacagatatatcaatcccggaacttgcaggtgcggagtctcaattattttatttgttgattgaacgtggtttgttaggtatattgggatatctatggctgataatttcaatgtgcaaattattgccttcatatagaaagttcaacatggtttttgttggtatctgggtattggcttctttcgtatcattaacagtgggattatatataaattttccgattatatttttgctcattatatataagagtcagaaacttaatttattaaaaagataatgttctctattattattcctctatataacaaggctgattatattgcagaaacactgaagtcagttctgaatcaaacatattgtgattatgaagtaatcgtggtgaatgattcatcgacagataatagtttggaagtggcttctagttttcaggatgaacgaattcatatttatacaaaagaaaacgaaggtgtatcagcagcacgtaactatggtattatgcatgctaaatatgattatattgcttttctggatgcagatgatatttgggaatctgattatttggaatgccaaaagaagttgatagaaatctatcctgatgctgggatttattctactgctttctactctttggaaaaggggaaacggaaacttcgtaatgtattgattaacgaacacacacacttccttgttcatgattattttaaagaatccgtaatgaatggattatccatttgctggactagctccttgtgcttaaaaaaagaaatgataaaggagataccaatgtttcgagtaggtattaagcgtggtgaggatttggacctttggcttagaatagcgttgaattatgatgtagcctatttgaaccttccgaaagtcttttatagaacagggttatctgatagtcttacatcagattattctaaaaatggagaatttccttattacgagtggtttaactttacatcggaaagttcttattatagaaagtatgtgattttagttgtgtatatacatgcaaaaaatgcatttatacatcatgattacgatacatgtttggccgagttgtggagtgttaaaactattgcttggagattcaaatgggcagagcgattattattactagtaatttcatggataaaaagtaaataatgaatatcatttattttgttcccaatattaccattgcaggaggtatattccgtatagtgtcagacaagatgaattatttggcggaaaatatggaaggacggctttttttggcatattatggtaatggacaggaaaaacctatatatcctttgcacccgaacattcaactgttacctattgatatagagtggaaggtaggctttggaaagaaaattaatagagtatggaaaaatataagtattatacgtcacatatttaaaaaatataagatagatattgctgtcaatgccaatgctcctttattgatatggatattaccatttatttgtcggcggataaagaagatccatgagtttcatttttcttataaaggacaacagatattagatgaggaaatttttaaatcgcgaggaaagaaatttttagttcaatatttaagaaagtgttgtttgacaaaattcgataaggtaattgcattaacagagtctgacaagaaaatgtggaatttaccgaatatatttgtaatacctaattttagcaatatacaactacatgaaagaaatggtagaaaaagcaaagttgctatatcagcaggtagattagaatctgtaaaaggttataatcgattgattgcagcttgggtgatagttgcacaaaagtgtccggactggcaattggaaatttggggtgaaggaagtctgcgagaaagtcttcaacgacaaattgatgctttgcatctttcatcagttgttcatctgaaaggtgtttcacctagtataggtgaagtatattctcattcttctttttttgtcatgtcatctttgtatgaaggtttcccgttggtattggtggaggcgatgaattgtggcttgccttgtgttagttttgacattactggagcaaatagtatcatagacaatggtaagaatggatttttagtgccggataatgatgtaaatgccttggcggaagcttgtataaaattgatagaaaataaagtattactagaagatatgggtaagcaggcttatatgtcgggaaaatgcttttcaaaaccaaaggtaatgcaaaaatggttagacctgtttagggaactgatgagagaataaaccgcatgattggaaagaaatataactacatacaaattagtttactattaatatgttagaaaagaaaattgcattgttgacttctgttacatttaataatattggtaacggatttatagatttgggtgctgaagctgctttgatgaaagcattaccgcttaatgctgaattatttaaagttagctcaaatgctaattttgcagctacaatgggacaaatgttcatgctgaaagaaaacccaataataaattggttatgggtacatatcatgcaaagggctgctaaaaagcttcatgaccgttcatacaaaacggtaaaaacgcaaaatatctttagtatggccagtatggttaaatgtgattattttataattccgggatgtgtattaactgttccattttttacgatttatggagatttaataaagagaaaagcagaacaaggaagtaagattatttttttaggtgcaagcggaaacttctatacagaatatgaagtcaaatttgtttctgaatatttaagaaaattgcggccttacgctataatgacccgtgatatccttgcctataagtactatgcaaattttacaaaaaatagttataatggaatagataatgtgttctttgtgaatttacttaatttaccccaaatagatactgatttaacaccgtatgtagtattgaatattgaagaacctaagcattataggataaaagaagaactgaaaaatatttttaaagaaaagaatattgtttattcttatcataagccttttccttatacaaaagttagtaagttagtaaaaaatggagtgatagtatctgataatccaatggattatttactcctttaccggaatgcttcagaagtttattctgatagagtatatgcttgtatccctactttggcatttggaaataaagcaagattgtttagcaatagtcctaggatagccttgtttgaaaatgcgaaaattcctgatgtaagggaaagacttgtcagcatagaaggattaaaagaaatgcaggacaaacaaattgcatttctagcttcattattacagtaataaagagaatggtaatatgaatatattgtttttttatcgtgtttatcctaattatggtggtgttgaggtagtgacaactgtacttgccaatcgttttataaaggatggacatggtgttatcatagcttcaatagaacaaccgcatattgaactagcttgtcaattactaccagatgtaaagcttgtcaaattagactatcctgtttgttctataaaaaatatgaggaagttacatcgattaattataaatgaaaaaattgatattataattaatcagtggggacttccttttatgtcaacattactgtgtagagtggctataaaaagaacatcatgtaaattgatttcggtattacatggtgctccaaatacgtctaaattaattattaaggcacgtgataaatgtgaaacagtttataacccttttttgaaatacatatatcatgctataatgtatctaaaagaagagttggtaaaagctagcattcgttataattgtagccattgtgaaaaatatgttcttctttcatctcattttatcaagccgttaagtgattatgcacatataaagagaactgagaatattatagcaataggcaatcctgttactattcctgtgtattttgaagaatgggagttaaaacagaagaagaagcagctgttatatgtaggaagaatggattatgaaaataaacgagtaaatagaatagtggaagcttggaaagttctttatgaaaaatatgttgattgggaacttgttttggtgggagaaggcccttataaaagtacattggaagaatatattagaagatatgatattcaacgtgtttgtttcaaaggctttcaagtatctcctcccatacaacattataaggaagcttctatatttttattgacttctgatttagaagggtttggattagtagttattgaaagtatgagttatggagtggtcccagttgtgtatggaagttatgaagctatatatgacatcatagacaatggaaagtctggcttaataactccgataccttataatagtcaaaaaacaattgactgcatcagcttgctaatcgagaatgaaaaattaagaaaagaaatggcaaaggaagccatgtgtaaggcgaaatgttttacaattgattctgttattacaaggtggtataatctgtttgaagaagtattataaacttccataaaaataaattatcatttaatttatgctccctctattgcttaataaaatcatacaaacagataaattgctgtttttacatttggttactcagaaaaacagaatttacacctttctcaaccccgtatcttacctcatagctttagaaaacaaatccctatttgaacaattcgatggtatttttgccgatggctctttactggtttctgccataagattagtatacggaaagcgagtgaccagacgtagttttgatatgacctcccttgctcccgaattgttgaattacctcatggaaagccgtaaaacgctctatatcgtagcctcgggtcaagaacaagtggagtgttctgtgaagatatttcaagaacaatatcctgggttgagaatagcaggattcaggaacggatatttctcttcggatgctgaaatgaataaggaagcttctcatatagtcgaattaaatccggattttctgatagtaggtatgggggccttgatgcaggaaaagtttctgcttaaggtaaaaaagatgggttaccaaggcatcggctttacgtgtggtggctttgttcaccaaacggcaatgaataggatgcactattatccggactgggttgataagatgaatttgcgtttcgtttatagaatgtataaagagaaacatacacgtacaagatatctgcaagctgcattcttgtttccggtacgctttatcggggaaagaattttcggatgaaagagcagactttgcttattgccatgtaaataatggagaatggcaacaacaggacgaagatagcagtaggaataatttttccgagtatttttaatacatctgttttcatgctgcaaatataaattaaaattcatagaatagtgaaattaagaactctaatatttctggggggactctttggaggaatgaatgttatcaaagggcaggctttttatggtactacaggactacttcatgcacctactgccgttatgcagaaagataaaaccgttatgctgggaggaaatatgcttgatgtaaatatactttcccgatattgggtgagaagtgaatatcattcctatacctataactattatataaattgtactttgtttccttggctggaagtagcatatacttgtacgttggtaaaggggatacatggttcttcttattggcctcagcaaacttggggcagctttaccaatcaggacagatcgtttcatttccggttgagggcatggaaagaaggctggtggaaggcttggacgcctcaggtagtgattggtgcgaatgatccgggaagccattcttcaaatggaggtggagacatagattgggggggcggtggtagcggaaaccacaattacttgacacgttattatctggcggcaacgaaacatgttgaatttagtggaataggtacagtgggggttcatgtagcttgggttatcggtaaagctatgagtgatgtgcattatagccgtcctgctgcagggataaacttttactttggcataaagggcgaaggtttctggcagaaagctctgaatggatttaatctgatggcggaagtgtgtcccggacatgcggaagatctgcatacagcaacttatactgtgaatgtgggtggaacttattcaatatggaaagaccatatcaatcttattgctgaactgaatgacggtaaatattttatcggaggcatattctttaaattacatctcaaataactgacttgatttctagtggatgaagcattataagaatagccggaatcacttggaaaaagtagttccggctattcttatataacgatatttgtatgtcctgtttttattatcctacaatgtatttagcattcttgccgcttattttacgaatgaataccacaagcagccacgatacgccaaatgccacgactgcggcagcgggaatttgtaaaggcacgggaacaccgatattgcgcatcaggactacacctggacctgtgaaaaaataatgtatcatatagatgccgaaaccacatacggtcaagtttgccagcatacgctggatcagttctgaacgtacttttactttcttggctatgaggaagaaggggatagtcatcataatcacattcaaagaattataggtgaagaacagttccaacatttcatcagtgcattgtggtaatgcggtcatgtggcggaaaccgaagaatgtgaccatgtaacctgccagaaacatggggatacagactgacagtatcttactccatgaccagtcgtggttgcgcagatagtgtcccaatagcaagtacccgttgaatccggcaaaataatagagcatattgaacgagttccacgcacagcctccccaaatgtatggggatacgaactgataataataaggtaacaagctggttattccccatgcgacaagaaaccatagtttggctttctccgaggccttttctacccatgcggagaaaataggaaggtatagatataatccgataagcagatagatataccacatatgtacgtctaataaagagaaattgagaggcatttctgctatataacccaatgatacgttgagtgactgacgggcggcttcttcaccgctataagggaaaaagtcaaggattatttcaggattaagtcccaacaatcctgtaaaccagggaaataaattataaatgacactccagataaggaacggccagaatacacggctgattctttttttgtagaaagcggatatttcgccacgtacggggagcagcaatgctcctgtaatcatgacaaacagtgggacacacggacggagaaaggctccgtaggcggctccccagaatttgatttcatcaatgttggctggcggttcgccggggtaaaagttgaacgggtctgcactatggcagcaaactatggtgaacatggctaccaaacgaacgacatccagccataccacatgttttcttgtggtgtttatagcaataggttgattcataatttaatttttgatttgacaggcacaaaggtacgctttctctgaggattatttcttgctttggaacaaaaaataaaaagaactatccgcaatcatactacaaaatgagaatcctcccactgcaagagtcacaatcatttgtcttttgcagggggaggaattctatttagggttagagggttattttagtcctctgttcttcaacaagggatcaataccaggttctttgccacggaaattgacatacatgtccattgcatcgtcaatgcagccgggagtgaggatatatttgcggaactttcctgctacttcttgattaaagatatcgcctgtttccttgtatgcctcgtatgcgtcacaatccagcacttctgcccaaatataactatagtaaccggcagtatatccaccacccatggtgtggttgaaataagtggtgcgatagcgtgacggaatttgtttcagcaatccgcgcttacctaatgtttctgcttcgaactgcataacgtccatatcatcgggaatttcttttaatacatgataatccatatccagcagggaagcagctaaatattcagccgtagcgaagccttgtccgtatttgccactcttgtccattttttcaaccagtccggcaggaataacttcatctgtctgataatgtttggcatatacattcaatacctccggttcaaaagcccaatgctcatctatctgtgacggcagttctacaaaatcacgcggaacactagccacaccataataatgtacatctttgaaaagattatgtaaagcgtgtccgaattcgtggaacaaggtattcgcttcgtctgcactgagcaaagcgggttgtccggctgccggtttggtaaagttgcataccacggttactacaggagccactttcttgccgtccttgtaggtctgtgaacgatagcttccgcaccatgcgccacctttcttgctggcacgcggaaagaagtccatatagagtacacctagatgagaaccgtctttgtccttacattcgaatgcctgtgcatcgggatgagggaggggaagattgtccagctgggtgaaagtgataccgtacagtttgttggcaacatagaacacaccgtcacgtacgttttccagtttcagataaggacgtacctgattttcatccaagtcgaatttggctttcttggctcggtctgcataataacgccagtcccaaccttcagctgtgaaggtttttccgtctttctttatttcggcattgatatctgccagttcttctttggctttggacagagtaggtgtccaaatctgatctaataatttatatacggcatccggtgtttttgccatacgttcttccagtgcaaaggaagcatagttttcatatcccatcagcttggctttttccagacgggccttgagcagtttgcgcaccacttccttgttgtcgtattcatttccgttatttcctctgttaatgtatcctttgaatatcttttcgcgcaggtctcggttatcggcatattgcagaaaaggcatgacgctgggattatgcagggtgaaaatccatttgccttccatgcctgcttctttagctgtttcggcagcactggcaatcaggttttggggtaatccggctaagtcttcttctttgtccacgatcaattggaaagcattggtttccttctgcatattttggccgaaggtgagctgcaacatggaaatctcactatttaattcacgcagttttttttgactttcggcatccaggttggcacctccacgtacaaaatctttataggtttcttccaacaacttcttttgctctttgtccaaatcgccgggattttcatagacagctttgatgcgtgcaaaaagtttttcatttaaggcgatgtcatcgctgtgttttgattgtagtggagagagttcacggctcagtgcgtccatttcatcattggtattggcgcttttcagtccgtagaatacggtgctgactttacgaagtaacgctccgctttgatccagtgctgcaatggtattctggaaagtggcgggttcggggttgttcactatagcgtcaatctctttctgttgttcttccatgccctgcaaaaaggcgggtttgtaatgttccatcttgatttggtcgaaaggaggaacctggaagggagttgtgtactctgaaaggaatggatttccggtaggggctgcctgtttcccttgcgaaccgcaaccgcttaatatggcaaccgcacaggctgccaaaagaatgtgtttcataataatttgttttatataggtgataatgcaaagatagtaaaataaggcaaattccaataagtttgaagcgtagaactatttgtttgttttcatagtctgtctaattatcatacatcattgtctaataattagacagactgtttctttttgttattttgcaatgtgttgttaatcagttatttgtttgtgtggcacggttttggcatttctattatagagaacgaattatagaaactttagtttcttatacactttatgggaagtaacgttgtgaaacgggacttctctcttttaaaataataataattaaaaacacgaaatatgaaacagatttattatgtcattcaggctttgatacatggacgtggagctaatattataaaagtcgtttcgttaggcttgggcctgactatgagtattctacttttctcaagagttgtgtatgagcagagttttgatacttgttttaaggatcatgataaattataccaattgtggaatatatggacagtaaatggagagccttttcctccgagtgagttcattatcggtgcagctgctggaggcatactggatgcaatgccggaaattgtggaatcggcggcaagtacaggctcgtggccggtttcggcacctatttataacgggagtgtccgctttgatgattttaaggtcactgccgattcattgttttttcagacaatgggtattgaggtcttgagtggtgatccggtacgtgaattgcagcaaaaagatgtaattttcctgagtaaagatttggcggataaaatgtttggcggtgagaacccgattggtaaaataattagtttcaataaggaaattgagttgacagtcaaaggaacgtatgctgctttacctgagaattgtactatgcgaccgaaggctgtcatttccttgccttctatctggagccgccggataggaaattattcatggaacggtggggacagctggaaagaatatatccggttgaagcaggatattgatttggatgaattgaacaagcgtattgatatggtagtacagcaacatattcccagaagtgataagttgggaatcactgtcatggcaaaacctgttcgggatacgtaccgtggatatgatgaagtgaaaagaatgcgtaatattatgcttattttaggtatatctattttgtttatcacgacattgaattatgtgttgatttctatttcttcattgagccggcgtgccaaaagtattggtgttcataaatgcagcggagcgggaacgggtactgtttttggtatgtttatgtgggaaaccggtattattattttgctttcattgtttttgatggtttttttaatgtttaatttccgggaatttgtggaagataccacggctgctaaactggagtctctttttgcggtggaacgtatttgggtgccttttggagtgactgctgtcttattcctcattggtggtgtgctgccgggacgaattttttcaaagataccggtcacacaggttttccggcgttatacagagggtaagaaaggatggaaacgtccgttattgtttatccaatttgcaggagtggcttttatatgtggattgatgtgggtagtgatgctccagtatcattatgttattaataaagatccgggttataatcctgagcgggtagtgattggcgttaataatgcaccggatgctaaagcccggcttgctgcccgtcacttttatgaggggcttccatacgtggaagcattgacttcggcaactagctatccgtctaatggatatagcgggcagatgataccggatgagaaaggaacgagtcttttttccagccgttatgattttactcaggagaattatgtagcttttatgggaatggtcatacagcaagggcgtgtgcctcgtgaatccggtgaggtggcagtgaatgaggaatttgtacggagaatgcattggggaaaagatgttttaggtaagagtatacagacagaagaaggccgtgtcaaaatagtaggtgtgattaaagattttaatattggcggattctactcagagctgaaaccgtttgtcttgcatcatcatcccaaagatttggctgatcttgtttatctccgtctgaaggaaccctttggtgagaatcttcagaaactgaagcgtgatgctgccgaagcttttcctaatcaaacagtcggctttgaaagcttggaacaaaaaatggcggatagttataattccgttcgtgtatttcgtaatgcgactttattggcggcaattgccattttgtttattactttgatgggactgataggctatattaatgatgaattacagcgacgttcgaaagaaattgctattcgtaaagtgaatggagctgagtcatttgtgatattggaaatgttggtgcaagatgttctttggatttctttcccggctgtagtcgcaggtacactaggggcatggtatgtaggtggtttatggatggaacagtttgctgtgactgtaggttcgcttgttccttattatgtatgtgtagctatcgtggtcttgatattgattgtcagttgtgtcatttccaaaacatggcgcattgccaatgagaatccagtaaagagtattaaatcagaataaagatcaatagaacaaacaattaaaatttattattatgatacagattgaaaatttaagtaaggtatttcgtacttcagaagtagaaacaattgcgttgaatcatgtaaacatagaggtgaaagaaggagagtttgtagctattatgggaccatcaggttgtggaaaatccaccttattgaatatccttggtctgctggacaatcctactgaaggcagttacaagttgctgggcaatgaagtagccaatctgaaagaaaaagaacgcacccgcctgcgtaaaggtgtaataggttttgtatttcaaagctttaatctgatagacgaactgaatgtttttgaaaatgtggaattgccgttgacttatcttggaatcaaggccagtgaacgtaaggagcgtgttctggaaattttaaagcgaatgaacttgagtcatcgtgccaagcatttcccgcaacagctttctggcggtcaacaacagcgtgtggctattgcccgtgctgtggttactaaccctaaattgatcctcgccgatgagcctaccggtaatttggactcaaagaacggtgctgaagtaatgaatctattgaccgaacttaacaaggaggggactagtattgtcatggtaactcactctcagcatgatgccggatttgctcatcgtgtcattcatttgtttgacggtagtgtagtggcgaacattaaagaataataatgaaagggtggttgtaatgaaacaaatctattatgcaatacaatcgacattacacggccgtggaagcaatgtgacaaaagtcatatcgctttcattaggcttgactattggtgttctgcttttttcacaaatagcatttgaactcaattatgaaaaatgttaccctgatgccgaccgattggtgttggtacgtggaggaggagagaatgtaaagactggagagaaaggagaaggatatgatgatagcttgtttgctccgatggcagaagcattccgcagtgatttgtcacaatggattgaaaatgctacagtcattttcaattttgagacattaaatgtattcaaggatggtcataagctgaaagacgtaaactacgcttatgtagatacttgctatttccgtactttcggcatcaaagtattgaaagggaatcctgaggaattgcaaagggcagggagcatattcgtttctgaaacttttgttcgtgatgtctttggtggacaggaccctgtgggacaaaaattatctttggataaacagcatgaactgacagtccgtggtgtttatcaggatactccggaaaatacggcctatcattttgattttgtagctcccatttatgccggaggtggttatatagggggtggaacatgggggcgtaatgacatttattatactattctccgtttgcgcgatggggtggacagggaagaaatcaatcgtcagatatacaaggctatgcaaaaatattatcctgattctgctgatgatgaatggagaaatttttatgatgcacagccattgcccgaaattcatctggatgactcaaatacccgcactcgcctttacatttatggttttttgggctttgccatattttttgtggcaatcatgaactatgtattagtagctattgctaccatgagccgcagggcaaaaagtataggtgtgcataagtgtagtggtgccagtgcaatcaatattttcagtatgttcctttttgagacggggattgtggtattgatgtccgttatagtggccctctttattattttcaataccaaagatctgatagaagatttactttcggtgcagttatcctcactctttacattggaaactttatgggttccgatgctcattgtttttgtactgttcatagtagccggagtgctgccgggaagattgttttcacgcattcctgtcactcaagtttttcgtcgttacacagatgggaaaaaggggtggaagcgttctcttttatttgtacaatttatgggggtatcttttgtgatggggattttgttagtatctttgatgcagtatcatcatctgattaatagtgatatgggtatccgtactccaggattggtggaggcggaaacatggatgtcacccgaagaagcagagaatatggttaacgatcttcgtcgtcaacccatggtggaaaatgccacccgttctatgcatggtgttctgggagaatattggactcgtgggctgattgataatagtggcaagcgaatagaaaccttgatgtataatccttgtgataagaattatgctgaaaccatggggattactattattgaagggaaagatatgcagaatgagggagatgtattggtcaacgaagaagtagtgcggctgatgaaatggacagatggggcagtaggcaaacggttgaatgattttgataaagccggaaccattgttggtgtattccgtaatgtgcgcaatacgtcttttctttataagcagtttcccgtggctttggtttatagtcataataccagtcacacttttgatgtacgtttaaaacagccatacgatgagagtttgaaaaagctgaacgaatacatggagcaggtgcattccactaaggcattggaatttattccgatagataccatgctgaaggaaatctatcgcaatgtatatcgttttcgtaattctgtatggattacttctacttttattttgcttattgttgttatggggttgataggttacgtgaatgatgaaacacaacgtcgcagtaaggaaatagctatccgtaaggtgaatggtgctgaagcttcgactattcttcggttgctgtcccgtgatatattatatgttgctgtcccatcggtcttgataggaattgtagtatcgtactttacaggaaaggcttggttggatcaatttgccgaaacgatagatatgaatgcgttgtattttgtcggaacagcattggtgattatcgctctgatagtggtgtgtgtcgttgttagagcttggcgtattgctaatgagaatccggtaaagagtattaaagttgagtaactaaatagatagcgatgaagcaattatattatgcaatacaaacgatattacacggtcgtggaagtaatgtgacgaaagtcatatcgctttcattggggctgactgttggcatcctgttgttctcgcagattgcatttgagttaagttatgaaaaatgttatcctgaagctggaaatctaggaatagtccgcgcatattaccataatttggaaacaggtgagtcgatgggggacgatggggatatctatgattattccgtttttgctccgatagcggcggctttggctgagaatatgccaatagaagtggaaaaagctacttgtataaattcttacacagccaacggtaattattattatgaaaatcaattgttgtcggatgacgaacagtgtcttatggtggatacttgttttttccaaacctttggcattccggttttaaagggaaatcctaacgatttgattaactccaatactttgtttgtgtccgagagttttgcacgccgtttttttggtgatgcagatcctataggtaaagtgttaatattggagcggaaaactgaaatgattgtccgtggtgtttatcgtgatattccggagaataccatgtttaaggcagactttgtagtaagtgtacataaagaaggaggttataaggatggagccggatggggaggaaatgatattttttatgcagtgttccggaccggagaagcttcggatatagaggtggtaaacgataacatccagcggatggtggagaaatacatgccgactgaacataacggttggaaactggaactcagtgtcattccattggcaacaaagcatcagacttcttcagaaacaacaaagcgtctagttatctatggctttttgggtttctctatcttctttgtcgctattatgaactatatgcttattgtaattgctactttgggacgtcgtgccaagagtgtcggtgtccataagtgcaatggtgccaataatgggaatatcttcagtatgtttatgatggaaacgggcattattgttctggtatccattctggtctgtgcatttatcattttcaatgcgcgggatttgatagaagatttgctgtcggtgcgacttgcatcactctttacatggggaactttgtgggtaccgctgctggttgttgtacttttatttttgttggcaggtgtattgcccggacgtattttttcacatattcctgtcacacaggtattccgtcgttatactgatggtaaaaaaggatggaaacggtcactgttgtttatacagtttaccggtgtgtcttttgtcttgggattattactggttacgttaatgcagtatagtcatttgatgaacagggatatggggatcaatactgccggactggtagaagccgaaagttggctggacattgaaattgttcctcatatgcgcgatgagatccggcgtcagcctatggtagagagcgtggctacagccagccatagtgtattgggccaatattggacaaaaggattgatgggcagtgacggcaagcgtataggtgttcttaatatgaactatgtggattttaattatccggatgtggtaggcattacgattatagaaggaaagccgatgacccatgccaaagatctgctggtgaatgaagagatagtccggcttaagaaatggacggatggagccgtaggaaaaccttttgatgagattaaggaaggaactatagtaggtgtgttccgtgatgtgcgcaatcaaagtttctatcaggcgcagcaacccattgtgctgataggtggtaatgcgtttaatcataccttcaatgtacggttgaaagaaccctacgatgaaaatttgaagcgcctgaatgaattcatggacaaaacttttccacaagtggctttaacattccatacagtggatgatatgctgtccgaaatctataaagatgtatatcgtttccgcaattctgtccttatcacttccggttttatcctgcttatagtgattatggggctgataggttatgtaaacgatgaaacgcaacgtcgcagtaaggagatagctattcgtaaagtgaatggtgcggaagcatcaaacattctccgtctgctggtatgtgatattctatatgtttctattccttctattttactcggaattgttatagcttattttattgggaaagcatggttggaacagtttgcggaacaggttgatcttaatccgttactctttttggctacggctttagttgtagcgattattattgtggcttgtgtggtgcttaaggcatggcatatcgctaatgagaatccggtaaatagcattaagagtgagtagtgtattgggaaaaaggagagcgggatgatatgtgttgggtatcatcccgcttttttctttttacctgattcctgtgaaatttacattgacaccatccaatgtgccttttaagaagtttccggccaaccatacattttcaaaatatgaaatgtcactgggaccgtaaaccatacggatgcatgtctgtgcgctgttatcccatctccattcaaaattgtacctgtcttcggttacatagccgttccgatgttctattcgtatgatgtctgtgcctgttctattttcgtaaaagtctagtcgttgtgtgtagtattcaccgtcttgttcccaagtttcctgccaggtccggctgcatagttcccgagtggttctgtaatatatttcgctgtaatcatcatcatcgtaccaactttctatggatacttcacaggaggttaggttaaccattattatcagtacaactaccattccgaagtatttcagtatttttgttctcatatccgttaattttaaaatttgtttttcttatgtcacaaagataagtggagggaatgatacaataaacggaatattcctatttgtaaaggagagtttccctatttgtaataggaaaattcctatggtgaggagaggggaataaggtctgtcttatttcttttactattaaactgtaagttacaaaaagaggctgtccattggtgaaacagccccgataatttctgaaaaatgataataggatatttctatatatttttaattatccttgtttgggtattatctgcgtttttttgaagaaagaagtggtgcttcctgtacttgcttcattactctcaagagattacctccccaaatcttccttaagtcttcttctgtatatcctttttcaatcatttttatggtcagattaatcaagtcattatctccattgcatccttgcaaaccaccaccgccgtcaaagtccgtacctattcccacatggtctatgccggctaccttaatcatgtggtccaaatgttcggcagcatcacaaacggatgcggcttttgggtttttattgatataggcatcaaggagacataactgtgccactccgccatttttcgctaaggcacggagttgttcgtctgtcagattacgatcatggtcgcataacgcctttgacgaggaatgagaggcgatgataggttgtgtactatattttatcacatcccagaaagtaccttcactggcatgcgatacatctatcataattcctaggcggttcatttccttcaccacctcacgtccgaaccgggtcagtccttcggtcgcatcttccgtgtgagtggatgaatggcagatatcattgtcataagaatggcagagagtaatataattgactcccatctgtttgtattttgctatattctttaggtctttgcctatggcgtaaccattctcgatacctataaaaaaagcttttttaccttcacgcttcaggcgtatcaagtcttcttccgtaagggcgatgccacaaaaatctttgtattgctctacttcgtcataaatggattgaattaatcgagtggtgctttctacggctttttgtgaagatgcgtcatcccgtttcccctgccatataaatgcggctaggaactgtgcgtccaatttgccttcctccattttggggatgctgaccatgttgtcttttctcaggcctacactgtaaccgtttttaaaccaaagaggagtgtctgtatgagtgtcaatggatagaatgcggctgtgaatttttttagctaggttgaatgtatcagccttgttcaccaggaatttaaataatttatgcatggtggtatctccggcagctgtaaatatttccggatgaaattgcacacctatcatttgtcgtatgggataagcttctatagcttccgctatactgtcgggtgcccaagccgtgattttgaatcccggtgccaatttccggatagcctgatgatggaatgtattgacttgcagcacttcttgtcctgtaatttctgccaacttgctttcctttatgatggatatcggatgggtgggggtagtgccggattctttttggcgatggttgacacttgaaggatgttgcgtgggcagatcttgatataaagttccaccgaaagctacattcattaattgtagccccctgcaaattcctaatatgggaatattccgatctgcggccattttcagcaccatcaagtcgaaggtatcccgggcggggcttacttcttccagtttttcataaggaaggtcgccataatacattggttggatgtcttctccacctgtaaagacaattccgtccagccgggatacaatttgacgcagtatttctacattatccgttacaggtatcatgtaaggaattcctccagagagaatgactgactgtacatatgccgtgtttacggctgtccgtttcggacttatatctgtggaaattccaatgaggggaaacctttttattccgggaatcaattcggaatccactttttgattcaaccggacgagtgcttcggacaaaggatccttttgacttttttgtgcttgtacatggcaacatcccaaagctaacagtaatactaagaggcatttgtttttcatatgaatatagattttgtcttgcaggcaaatgtataaactatgtttttgatgaaaaaataaaatgccataaaaatagagtaggaggtacttattccaagcacctcccacctttatattcagaaaataatcaatttacttcatatcttccacaatcgttaatggctggtcaacatccgatatgcaggtgttcacacgttatgcgcgttctgcacgtgggcatttaatcagacaatcttttagctaagatattaaccattttgggggcatcaagcgtaaaatctggtcaacatcttttgctcttgctgtgctatctgcttgttgattcctgttcattaatcctcaattataccaaatcttttacacgcttttctcgtttttcgtgcaaaataagttgttttcttgatataaacgaagcttgacgtgtcatttatacgccacaaactacacattatttatatataagggagttcgattaaaagaaaagttccagattcagacgatctccgagtttaggtttaagtttagatgttcttatatatataataaggaggtaaacctacatcataggtttttgagtttaaaatctatgagtttagagcaacatgtatatatacatgggctaacgtaaaccttaaaccgatcttgccatacaagtttacgcaggactttctacccaactttctcttttaaccgaaaaaaaagaagaagcaagtttatcttgctcctccccttctttatgtgtgagttcaatatcttttctcgaaacgttattttcctgccattagatacgaacaatacttgccaagcaggtttgatagtggcagatcatccttcaggtaacgttctgcatcaagtttgagcagtctttcacgaatctgcttctttcctttgaacaaagcacaaaggtatggaatgcctttttcttccgtaatggtcacatcggcaaagaactgagtcagatcttcggcatcatagacgatggaatagcttggacgctttgctccaggtatgtctataaccagaatgttcttttcgaccaagtcttgaatatcacgaatggctgtgtccttcgagcattttgccaacgatgcccatgtctttgaagttatcttcgactcatagccatcgaggaatagattcagcatctctgtttgacgctctgtcataggaattgacgaagccttctgccagaagaaactcttgttcagtatagaagttacaatagcttcagcttcatcaagtgcatcgatgagcttttgaagataccataccaaccattctgttagatcaccatcaccatgctgcattttttccagaatgtcgtaatagtgattcttgtctttattgatttgtgatgagatattatagaagcgatagtcgctcttctctccacgagccagctgcatatcagaaagtatgcgagccaatcttccgttgccatcttcaaatgggtggatgctgacaaaccaaaagtgggctacggcagagcgaatgacgctgctgaccggctcttcactgtcaaaccatgcaaggaaacgttccatctcgccttctactcggtctggtgaaggggcgatgtagtgaatcttctcacgtccaaacataccactgatgatatgctcctcgttactgcggtacttgccgacctcaatctgcctgccttcgctgaaaccagacggaaagaacgctgcttgccaagcacatagtttttccttgctcaaaggctggtcgtagttctgaaccgcttcgagcattacgtttacaaccgaatctatataatgcgaaggagctgtatactttacgttctctatccccagtcgtctggcgattgaagaacgtacatcatctacattcaagcgaatgccctcaatttctgacgaataaacgacgtcataggtcaagttctctgccatagctcttagcttgctatcaaaccccaacgaacttaaccttccaaagagtaacccttgcttgcggcaaaccaactcctgaaggagcgacacctgcgaagcgtcccaacggaagtctgtccaattatctctttcgtgtatatacataatgaaaactttaaatgctacattattctgcgattaacgtcgcaaattctgcgacaaaattaagcattttttgtcgaataactaaagaaagagataaaataacgcaatttttgcgacgatttaagctttcttttgactgataggaaagttttggaagcaaaatctacttcttgatcttgataaaattatgttgcaaaggtacatgattcttcttgcgacaatgcaaggacatacctacggttcatgaagaaatctccacatcgttgggtagtatttctcgatgaatccttgcattgcttgaagaatcacctttgttggtcaacataatttttgatcaatcccagaagtagaagattctacgaaagggaaataaaaaacaaagcacatgacaacaatccaatcaatcctgagccgactgaccgaagttgttagcggtacagacaaggagctctacacagaagatgagctgaacaagtttgcaaccttctatctcgataagtgggatgagaacacaagcgaggacgttattgcagagtctttcactgatttcaggtgggacactgacaggacttgcagaaggtgctctatctgtggcaaactgatgcgcgaaggctatattgataacgaatacggatatgtatctctcaatgaaatggcagacctcactatcgatgcaagcaaatacggacttggcatcttgaaggttgagcaagtcaaggacttcaaggcttgccagttgtctgagattgaggacaccgagctacaggctttcctttcacgtatgtacgacaagaagtaataaccaatgatgggcggagccaaccgctatcgctcatcctaaaaccttcaatgatatgacacagtgtttagtttatgaccttacaaccaaggaatctgagacgttcttttctcttaatggagcaaagaaatggatgcgtgaacgtcagaagcaagggcatgaagccgagggcagtaagtacaagatatattcaaatggcgataccgtaaattgtggaaaaatccagttgacaggcaacaacaagtcgtttgtcgcgaatagtaaacagaccaaatcagggtattgaaattcaacgtttcagattgcaagacaaacaatcatagcgacataagtactatgctattcttagttatatcgtagtgtatcttcgccttctgactatccctctatacctttgtacacgtttatacatgtggacaagtttacaaatatacatgtggacgtggttacaaaacaacaataacagaattattatgttacagaaagtcattacattagccaacttcaaaggaggcgtagggaaatccacctctactgctgccatgggtgcttgtttagccatgaaaggctacaaggttttgcttgttgacctcgacggtcaaagtaatctcacactctactatattccagatgcagacaaactggaagagagcatcttcgagactttggtttacggaaaagctgttcctgtcattaacgtcaaaccaaaccttgacctcgttccttcatccctggaaatgtccagtgcagagattgcaatgactaatacacttgcccgggagcaagtcctttcaagagctctatttgattaaaagtcaactatgacttcatttaataacttataaatcaatcgtaagcatccgataaagtacacattgtattttcataaaatagaaaactcgatatcaactttagtcaaaagatggtactgaaagtgatgtcagcatacctgttcctcaatgcctcagatacggctttgttaagcttgcgatggttgtatctggtgatgaagaccccacttaatctgactgatggtctaacaaccttcaatgagcttacgaaagaatcaagcatcttcatgcctttcagcggtaaaagttctggggtcataggaaccaagatctcgtcagctgctataaaggcattggttgttactatgcccagggatggagggcagtcgataagaatggtgtatgcgttggtgtatgcgccactgttcaaaagtgtatgcgtggtgtatgcaagtaccgtttatttggctcatttttgcggacaaatgcacgaacctcctaaaaacaacttaggctgtaacgcttgataaacagtttgttacagcctaaatcaaatattatcctatattgcttatgcttcctctaccgcagcctgcgccgcagccagtcttgccttataatcaataaattatcttttgggtgaaaacatataaaaaacaaaggtgatatagcttcttttcctatatgattaatgtattctctataattatgataataatgttctatgtaaaaacattatatagactaatttttttctttttgtttcataattgtttttattattcggttaaatgactctctgcctaatatagctggcttatccaaactcttgtcaagaaggaaaggaaaagagaaagtgcatccctcatactcaaacccaatcctgaacaccttgcattctctcaacttgttgtccttgcatcttcccactttcttccccacataatggaatatattattagtactgatggaatccacatagtcaggaagaaagggctgcaaattatcatagacaggttttgtattcacttcccttatattgttatcagaaagtgaatacatctgcctcttcctaagattgaagaaagccaagaatgcaggaccaataaggttgtgcttcattttcttatcaagaaggaatgtaaaaccaatgcctttgatatggatgaagatttcattcattttgagttcattctaatggaagttcttttatttcaggctttagcaaatctcctacattcattgcctgtattcttaaagtactgaatagattactgttatctcctttagacaattgttgcatggttataaatatcttatcaacaacctcattcttatttactctccccattacaggattgattgtgtttcctaaaaccattggatggctggaaatatctattgcattgtaagcaagataatatacaattagaggattaagtccattgatgttgaatgagttcctactttcaggcagatttatactatacttggcagcatggtctttaacctcttggatagatactgttacatcatctatcagctttgatccattttccttaaacaccttttgtgcttctgacaatgtgtataaggaatcttgcttggctgtcaatgctttattctcttgatataatgatatattataagagattgaagctactaatacaaaacctaataggatggataaaattacaaaacctttcttcatttgtatgtcttgtttttagtcagttgttcttattgtcaatttatcaaagtcaagaatccatttgtttttcacaaggaagtctgtacttagaataccatgaatttgcacccctgtttcttcttgtatctgccttatagcatctgagccatcaaaaacagaaaatgaagaagtataatctgttccctcaaagttgaatgtagcttcaatgacaggagtttctttatattctccatctatccccatgatgttttgtttgtcttccagtactttgaactcatttttaaaatgctcatatacataagcaaaaaggacattatgcgtagctcctgtgtctataagaaagcacaagttctttagtctgcctaatgtcactatcaatggcaagcctgtcttttgcaagccaaatgctaatggaaattccatcatttaattgattcttttgaaagttaaagttcgggtgattataacttctccttctcccaaattcaaccatttagcagaatctcttaatatcatttctgtatcagataattctaacacatcatagatagtaggagattttgaagtatcagaaaatcccattagcaatttcatctgattcttgtcaaagacaaaggcttgatagtctgtaggcttttctcctttattgtaccattgataaataccatcagcactaccagttactttaacatcaccattttctacaaactcccaaacataagacccataacttatttcaacttcattatgtttttctttatctaaatctgtatattttgcatcttctattaaagttgtgacattccaagttccaattacagacagattattttcttcattctcattgctgcaactgattatcaatatacaacagagcaacatcaaaagtacaataattttcttattcattttatatatcttttagttattcaatattccaataattactttcatcaccttcaaaagcatcaagcctttggtcttcccaattatctacatcattcatcttctcttcctcataatcccaaaaagaagtcttatttggacatgtttttggtttaattttctttttaataggaactttagttatttgcagtgtccttttccctatatcagacttatccatcaacaaaggaaaaatcttactattgctatttgcaacaatggctattactggttctttaggaatatctttacctgcgacaattccaatattacaaccatgagtaaagaaaagttgccttgaacaaggcataatcttcacaaatatcttctgacaattagatatttgcttgaatgcctctacggaatatacattgatataatttagtccatcaagaattattttattggctaatttatgtaagttaattttctcttctctatcatctttaaatgctttaattgagaaaagatactcttcttttataacccatattttatcatatttcaatggaacaacaatatttcccaatgtatcaataataccccactgattcttttcttctaaatagtgatattccatcacacgggcataaccacaagtaaattgtgggtcacaccaagagtatttaccaaaggggactatttgcctattcaatgtatcaatgtaagcatattgatattgatggtttctgaccaatgacaaaccacaactgaatggttgcatttccatgtattgaggtggaataacaacttctcctttttggttcttagctcccaataagccatcttcctgaaatatgatatagtctttatccatgctgcctttttgtagccataccacaaaaagaaaggtgcaggcttgaccttgattgtcattctgaaggtatcgccaaacacctatatccatacaaacaaggaaagcccacacccctatggcatgagcattcactaccttgctgttgatggatatattcttctaaattggcgatttttcagaactcatcaagcaagaagcaaacacttctttttctaatatgtcttgttaaacttctattccattgctaactatttttgttattactgcaaaattacgataattctgcaagaaacaaacatcaaatcaggcaattttataaaagtcaatccatatcagcatccgaggtgtgggcaatttcttgtcatgaagggatgataaatatctccccttgctctatacaaaagtactgtttttattacatatctcttatcctcattgctttttcattttaaagaagccccgaaatattgattttattccgaggcttcatccaacaatcaaaccataaatcatggctttttattgccatcggagcaaaagatgcaaagcactactactcctaaaaccaaattgataatggcaaagatgatttctcccataaggcaaatcttgaaaatttcccaccataatgaatatataaattttggaacaacctgctactgaat

SEQ ID NO: 3904 - DNA, 1483 bp, Unknown
  gut microbiota DNA sequence
gctttgttacgcttaaaaaaattacagaatgagaactaggaattgtttgttaatcgctttttgttttattatcttgtgtggaaaactgtatgcccagcccacaggtagtgaggaccgtatgtactgggtgcagactttaacaaggattgctgatcctgtgttggtcaatctcagtcagggcacgttgaaaaagaatatgccgtttgagtcactgtctgatgaacctttacgtagaagtgtttcctatctggaagcggtaggaagaaccgtttgcggtattgctccttggctggaactgggacctgatgatactcaggaaggaaagttaagagaaaggtatattcaactggtggttaaaggactgaaacagactgtcgatccgcaatcagctgattatttgatgtttgataaccgtcattcccagcccttggtagatgcggcttttcttgtacaaggtttgttgagagctcccagacaactttggggaaatctggatgtggatattcaaaaaaaactggtgtatgagttgaaaagaacgcgtggcataaagcctaatgagagtaattggttgcttttcgcttcgatggtagaagcggccttgttggaatttacgggggaatatgatagtcagagattatattatggtgtaaaccgtttcattgatgaatggtataaaggagatgcctggtatggagatggggcagaattgcatctggattactataacagtctggtcatccatccgatgttgacggatgtattgtctgtcatgaaaaagcatggattggaacgtgccgagttcttggaacgccaattggttcgtcaacaacgaatggctgcccagcttgaacggatgatctctccggaagccacttatcctgtagtgggccgttctatcgtgtatcgttttggcgtttttcatgcgctttctcaaattgctttgttggacaagattcctcagcctctttccaaaggacagatccgttctgctctgacagctgttatgcagaggcagatatctatgcccggtacttttgatgaaaacgggtggctgaaaattggcttttcaggcagtcagataaatatgtccgaaccttatataaatacaggcagtctgtatatgtgtacagcggtctttttgccattgggacttccggcaaatcatcctttttggactgagccttatagtgaatggactaacctgaaggcatggaaaggtgtcgatgtaggggcggataaggctttgagaaaagggtaggtgtctatgaaaagaaaagtaacttaacttacttgcccaagtaagtcaacttaaatgccgaagtaacttaacttacttggcctatgaagatagcttacttttcattggctggcttgcctgattttaaagagcatggagatttttccatattaaaggaaaaatctccatgctttatgtttgtatgtcaatagaatagctgccggtctttccctttttttatttctt

SEQ ID NO: 3905 - DNA, 43828 bp, Unknown
  gut microbiota DNA sequence
ggaataccgtttatcacgatattccgggaggaaatggggcacgggtcattgaactgacacaaggagtgcgctctttcaagacatgggagcgtttggagggaggaaagattattaatgaagtaaattatccgtctgatttccaaagagaataatagtcagttgggcaggatagaggtattctcagtacctgtccttccggtgacaagactgtttcgtcatttgttatacataaattattgtcacagcttcatacatccctgtcggcattctatggatatagttaataatggccggcagggtgatagaatattatgaccgtttcagatattcgtaccctatccggcaatacaggcattttttcttatcgcaatattctttctttaattgtatcaaagcttggctgtcggcggcattggaggctttcattccgcattgttcccacatgcgggtgatataattgttctccgctttcaattcttccagaaaactgccggcacgtgcacaaagtacacgattccctttatgcagtccgtaagcatagagaaatgtcactaccgtgttgataatgagtaaatccagtgaggtgttacttagagtcttcggacgggaaggggaagaaccgccaaatgtataatgagtgagccagtattctgacgttcctcctttcagaatatctctgacaccttgtagtgtctccgtttccatgatgcgagagagcagtccgtaggcacgatgataaagacatgccaactgtgcaatccgtatatgcggaaaattagcaggacgtagccggagaaaacgccatagggaagcatccatcgggataagtccgaatttatgctgtagataggtgtactctttttttagccggagatagtatccgtctccatcagaatcttccagaatgccggcttgtccaaagaagatggcttctatctggaaaaggtcgttccgatgcttgtctaccgcccggaagggaagccgatgagcccaggtttcgaaagcgtctccgttcagcccgaaaccgaaattacgtgccagtgtgataaaaaaagcatcttcccaattgccttgacaacgttttaaccgttcattcaataaggtcgctttttgctcgaatctttccatctgtaaggcagtcatccatgagtgggcggtgaaaggggggagtgaaggaatgatgcggtaacaaggggggtagctgtctgtttccaacagttccttgtagttggtgcggaccgcttccgggcagatgagttgtatttgggggattctttctccattgctcctgctgatttccgtatctatttcggaggctatatgcagaatgacagagttgtaaccggtatctgcatgatgtccgtgtttgaaccagtctgaagatctttcatgtatctcgatattgcctatccaaagcacaccgtccagcttgagcttggcattaaaaaaatcgggaccggcgtcggtattcgccagtcccgtatctataacttccacttgttggccggttgttgttttcagttctttgagaggaaatattttatgtttccatacatagtgtaatagttgttccatgttaatgaggtgtaaatgtttggcaaatgtaatggtttacaacgaaaaacgctatctttgtggctgaaataacattcgtaattatgaaaatagcattaataggatacggaaagatgggcaaggagattgaaaaggttgcagttgcccgcggacatgagattgtgagtattatagatgttgataatcaagatgattttaattcggaagcatttaaatcagcagatgtggctattgagtttactaacccgatggtggcatatgacaactatatgaaaacttttgctgccggtgtcaaattggtatcgggcagtaccggatggatggacaaacatggtgatgaggtgaaagaattatgcacgaaaggtggaaaaaccttgttctggtcgtctaatttcagtctgggtgtcgctatattctctgctgtaaataaatacttggctaaaataatgaataactttcccgcttacgaggtttccatgaccgaaactcatcatattcataaactggatgcgcccagcggaacagccatcacgctggccgaaggaattctggaaaatatgaaccgcaagagtaaatgggtgaaagggaccatggtggcaccggatggaaccgtgtcgggaacatcggaatgtgccgagaatgagtttcctgtaaattcgatccgtgaaggggaggtgtttggtattcatactatccgctatgactctgaggcggacagcatctcaattacccatgatgccaagaatcggaaggggtttgccttgggagctgttttggcggcggaatatacatccaggcatgaagggttattaggaatgagtgatttatttcagttttaagatatgataagagcaacacgtacacagtgggttaagtttgccgttgttctggcgctttacctgatatttcttgtctggttgagaagctggctgggattggtggttgtaccgtttatcttcgatgcgtatatcacaaagaagattccatggacttggtggagagagtccaagaaccgtcatgtagtgactgtcatgggatgggtggatgctattgtattcgcactggtggcggtatactttgtcaacctctatttcttccagaactatgtgattccttcttcttcgctggaaaaatcattgctgacgggtgattatctgtttgtgagtaaaatgagttatgggccccgtgtgcctcagactccgctgcacatgccgttggcacaacacacactgccgttttttaattgtaaatcataccttgagcatccacaatgggattataaacgggtgaaaggtttgggggatgtacagttgaatgatatcgttgtctttaactttccggccggagatacagttgccaccggtgtgcccaatgatgatatttaccgtctgagttatggcgcaggcaaggagctggcaaaaccggtggatttggcttccatgactccggagcagcaacgggtggtctatgattattattatcagttgggacgggagtacctgaaagagaatccacagaacttcggtgagataatcagccgtccggtagaccgccgtgagaactacgtgaagcggtgtgtgggtttgcccggacaaacgctggagataaaggatcgtattatttatttggatggtaaagctaataaagagcctgataatgtgcagtatcgttatctggtgaaaaccaagcgtcctattcccgatgacctggctcatgaactgggtatcagcaaggaggatatgatgatgtattatacggatgcttctgtttataatatgcctctgacggaaaaagcgaaagctggtttgttggcgcgtaaggatattgtagtcagtattgagaatacaccggctgatgatgcggggggcttgtacccgctgaacatgtataagaactggactacggataactacggacctgtatggattcccaaaaagggagagacggtgaaactcacgatagagaatcttcctgtttatgagcgtcctattcatgtttacgagggtaatgaactggcggtgaaagatggaaagatttatattaacggcaaggaaaccgatgagtatactttcaagatggattattactggatgatgggagataaccgtcataattcggctgactcccgcttttggggatttgttcctgaagatcatgtggtgggaaaacctatctttatctggttgtcattggataatgaccgtggctggctggatggaaaaatacgttggaaccgattgtttacctttgtagataacattaaataaattgcgcataccctgtattcctgtatggataaaagcaatgcttactgctgtcattctggtactgttggtaaagacatttgctttcacctcctgcaccattccctctaccggtatggagaatagcctttatcaaggggaaagggttttggtgaataagtggagttatgggtttcgtgtgcctttttctatctggcggtggctgggaaaaactgccgggaaaggggatattgtgttgttcaacaatcctaatccacggtctcctcagacgtcggtgggcaatcgggaagtgtttataagccgtgtggtaggagtacccggagatacgttgatgttgaatgatgaactgtgggtgaccgacgaacaagtgttgagcccggatagtaaatctttgtatgtctattctcatacggaagaagaaacgatgcaggctgccatgcagcaagtgaacattcagggaaacaggttggtggggtatgccgaggggaagtatatacgtaccttcagtcattatgaatattacctgttaaaacaaaaactggcgggaaaagtggatttgattcctctttatcataaggatataagcaagagccatccctttgtgatcccggaaaaagggaaacctgtcaaggtatatccttggaatgtgaccttgttgtgcaatactattgtccgccatgaagggagagtggcttctgtcaggggagataccctgtatgtggggggaaaacctgtagaagcctatacatttaataaaaattattactggatggcatccaataatccggtgaatctgtgtgattcgcgtttattcggcctggtgcccgatgaccatttgatcggtaaagcttggcgcatttggttttcatccagaaaagggcgcatttttcaacgagtgcaataatggagaatacgatatatttaagttcggcctatctggccccggtggaatattatacaaaactgtttgcctgtgagaaggcctatgtggaacagtatgacaattatgtgaaacagacttatcgcaaccgttgtgtcattgcggcagccgacggtccgctggcactgactatccctacggaaaaaagcggtacacctaaatgcctgatgaaggatgtccgcatttcggatcatggcaattggcgtcatatacattggaatgctttggtggctgcatatagaaacagtcctttctttgagtactatgctgatgatttccacgtcttttatgaaaagaaatatgccttcttgtgggattataatcaggaaatttgttctttagtatgcgatttgatcgatattcatccccatatggaaggaacaacggaatattgcatggaatttgtttcgggtgaggttgattttcgtgagactattcatccgaagcgtgactggcgtgaggcggatactgacttttgccctaaaccttactatcaagtttttgatgccaaatacggttttctgccgaatttgagtatcgccgatcttttgtttaatatggggccggagagcctgattgttttgcgagatagtgttaaaggtataaaccataaagaataatatcatgaataatttgtttagtgtaaaagaccaggtggtggtaatcaccggtggaacaggggttttgggaaaggctattgccgcccatttggcagaagaaggtgccaaggttgttatattaggccgtaaggcagaagtaggaaatgccattgtaaacgaaatcaaggccaaaggcggggaagccatgtttcttgtaacgaatgtgttggatgaggctatattggagcagaatctgaaggatattctcgcagcatatggtcgtgtagatgcattgttgaatgcagcaggaggtaatatgccgggtgctacgattgctcctacaggaaatttctttgatttgaaagtcgatgagtttcagaaagtgcttaatctgaatcttaccggaaccgttctgcctacacaggtatttttgaagccgatggtggaacagaagaaaggggctattgtgaacttctcttctatggcggcattccgtccgatgactcgtgtatgtggttatgcggctgcaaaggcgggaatctctaatttcactgcgttcatggccaatgaagtggctacgaaatttggtgaaggcatccgcgtgaatgccattgctccgggattcttcctgaccgaacagaaccgtactttgttgacaaacgaagatggtacatatactcagcgtggtaatgatgtgattcgccagactccgttcaaacgtttcggtaaagcagaggaactgtgtggaaccatccagtatctcatcagcgatgccagcagctttgtaaccggtacagtagccgtagtagatggtggcttcaatgcatttgccatgtaacaagtctttagtctttaattctcaatttttttatttgatatgattttatgtgagcaaacatggcgctggtacggaccgaatgatcccgtatcattgtgggacatcaaacaagccggagcaaccggtattgtcaatgccttacatcatattcccaacggtgaagtatggacggtagaggaaataatgaagcgcaagaaattgattgaagaagcaggattaacttggagtgtcgtagaatccgtgcccgtacacgaacatattaagacacagacaggagattatctgagatatatcgagaactataaacagagtttgcgtaatctggcagcatgtggtatctatattgtgacttataatttcatgcctgtactggattggacccgtacggacctggcatatacgttgcccgatggttccaaggcattgcgttttgagcgggctgcttttgtagcgttcgatctgttcatcttgaaacgtccgggagccgaaaaggaatactcggccgaagagatagaaaaggcaaaagcgcgtctggcacaaatggatgaggaagaaattcatcgtctgacacgaaatatgattgcaggattgcccggttcggaggaaagttttacattggagcaattccaaaatgaactggaccgttacaaggatattgatgcggacaaactccgcaataacttgattttcttcttgaaagaaatttgtccggtagccgatgaagtgggagtaaagctcgttattcatccggacgatccgcctatgtctattctgggcttgccgcgcattatgagtacggaggcggatttcaagctgttggtggaagctgtacctaatccgtcaaacggactttgtctgtgctgtggctcatttggcgtatctgcacagaatgatttgccgggtatcatggaacgttggggagaccgtatcaattttgttcatttgcgcagtacccaacgtgatgctgaagggaacttttatgaggcgaatcatctggagggtgatgtggacatgtatcatgtagttaagaacctgttgaaagtgcagcaacgtcgtggaatatctattcctatgcgtccggatcatggtcatcagatgatagatgatttgaacaagaaaacaaatccgggctattcttgtttgggacgtatgcgtggccttgccgagcttcgtggcttggaaaaaggaatagcgatgagtatggtggcagagtaacttctttttaacatataaaaataagacctgaatgtcttccggtatccggagatcttcaggtcttattttgtttaaaggctggataataggggttttctagacaaatacagatattaattagacaaataaagaggtgctggcggaatgggaacgcctatatttgcaacagtttttaatctaattaatccttaaattcttttattatgaataaaaaaatgaaactgctttcagtccttggattggtgacagctattctgtttttgttctcgccgatggtgacagctcaatccttatccatcagtggtaaggtaattgacaaaaacagtcaggagcctgtaattggggccagtgttttaattgaaggaacctcaaacggtacgataaccgatttggatggtaattttatgctttccaatgttccatccaaaggaaatctagtcgtgtcttatattggttatgctacgcaaactcttccaattaatgggaggactagtttcagtgttgtattggctgaggataccgaaacgttggatgaagttgttgtaataggttatggtgtgcagaaaaaagtgaatcttaccggatctgtcgcttctgtgaaaggagatgcgttggaacatcgtccggtagtggatgcaacacagagtttgcaaggtttagttccgggtttgtcagtaagcaatggaggatcgggacgtcctggcgctaccggttcgttgagtttgcgtggtcaaggcaacttgtctggaaattctgctccttatgtattggtagatggtgtggaaatgtctctttcagatgtaaacccgaatgatatcgagaatatttctgtattaaaagatgcggcggcttgtgctatttatggagcacgtgcagcttacggtgtgattctggtgacaactaaacaaggtgaagaaggaaagatgcgtgccagttatcaaggtacattaggatggagtgctccaactgtgctgccggatatggtgaattcacttgactttgtgaagttttggaatgacggtgtcagcaatacaggagctgctaaccgtatgtatagtgagcaaaaaatagctgatttggaacaatatatgagagatccgtccagtattgacccgtggggagatttggcactgggtgaatcattgaatgccgcattcgaaaactcggaacgcggattgggaaatacggattattttgacctgcactataaaaattatagctttaagcataaccacaatctcagttttagcgggggtagcaagaaagcacaatattatgtttccggaggctactataatgaggacggtattttgcgctatgctgatatggactatacacgctatacggttaatgccaatatcacttcagaattgactaaatggttgaaactgaaattcaacactaagtttatgcattcggataataggactccttttaataatgaagacccgaaaactggacttgacggtggcttgagtgaaggattttatcatagtttggcacgtttccgtcctacggtatcggttattgaccctaatggacattttacggaattgtctatgattccttatttgcagagtggaacgtatacagatacgcagcgtgaccgttttaatatcactgcaggttttgaattgcaaccgctgaaagactggtttattttctttgattatacttataagcaaatgaacttggagtatgaagcattgaatgtggctcccagtatttatgagcaagatggggtgacaatgaccaaagtggcgcgttctgaattgggagtagtggaagacggtaagtttacacgtacttatggacgtacccgttatcagactatcaatctttatacaaactaccagttcactctgaatgatcatcataactttacattaatgggggggtatcaagaagaggataatgattatagctatatgaagaactctattacaggcttgtattctacaaacaaccctaatttgggtatgggtacaggtgataaagtggtagtggatacgcgtaacggatgggctacacgaggcttttttgggcgtatcaattatgactacgacggtcgctatctgttggaattgaacggccgttatgatgggtcttctcgctttgctaaaggaaaccgctggggattcttcccttccgcatctttgggatggaatatttatcgggagaaatttatggaaccggcagccgatttcctttctaatttgaaattgcgtgtatcatatggtttgttaggtaatcaggcagatgccggtttatatacttttgcttccaatatgtcactgaatggtggtttgggaggatatatatttagcgacggtcgtcatatttataccaatcccgctcctgttattgacccgaatactacttgggagaaggtggaaagcaaaaatatcggattggattttggtttctttggaaacgctttgaccggaaccgtagatatattccagcgtgatacaaaagatatgttgggaccggggctggagtttcccgatatgtttggtgcggtagctccacaggctaataacgcccgtatgcgtaaccgtggttgggagttgtctttgaattatcgtggaaaaataggtaacgatattgattatagtgtcggagggtcggtttcagatgctgtttccgaagtgacggaatatgctaatgctaaaaagaatgatccttacggaagctggtatacaggccgtaaagtaggtgaaatatggggatatcgggccgaaggtctgattcagacacaagaagaagctgacgcttacaatgcggagtatgatttaagctatatcagtggaaaactgtgggaaccgggagatgtgaagtatatagatctggatggcaataaagtcattgacaggggagacaatagactggtggatggtgatatgggagaccagactataattggtaatacaaccccacgttatcagtacactttcaatggatatatcagttggaaaggattaagtctgagtgttatgttccagggtgtgggcaaacgtgactgggttgccggtggcgcatatttctggggatttggaccttatgctcaagttactgttttcaaggaacatatggattattggagaccggacaatccgggagcttattatccgaaaccttatattaattctgcgggtggagtagctccttatcaggataaaaatatacagcgtactgatttgtatttgcagaatgcagcttattgccggttgaagaatctgactttaagctatgacctgcctaatgcatgggtacacaaagctggcttgcagaaagtgcaggtgttcttttccggagagaatctgttgacatttaccaaactgaaaggtatgtttgatccggaagccatttttagttccaactcatatacaagtgagggaggaaagaactatccgatgaaccgcgtattgtccttaggctttattgttaatttataattttgatatcttatgaaaaaaagaaatatattattggggctggctttggcattctgttttacggcttgctatgatttggataaaatgcccgagggagtattgtctacggccgaaccgtttcgcagtacaggcgaaataagaaactatatagaccgctattatgaatttggtgtccgtacgcaagggttcatggctggtggtggaggtggtattgccggtaatgatgttaacagtgataatttggcatctgctgctgtcaattcgcgcctgatgggattaacttcgttgagcaatgcggtggctttagataattatacacatattcgtaacattaattttttgataaataatgccggtgactgtccggaaaaaggcagtgtagagtataatcatctgatgggtgaggcctattatttccgtgcttggttttattattccatgttttcagactatggtcggttggcatgggtagacaccccgctagaaccaaatctggaagtaatgatgttgcctcgcgagagccgtacatttattgccgataagattttggcagatttggatatggccatttcactgatgaaggagcagaataattcgtcatccatgcgtctgcacaaggatgtagcccgtgcgttgaagagtgaagtcgctctctttgaggctacatgggaaaaatggcattatgctaaggaaaaaaacaaacccgaaaagttttatgatacggaacttggagaggcagagttaatggcaaagatagacaactatttggatcagtctatcgctgctgctgaagaagtgcgtcaacggggagtatggaaaatatataataccggaaatgtggagaatgattataggagcatttttgaaactcctgatctgactgctaatcctgaaattctttggtttaagatgtatgatggagatcaggtgggcaatagtgtcactcgttatttgaatacaggtggaggtaatgtgggggttacagcatctttagtagatgattatttgacgatagacggccggcctttggttgggaaagagcttcttgatgccaagcgtgtctatcctacggagttgcttcctactgtccgagacccccgtttgtcgcagactgtggccttgcctggacagcgcatgcaacctgctggggctggtaatccgtacgttgtcggtttcccctcgttggctggcgatggttcagcatttggaacgaacatgaccggttatgtgatgttgaaacatgtacagatagattatactggagattatatctcggaatataaaggctctactcctgccattcagttccgttacgctgatgttttgttgaattatgcggaagcgctggccgagaagaacggggcggctaatgcgggcaagattatagagatattgcatcctttgcgcgagcgtgccggtatgccggatattgatttcgaccgtgaatataatacttctgcggagtatccgtttagaaatctggataaatatatccaagctgtacgccgcgaacgccgggtggaaaaagcattggaaggtcgtcgggtatttgatatcatgcgctgggccgctgccgaggagttgattataggtaaccgcgcacatggtgctttgtttataggcagtaacttgccggaacaatacgggccagagttgaaatatgaccaggcatctggaaataatatgtttttgacaggcagccctgatgatgctgaacgttacatattaccggtgcctccttctacaatgccgaatggatggcagtttaaaccgaaccgggattatttgttgcctatccaggagcgtatgattaatgtaatggatggcatgtgggaacagaatcccggttggtaaggaagtgatgaatgaatccaaagttatataaaaatgaatagaataaccagtagtgtattgtattctttgacgggagcagcgatgttgtcatcgctgccttcctgcaaggtaaagaaagagagcgacgggaatgagaaaaaaagcatgaatattgtgtatatcatgtgtgatgaccattcttttcagactatcagtgcatatgaccaacgttatatgcagacacccaatattgaccggatagccaatgaaggggtccgtttcacaaatagttttgtggcaaactccctgagtggccccagccgtgcctgtatgctgaccggtaaacatagtcatgccaatggatttacggataataccaccacatttgacggtaaccagcagactttcccgaaactgcttcaggctaatggctatcagactgctatgatcggtaaatggcatctggtatctgaacctaccggatttaattattgggacatcctgataggacaaggggattattataatccgaaatttattaaaaatggcgaacgggtacaaagggaaggctatgctaccaatattgtgacagatttggcaataaattggatggacagcatccgggacaagagtaaaccattctgtctttttattcatcataaggcgcctcatcgtacctggatgcctgatctttgtgaccttgacttgtatgatgatgtaacttatccgatgccagagaacttctatgataaatatgaaggcagaattcctgcatccaagcaggaaatgagcattataaaggatatggatttggtgtatgacctgaagatggcggacaaggagaatgagatccataccacaacgggactggaagaagcgggcagaaatatgtataatgctctgaatccggaacagaaggctgtttgggacaagcattatgatcctatcattgccaaattcaaacaggataagttaacgggtaaggctttggctgagtggaaatatcagcaatatatgcatgattatatgcgggttatccattccatagaccgtaatgtggggcgtgttttgaagtatttggaagagaacggattgatggaaaatacgatgattgtctatacttccgaccagggattctatatgggagaacatggttggtttgacaagcgtttcatgtacgaagagtctttccgtacccccttgctggtccgtttgccgggaggaaagaaaggtgatgttgatgagatggtgcaaaatattgattatggtcctactatattggaccttgcaggggtggaggtaccggcagatatgcatggagtttctttcttgcctttgctgaagggggagaaagtgcctgactggcgtaaatcattgtattatcatttttatgaatacccggctgaacatgctgtccgccgccattatggtgtacgtacagaacgttataaattgatgtatttttataatgacatagactgttgggaactatatgatttacaggaagatcctatggagatgcataatatctacggacaacctggaacggaagagttggttaaagaattgaagacggaattattacgtctccaagttcagtatgatgaccctattcgtaacatttacaaggattgacaacctaatctgacctaaatttaacatagcatgaagtattcccggtctttctgttttcaagaaggtcgggaatctttttttctataatcggacggactcattcccattgcatttttgaatacagtgctgaaattgcgtgaatgcttgaatcctgactgttctgctacttcgcttatggaaagtgtggtggcatctagtaatttacgggcatattccaaacggcattttatgatgtattcactgatgcctatatccatcattcctttagtcttgttgtagagtgacgcacggctcattcccatttgctttgctatgaaattgacatccatatccacattgctgatattttcattgacaatgcggctgaattgaagcatcagctgctcattgatgtgattcagattttcttgtttgggtatagggatatctatggtggcatagtgctttttcacgatgttgtgattatgcatgatattctgtatctggatagaaagtaaatccatgtcaaacggtttggttatataggcttctgctcctgttttgtatccttcttctatactggcgtcatcgacacaggaagtaagcagtatcacaggcatatagtttaagtctggtttttgtttgatatagcggcatagttcaaatccgttcatgcggggcattttgacatcacttaatacaatttgggggcgttgtgacgtaaggataggaagagcttccatgccatcatgagcttcatagacttcttcaaacagaacttgtaggttgcaaatcaggtaattacataagtcgcgatcatcttccactattagaatagaatgaaatttctctatgctgtcttgttgaggttgtttgtaatcgatgtcggctgatagatgcaatgcatcattcaaataggtttgaggtgtagattgaatgtcggcggcttcctgtctatacggtaatgtgaaaaagaaagtcgctcctttggtttcattattttgggctccgatgatgcctccgtgcatttctaccagttgtttggcgtatgacaagccgattccgttaccttgaaagctatgtttaccctgatagaagcgagtgaataaattggctatatcttcttcttgaagacctattccctcatcttttatagttacccgtacacggcttccattaccttcgaggtaagtggaaacagtgacagtagaattttcttcgctgaatttataggcatttgtcaataggttgttaacgacgatttcacattgactgcggtcaaaatacatagtttctatggtagtgtcaggagtaaatgccaatgagatattacgtaacgaaagttcatccttgaaatcatttaggatactttgcaaccattcgttgaagggcgtggaagacatgcgcaggatatttttctctacttccatcttgcgcatattcagaatcatgtcaatgatgtttttcatttgtcgtgcttgcttgaacgcaccatatagtttgccacggagttcataggggatttgtttgctgtttgtaagttgtttcaacggtgtataaatcaaggttaaaggggtacgcagttcatggttgatattgatcaaagctttcactttttccttgtagatggtacgttcctgttccttgtatttccgtttcagttgacggtcgtgagcttttatggtatagataatgaaaagaatgatgatgaccgcacataataggatgaaccaggattgttgccaccacggaggaaggacagtgaatttcagcaaagtgaattcagggctccagctaccatcgttctgtgtacattgaaccgttattttatagtcgcccggagaaatggtatgtaaaacaagatggggacgggatgtttctgtgtattctgtgttcagcccttttatgcggaaccggtagatgcgcttgtgaaatacatttcccccttccagttgtgtatgtatttttagggaggagaaattataaggaatttccatagttgatcgggggatgaagtgaactgttgtgccgttcaatgctatttcttgcaacttaagtgtgatgggaggtggagccgaagctggttttaaagctttgttgattcgtaccaatccctcggagccacccatgtatatgttgccgtcacttgccaccaatgcaggtttggctaaaaagtcgttaggtaatatgccgtccatctcattgtagatgacaaaatgatttttatgtggattataagcgtatatgattcccaatgaccccatccatacgatgccttcatggtcaatgactaaagaagtgattacgtcatttccatcgggtagctttaatggctctttacggtttgagggcaggtgaattctggtgactccattaggttcggctatccatagagtccctaaagaatcaatgcttgcagctaatatctggttatttttctcataagctatggtttcgtattcgtttttctctttgttgtattggaatacattgtttcggtcatgaaaaaatggataagtacggtattttccaatatagatccaagaatattgtaattgtttgttcttgaagtggatgggaataagttgttggcttccgggaatatatcggtaaaaagcattaccgtatagttctatttcgttccgatcattaactcgtatattggtgggtgcactggagcttgccagctttgcttctgcatctttgtccggaagagagaagcgctggtagtttcctgtctttttattgaagcggaagattccttttgaaaaactggatgctagcagttcggtttcggataaagggcaaatggatactattttttctcccaatgtttgcggatagtgggtaaaacgttccgtttgcgggtcaaagcagttgataccgcctccgtccgtaccaatccagatccgtccgtctttatcttcccataggcataaggggcatttgtcggacaagcctgaggctgggttttgtgcagctttggtataggtagtgataaaacctttttctgctcctagtacgccttcccgcaccatacctatccacatgtggttgttgctgtggcataggcatgtgactgaattggcagggaattgccggttttctttgtttgataagatttgaatatcatgagtgtccggatagattatattcactccgccgccatctgttgccagccaaatggctttatcccattctgttatatcaagaacgatatcgttgctcaagtttgaattacgggtattataggaggtcagcagttgtccatcctgattataacattttactccttgcccgtagaaggaaacccagtaacgtccggaggaatccttatatagatcgtatgcattggatgattcaccgaatggagaatcagttatttctcctgtatgtttatttaatagctttatttcccatgcattgtttattatcaggtaatgagtggagtcgaaaggctccatcttgataatatggattcctgtcgtttttaaagggattgctttggaatgttttaattctttttcatatacaagcaatgtgtcggttacaggtatcagcagcttgcttccttcagttgttataatggaagcttttaccggctgattatgtcgcagaaaaatttgcagggaatctttctcatattcataataactgattccttgtgaggtgatcgcccatatccgttcttcattatctccgaaaatatcgttgatgtaatggctgtttttacgtaataaatacggtagattatatttcttgattttttctccattgaaacgatatattccctgagtggttccgacccataatgaaccgtttttgtcatcgtatagggatataatagaggttggaagtccttctttaatagaaagttgtttaaaatgataataaggacggttgatggaataagtctttatgataaaacaacatagaaccaggattacatagacggtttttctcattcagataaggtcttaaaataaatatttgtacaaatataagaaataggttttgaaattcaaagcgaaaagaggatattgataaccgaatggctgtgatattatatataatttgtcattctgaacagatgtaaaagataacatagtgttcagaatgacaaaatagattaaaaaatgagggggatttgtctgactgtttttttgtccttataaggggatttttttcagtttctcattctcaaccattactttatatgtctttcctttagttgtcttaaaggtaaaagtcaggttaccatatctcagattgcagggctcaccggctttggacagaatgacggcttcttttaatttaccatcctgccagataatgtcaatttcaaagttacctttggcacaaagccccttgactgaaccttctttccatgcgtctggcaaggctgggagtaattggatgaatcccatgtgactttgcaacaacatttctgtgataccggcagttccgccaaagttaccgtcaatctggaaaggcggatgggtatcccataagttgtccaaagttccattttttagtaagttgccaaatagtttgtaggcgtggttgccgtcttgcagacgtgcccattgattcagtttccatcccatgctccagccggtagctccgtcaccgcggtgttctaaaacaactttggcggcattggttaattcgggagtagtaattggtgaaagggtgtggcccggatgcagtccgaataaatggttgacgtgacgatgctcgtctttgggatcgtctatgtctgttgaccattccattaactgaccataacgtcctatttgatagggtacaagatgtttcagtacatattgccattgtttacggtctttggaatcgacacccagtgctttgctggcatcaatggcgttgagcaatatttcgcggactacagcatgtacaaaagtagctccttggtctacaggtccatgctcgggagaagtggaaggagcagcagtgtaggtcccgtccggtttatgccataaatagtctacagcaaagttggcactgctcttgataagatcatagcctacttctttcaggaattttttgtctcgggtgtaatcatagtattcccaaatgtgagttgccagccagggacctgccatcgggttaaagttccaggacatattttcatcggtcaaaggggaagtaaatccgaaaatgtttccggatatggaggctgtccatccgcgtgcgccgaaataggcttgggctgttttttctcccggctttaccaaggtacggatgaagtctatcaaaggccatacacattcattcagattggtggagcaagcaggccagtagttcatctggatattgatattattatggtaatctacatgccatgggccatctaccccgttggcccacattccttgcaggttggccgggagattgccggggcgtgaactggcaattaataagtatcgtccgaactgataatagatttcttccagccggtagtccggatttcctttgcgatagcgtgccagacgttgatgggtgggaagatctgtaacggcaggatattgcaaggtcataggagcatgagggttcagttgtagtttgactctgccaaacagttgggtatagtccgttttgtgtcgctcgcataattcgttgtaatttttggcagcggcagcgtctagcatggccagggttgtttggtccggatcaggaccgacatacgtcttggggtctttgaagtctggattgaagttgagtttataatcggtatctgcggtcagcagaaaaatgacttcatccgcattgcggacaatgaatttgccatcagtcgtgttcaggcttcctcctttgtttatggcttgtatgcggagagcaaatttcatttggttgtttttgaggcgaccggtatagagcaaacgattgggaccgtctgttttgatatcacctatggcttcagggttgctgccatagctgaatatcaggttttgcatgccgggacggtcggctgtgaacttcagtaccatcacgctgtcggggtaggaaacgaagtatttacgctcgtagttcacttcatctttgcgaaaactgactattgccatggccgagtcaagagacaggatgcgtttataatcggtcataccgatttcacttaaaccggtttcgatgtaagcttctcccaatgtagtaaaggagccgaagcgaaaaggtgtttcacggcttggctcataatcggccagtccgttgaaatttttgcaggtaagttcttctgcttttttctggttaccgtctgtgaatgcttggcggatttcgggtaacaggtgtgccgactctttatttacgttccaataataagttgctcccttttctgtgttcggtcctccgcgccatagtgtcttttcgtttaaagtgattcgttctgccgctatagatcccataacattgcctcccaaactgccgtttcctatggggagcgagttgttttcccatgctttgtctgttgcaggagaataccaggaagcgcgtccgtccaaattattaggggtatcaaaccagatgctcagtcctttggtgtaatctgtactctgtgcctgtaaggaagctgcgaataagcttcctaaaatgcatagttgaagtttcttcataaattaatgatattagttaaaggtatttctacaaaaatacaattagatttttatttgtgagaaatgtaatgtttgaaatttagggtgatttcctgtttttataggtatatcaaggttgaaagataattttcatcgaacatttcattggcgatatcccacagatgttctgctgtcagcatttctatccgtttgaatacttcttccggaccttcaaatttaccatagtgcaagaacgtttttcccatatccaatgcattgttctcaaaattgtctccggcaactcctatttgtccgatgatctgtttttttgctgcactcagttgtgaggaacttagtttgctgtcacgcagttttttcaattctttatgaactagtccgatgcaacggtctgcatcttccggatctgttccgaaatagatgcagaacactcctgtgtctgtgtatgaggtcagattggcttctacgttatagaccagcccccggcgttcgcgcaaggaaacgttcagccggctgttcataccgggtcctcccagcagattgttcagcaggtaaagtccggttcgtttttcattatatgcattatatccccggctacctatcattacatgggcttgatgtgtttctttattcagtgtcaatgtcttaggaatatagagaaaaggttctgtccgttggcgttcggtaatggaaaaagggatgtcggctgtcactttctctatggtgcgtatcactttcttaaagtctatattgccttgaatgaaaaagatcatattggtagctttgtaaaaacgggaagtaaaattcaaggcgtgttcacttttgaaactacgcaataagtccggtttgcccaaaatattccttcccaaaggatgattgggaaaaatcaattcctcgaaatcatcaaaaatcagttctgacggactgtcttcataactttgtatttcatcaataatcacttccacttctttgtcaatctcatgttgtgggaaggtgctgtgaaatacaatatctgccagcagttctgctgcccgtgagaagtgttctaccagaaaagcactgtatatcactgtttcttccttattcgtatatgcatttaaatctccgcctacattttccatgcggttcaggatgtgccatgcatgtcttttttgtgttcctttaaagataaggtgttctacgaaatgggccattccctgttcctgttcgttttcatcacgggttccggcatcgacggcaaagccgcaataggctacattagactgattgggagcgtgaataatgcgcagcccgttaggcaaggtgaaagtattgtatgacattgttttttgcttcaaataagtttcggttggcaaaaatacaacaaaagttattgccgttcttcaaaaaatgcagatatttgtatttactaacagaaaacaagatgatggataaaattgctattttctgttccgcatccgagaatatagagcctgtgttttttgaaaaagcacgtgagttgggcgtttggatgggacaaaacaagaagacgttagtgtatggaggtgctaatatcggattgatggaatgtattgccaaggcagccaaagacaacggttcgatgataatgggagttattccgaccaagctggaagaacgtggacgagccagcgatttggtggatgtgactttccgtacggataatttgagtgaccgtaaagatgtgatgttgaatgaatcggatgtagtgatagctttgccgggaggagtgggtacactggatgaggtttttcatgtaatggcggccgctacgctggactatcatcgtaaaaaagtaattttttataatataaatggcttttggaatggcattatcgactttttggccggattggagaggcagcattttgcccatcatccgttgaacagttattttgctgttgccaatgacttgagagaactaaccgaactacttaaataatattcatgtaacctattatgatgacatctatacacgaattgttgcagaaagaggctcaggctgttttgaatattcctataactgatgcttatgagaaagcagtggaattgatagttgagcaaatacaccgtaaaaaaggaaagctggtgactaccggtatgggtaaggccggacagatagctatgaatatagctacgactttttgctctacaggtattccggcagtgtttttacatcccagcgaagcccaacatggggatttggggattttgcaggagaatgatttgctgcttctgatttctaattcaggaaaaacccgtgaaattgtggaactgacacaacttgcacataatttgaacccaaatttgaaatatattgttattaccggaaatgcggatagtccattggcccgggagtctgatatttgtttatgcaccgggcatcctgatgaagtgtgtgctttgggtatgacccccacaacttcaactacggttatgaccgtgataggtgatattttggtagtggaaaccatgaaaaggaccggttttaccatcgaagagtatagcaaacgccatcatggagggtacttaggtgagcgttcacgcgagttaagtaagtaaaataaaatagaaccggaacgcaaaggacacaaataatgcaaatagaattttattaaaggatttgtgtcctttgtgttccggttttatgtatataaatcgtaaatataaaaatgagaaaagtaataggtataggtgaaaccattctggatattctttttaaagatagccaacctacggcagcagttcccggtggctcggttttcaatggaattatttcattggggcgtttgggagtcaatgtaacttttatcagtgaaacgggaaatgacaaagtgggcgatatcattctgaagtttatgcgagagaatggagtaagcacagatcatgtgaacgtgtttcctgaaggaaagtcacctgtgtctttagcttttctgaatgaacagaatgatgctgaatatcttttttataaagattatccacggttgaggctggatgtgacaatgcctgaaatacatcgggatgacattgtgatgatcggctcttattatgctgtaacgcctcaattgcgtgataaggtgaaagaactgttggataaagctcgtgaaaaaggggctatcatttattatgacgtgaatttccgcagtactcacaagaacgaggcgataaagctgcttcctgttattcttgagaattttgaatatgctgatatcattcgcggctccgttgaggattttgagaatatgtttggtttgacagatgcggataaggtttataaaagtaaaattgaattttattgtccgcattttatttgcacgcacggtggaagaggaattcgcctgtatacaaagaatataaaaaagcattatgaagtggatcctttgcagactgtcagtacggtgggagccggagataattttaacgccggagtggttttcggattgctaaaatatcgtatccgccgggatgatttggatgaactgtcggaagatgactgggaccatgtgattcgttgtggaaaggatttcagtgccgatgtttgtatgagtttgaataattcgatttcaaaagagtttgctgccggttacagataaattggatagctctcattgttttaaactcttttattatgtatgagaacctttaaattaatagcaggtctttcctttttgctgctggtggttgcctgtcaggacaaaaagcggtcttcgcagattaaggtagcggagaatgaatcgaaatatgtggttttggcatatgtcacctcatggggagaaagtacgcctgatccggcatgtttgactcatattaattatgcgttcgggcatgttacagataatttcaaaggaatacgtatagataatgaaccacgtttgcaaatggtagtggggctgcgtgaaaaaaaaacgtctttgaaagttttgctgtccgtaggcgggtggggaagcagtcggtttagtgagatggcacagacagatagtacacgtatggcgtttgccgcagattgtaaacgggtgatagaccagtttgatttggacggaattgatatagattgggaatatcccggtataggaactgccggtgtatctttttcgccggaagatactgataacttttctttgttgatgaaggatatacgccatgctgtcggtaaagacaaactgctgaccattgctacacaggcaggtgccaaatattacaacttaaaggctgtcgaaccttatgtggattatgtcaatatcatgacatacgatatggaggaatctcctaatcaccattcggccttgtaccgttcggaaatgactgaggaatggtcttgcgaggatgcggttgccgcccatgttgccgcaggttttcctgtcggacgcttggtattgggtattccgttctatgggcatgggactaatgaagctccagaattattggattatcgtcatattatcgctttggattctttacagagttgttgggatagtgcggcacaagttccttatatgataaattcgcaaggacatgtggtcgttaattatgagaatgcccagtccatcgcattcaagtgccagttcctgcatcagaaagggatgctgggggctatgtactgggactatgatagcgatgatgaaaagggtacattacgccatgccgtctatcaaggtgtaatgaatccttgattctttcagtttattttttctttatctgcatattttctgtaaagaggataagccgcttgcagtattttgttttttaataaaggcggatagtcgggataaaccgataaaaaagcttctacttctttgtaggccgcttcgctatcgtgattccttaataaagccccgacccaattgcgagggaaaaagatatctccggtgcgttgaacttctgtcagtttttccaatgccggacggatatatttcaccgcataatcttgtcttgtaggatgattcagatagcttaaggttgtagctgcccaaggctcaatccttctgttttccgcttgcaataaagatcggaataaactgtccaattttaaagtatcggcagtcatcgcacgtgatatgaaatcgaattggcgtagacggtccggattgtggatgcgttggcgttgtgtctgaagtatttcttttccttgctcaggtatgcgcaaggccagttcgtaggccaatgtagtgtaatctctttcatttaattgttggactctttcggtttcccataaggaatagaggcactgaatcatagtcggacttgctgcttctgtaatcagaaggcgtaataactggatgcgacaagaaggaatcggatgagaatggctgagtttataaagctcattttctattttatcacgttctgccgaagatatctcttgcagaggagaggacaggtaattggttaatgttgaagctatcaacgggttcttttcacaatgtattccgttgagtaatgcattcatccatgcagtattcggaattccttttgcttgataattttcatgcatcatcattaaaactgcctgtcgggttgtttcattgtctatttcttgccaatgttccagcagccaatggagactgttgttgtcaggaacaaacaaaccatatcctctcccgtccgtattgggcagaatacgggtgggggtaaagggtaacgtaatacggcataaactgtctgtcagactggcttctatcgttgtgtcccttgttccgcaaagggtgatattgaatttttgaggccagtttaatcctctttgatatggatcttgctgatgtatggtcaactgtttgtctgatatttcgaatttgattatcggcattcctttttggtttacccatacatcgctgaaagcggctagatcttgctctgttttactgtctagaatttgtatcaagtcatcccaagtagcgttggcgtaagcgtaagtttttaaatattcttgaatcccttcccgaaatgcttcttttcccattgattccaccagttttaccatcatgacaggagctttgttataaatgatctgtccataaattaatcctgcattttgaaggttatctagcggttgccggatagcagtggttccgggtgtacggtcttctgacaaggatgcggctgtataagtcttcatccaattcagctggtgattgacttgcgggaataatggttcggtaatcagagctgcaaaataattggcgaatacctctttagtccagacatcatcaaaccagttcatcgttactaaatcgccgaaccacatgtgagcggtttcgtgggcgattaattgggttcggcgaagttcttcatccggagtgggattttcgcttaggaacatttgcgtgtcattatataaggtggcgcctgtgtgctccatacctccatattggaatcccggcaagataataaaatcgtatttggcaaaaggatagggaacattggtatattcttccagccagttcagcgaagcggtcacttgtttgaagatggtatctaattgagctacctttttagaatctgtttcgcggtaatatgctgagattttccggttaccttctatatattcttgatgttctaatttaccggtgacaaaggaaaaaagataagtgcttaatggttcagttggggcaaaagttactgttttgcagttgccttttgtttcttctttagtaatataggtattggaaacagctttccattctgttggtatatccagtcgtaaggaaaatgtggctttcagattcggctgttcgaaacaagggaataaggtacgggcacggtctggcactaatagcgtatacagaaattcatcatttctgtttagcgactggtttccggcaataaatttgatcgtgatattattttttccttctactatgtttttttcaggtaggatgatgtgctcgttatggaattcataacgggcagtttgtccattgacggataccgattttattttttcaggcttttctctgaagtcgagaataatttcttgcggtgcatccagattaaattcaatggtaatctctccatttaccggtactgatttctgttcaggaatggagaaatatagcttatacttcaactccttaatctcctgtttgcgcagtgttgccagttcttgcgatacgccctcgtcgtagaaacgaggattgcttgtggtctgttggcaactgcataataataagctgcacatgaaaataagatatccgatatatgttttcatcatctaaaatttatcttggttatctgcggcaatttttcggatgccgcgctgtgaagctatgaatgcacctcccaatactcgtttcccctcgtaaaaaacggctgattgtccgggagcgatggcggatgcttcggaaaggaaacggaccaatagttgtttttcatctaatacgagcacttgacacggaataggcttgctgcgatagcggatacgtactgacaagtccttgcattgcagtaaatcctgcatttctgtgatatgatagtcctctaccaacatatattctgctttaagttcctcggcatctcctaacatgactgtattcttttctgcattgatgcgtagtacgtatgctggatgccccaaagcgatttccaatcctttccgttggcctattgtataataaggaaagcctttgtgctgacctatcttgactcctttgctatttacaaaccatcccggtcctacttgggtgtcaatatccgggcattgcgaacgcagaaagtttcggtaatccccttctataaagcagatttccatactttcacctccacgggctttcgcttcgaatcctttttgtcggagatattcccgtacctcctgcttggtataagttcccagtggaaagagaaaacgttgaagtatctcctgaggaagtttccatagaaaataggattggtcttttgtttggtcatctcccgctactatatacagttttcccttccgttcttccagtctgcaataatgcccggtagagatatgggcgcaattcgtttggtctgcccattcacagagaattcgctctttgaatagcggattgcaaaggacacaaggattgggagttcttccttgcatatactcatctatgaagtgttttacaataatctgtttgaactctttcctcacatcagctacatggtgttctattcccaaccgttctgccaaggcccttgcttccagtacatcatcaggttcatcttgaccgggggtggaaaagcgggaagggacatcccacgttctcatggtaactcctaccacttcatatccttgttcttgcagcatgatgcacgtggcggagctgtctattccgccactcattcctaccaggactcttttatctctgttattcattatataaatagttcaggttcacggcgtgccacacatttttggtgtagcatgggggtgtaaggagtatcaaaaactcgtgcaccattagggcattcttttacgcaagcgcagcacttgatgcatttggtaatctctgtttctatttttccttcatcgcttaaagcaatggcatgagtaggacatacttcgatgcattcgccacaggcgaagcattcttcagtgcagactggagaggcaggagtagaggggccaacaaagcgataaggtatgtttccttttaggtaaaaatcggataatgtttcatccttctccagttttgtcagacagtcttttccaaattgttccgcaatctgtaaatcggtaacatccggacggccttctgcaatgggcatattaggacggctgtagctgtgttcaccaataaaggcaccggcagccagtggggtgaatcccaattgaatagtttcatctctcaattcgaccagtgcatcttcgtaatcgcggttaccatatacagcgactaagatagccggagcattgttgccttttaatcttcgtagccgttgcaatgctattggggctaccctgcctgcatacacaggaactgcaatgatcgtgatagaatctttgatttctatcgggctactattctcatccgtagtgagatctatttctattcttctgcccatacctatactttctccgatggcacgggctattttcgcagacgtatgtgtaggcgaaaaaaatatgatgtgattgcttgtatatgttttcataaacgcaaatatagtgacttttgtccaaaggtagccaaatatatagataagatgtgtaaaggtgataaaaattgtctttatatgaatgtaaaaaatgattgttaaatatctttttttctattttagttaatagaagtgatacggtaagctatattagttaaaatatatttagtggtgaacaaaaaaatcccatgtttagggaatttgaataattcttaattagaaaatgaatgacatatttatattggattattttgttcttttctggtttgttttgttgaataaagggataatttacaagttctggattccgctttatagaaactaagctatattttgactgttataagtttaacttcttcggcgtacttatgctattatattaaggtgtatagtgaaagtaatgtcttgttttaataggtctatggggctttctatggttgtttgtaaggtaaagaatatagagatattcctatttcttaaaatattcctgtattttataaagatttttagtggaaagtcttgcagaatagagtaaaatgggtacttttgtccgatgaaattatggctattatagaaactgactaaaatatggatgctctatttcaaacgcaaagcaatgagctttctactacaacgcagaaagaaaagctgtttaaagatgcagaacggcagtggaatacactgtctaccgagaaaggagcgcccggaagaaaagttgattttgagatctataaaagcattttgtataacctagaaatcagaaaagtatatttggattcaaaactctctttagaaaagtttagttcaatagtcggcacgaatacgacctacctgagtaatgcggtgaacaactacttcggatgcaatttcaagcagctccttaacaagtatcgtgttgagtatgcaaagtccttattactagagggtacgtattcagccagttctctttttaggaagtgtggttttgcatcccaaagcgttttttatgccgcatttcataaaattgtaggcgcatctcccttgcagttcctatataaagcaccatccggacacagaaaaagatttaaagtccttttataacaataacattttgagtttttaaatttataaatttaaagtttttctattatgaacaaaaaatttttaagtgcaatcctgtttggagcccttatggtcacttcaacaggaacatttgtatcttgtaaggattacgatgacgacatcgaccgcttggatcaagaaatatccaatgtgaaagatgcaatcaaggcccttgaagacaaagtaggctcaggcaaatatgtcgaaagctgtactccgttcactgatggtaatggtggttatgaaatcaaattcagtgatggagagaccattaaattatacaatggtgcaaaaggagaacaaggtgaaccgggcaaaccaggtactccgggtactccaggtacttctgctgatgattatgtagtatcagtagaagaaggtgaatcagcttatgaattagttattacttatgctgatggcactaaaaagactatcagtatgcctaaagctacttctgtagttagcggagttaagtttatccctactttcctttctgaaggtgaagctgccagaatccatttccctaccatcgttactgatagtgtggcaggtaaaacagagattacaggtgcagattggggtacaaataactttagcacatttaaaatcgtttactcaggtaaggcagacgtgaagtatcaggtaaatcctaacagcgtatcattcaaagatatggaagtggtaggatttgttcgtgatactgctgaaatatggaactacaatacgaataacaagaattgggaattgttcaacgctggacaaaaactgtacactgatggaaaaattaccgttgaatcttataaagaaggacatggtatgttaaacttccgtgtaaaggactgggcttttgctgaacaatctaatctggacgaaagaacagtatattcattgagaattaagaacaatgaccaaatcgttcattctgattttgttcccgccaagcatgaagtaattttgcagaaaaacgtacatttggttaaagtagctgatgcatttgaccaaactaacgctcctgctcagattaaaaatgcaattgctcctaacaaggtaaattatagagaattcatcaaagatgaatattatcttaacaccttgaatccgaccggtactgaagaggctaaattgaaggcttatcaagcagataaagctaagttcgaagccaatgctgaaaaccagttatataaaggagatgctgaatctaaagatgatgcagaacgtattgttgtagaattgaactatacaggtgatggacattcaaaaaatttgaaggacatcgtaacttcattctttgacaaacgtatgggtagagcccaagacgctcagtatcctctgatggagaatggttttgatgactattcattggtgtttgaaccggttgacttctattatgatggcgttaaccagacaaaacgttatttggatgttaccaaagatggtgttgctacagtaaaacaaactccggacccgatttggggcgcagaaacagatgccaatcacacagctgctatagacagaactcctattgttcgtgtgaaactggtagcaccgggtgaagacaatggtaatgtagttaaaacagcaatcatcaagattcacattgtacgcaatgcagttgttgctcctgaaattaatattacagaaacaaaagacgtcactctgaaacatatcaatcaagttcttgacatggatatggataagatattcaaccataaagatgtacagttgagtaaagacgaattccgtaagacttatgatttcgttcctgaatttgcaacagcagatgaggctaaacaacacgctgtatatgcatgggatggaaaagataatgcagactattcattagatccgaactttaaacctgaagaatacaatcagttgttcgttacagtgaagaatacagcattctctcgtcatgacgatcacgacgtttacactgttaagggtacatacaagccaaatgctgatcataagggattatctgacatccatgttacttatactatcaatgtgaagtatccggatgtagttgctcctgaaaagactaagttgaactgggtagatgattcttacttcattgctcacggtagatacgataactttgatgatcctaaaacttatgaaatggttgcagcattgaatgacgaattcgatttgatcaactataatccttataagggtcagactcatgataaggattgggctagagctaccttgtcattcgaattggttgaccagcataataacgcatctaagatagttgacggtcacaattccggcatccgtttgtatcaaggtaaagacaacaagtggtatatcgctttggaggctacagacgaaggacgtgcttggatcaatgctgctgacgctaaggatttgaagaagatcaaaatgcgtgccgtagtaagcttcaatgaagatgttgacggattgtatggtacttgcaacaaggaagccaatgctcataacaagtatgctaaagaagattacaataacttctcttgcgatactatcaatatggtaaacaatactccttgggccaaagatcatactactacttatactggtgctcctgctcctgaaaatggacgttctacagtggttatcgatgaatttgaagttgcatttgtaactccgatggtattccacgcttacgaagcaggtcctttgtatgacaagtatcaggaagctgaaaatacagtatcattgaaggatgcattcttcttgtcagattatctgtggtctgaaggtgctcaggcacaattcaataacaaccatgttatctatgatcacaaagatatggctaagaataatactttggttcagacaggtgatcaagctggttggtcaaagaaactggtagttgaccataatgtattcgatgttaatacaactgttaacttcaaggtttctaaggcatactttgctgacggaagtgaactggatgctgaaaacatgaagaagatcaaacttgataatgctaagcagactatcacatggatcaacaatggtgaagatattgctcaaccatttactattgatgtagaagtttgtgtaaatcacaagtggggcggtatctgcgaccatacttggaagaatggtcttggacattctgttggaactatccaaatccaagttaagaagcacaatgacaagtaattaatacgctcattgtttataaaaaaagaggggggcaaaatgttcccctcttttagtttttataatcgtttatccaattatattgtgtatgaagtatatatatgctgtctgttttctgttattagtatgtggctgtcataaagaaaatgacacccctgttgttttacctgcacggacactattggtttatctgggaggagataataatcttgatgccgaaacctatgacaaacttgttcaaattaaaaatggatgggaagacgggacagatggaaatataatagtgtatcaggatacaccatttaaggactctccacgattgatggaaattgatggaaaaagtgagaaaggctatattaccatacatacctatgaccaagaaaactcagcctccccccaagtgcttaaacgagttataaacgacgtaactcggctttatcctgctaaaagctacggtctaatcgtgttttcccatggcagtggctggcttcctccacatacattggttaatggctcgcggtctatcatcatcgataatgacaatgaaatggaaataacagattttgccatggccctcccggaccatttatttgaattcataatctttgaagcatgtaatatggcaggtattgaggtggcttatgaattaagaaataaagcagcatatatcatggcttcctctgccccagtagtatctccgggatttactcctatctataccggcagtatttcctgtctgcttgaagaaaatgctgatttgcaaagatttgcagaaaattattttcattattggaatttgatggaaggcgataaacgttctgctaccattagcataataaaaactgccggattatcaaatttagcgaatttgatacgacagatcaatacagaaacatccggctcttttctcccggtcggtaaccttcaaaattatgatggagttttaaaagccccattctatttttttgatttcgctcaatattatcaatcattatcagatgaaaatacatacaatgcacttcaagagtgtatcagccaatgtgtggtttacaaaagaaatactcctttttatgctacggaagaaggaacattccctatcaccgccttttcaggtatgaccacttttatcatgcagagagaacttaatgacttgaatgaagaatatacaaaactacaatggtataaagatattaatacacattagataatatgtataacactgacaaacaatgatatagcaaattcagtagaagaagtatatcttattgcagaatagatagattctaaatacttttcaaagtatcctttaaaggacagaatgccaatatatatggacagaaacaggtgattatccattaataggaaacggaaaaacttgtcataagcagaaaaaacaaatcctttatttgctttgtttgtcatttactaatatctttgttttatcattcattctagaaccgcaacaaaatatgaaataccctattggaatacagagttttgaccaaatccgtgaagatggctatgtatatgtggataagaccggtttgatttacaacttggtaacacaaggcaagacttatttcttgagccgtccacgccgttttggcaaaagcctgctggtaagtacccttgcctgttatttccagggacgcaaagatttgtttgccggactggaaatcgacggattggaaaaggactggtatgagtatcctatcttccgtatagactttaatggaggactgtatacacaacccggaattctggaggctaccattgaaggctatttagggaactgggaagatatttatggcaagaatcccaattatacaaccataggaacccgtttcattgaaatacttcgccgggcttatgaacagacagggcggcgtgcggtggttctgattgatgaatatgacaaacctattttggatgtattagatacggaagcttgtttttatgatgattatggaaagcaagttctgttggagaaccataaccgggaaatattgaaatccttttattctacctttaaaggagccgatcaatacttgagattcgtattgttgaccggagtaacaaagttttcccaagtaagtgttttcagtggatttaaccagcctaaggatatcagtatggatgaacggtacgaagccttgtgcggtatcacccagaatgagctggaagcatttttcgaagaacccaccatacagttggctgctaaatatcagtacacagtgaaagaaatgaaggaacttctcagacggcaatatgacggatatcattttggagagaggatgaccgacatttacaatccgttcagcattcttaatgcttttgacagtatggcaattcgtgattactggttctctacaggtactcccacctatttggttcgtctgctgcaacacagccgcgagcagataaacgaacttgccggacgttattatgttccctctttgtttgtggattataaggctgatgtggaacagcctctacccatgatttatcagagcggatatctcactattaaagaatataatagacgtatgggaacttatctgctcgattttcccaataatgaggtgcgtaaagggttcttgtccgtattggcagcacattatttgaaacccggaggtggagaggtcaacagttggattatcgatgctgttacttgccttgagcaagggaatacctccgctttttgtgattctctgaccgcctttcttgcaagcatcccgtatgactctcacgcttccttgaaggaattggatatgactgagaaacatttccaatacactttttatctgattctccgtttgataggagtttattgccgtgcaatccattgtgagaatcgccagagcttcggacgagtggactgcatattggaaatggacgaatatgtttacattttcgaattcaagatggacggaacagcagaggaggctttacagcaaatagcagagaaaggctatgcccgatcttatttgaccgatgaccgtaaaatagtctgtatcggggtgaatttttcttcccttacacgtactgtggaagaatggaaggaaataatttacaggtaagatttagtcatagtcagcctaaagcgttaaacaaaagattgccttccactattttttatgggaatataccggtaagaatgttcatgctgttgccggcataacacatttaattttcatctttttatcattttgtttttctttttgctaagaatgaattattttcgcagccgaacacaagtttaatttcttaccgacaataagcagacatgctttaatcctcaaccaattcaacttgtcctcattttaattttaacggataagctgatgttttgtccctcactattataaaataaaagaatgaaaagatcattgtatgtatcgctattgacgttcatgtacttctctgcctgccaaggtagtgaggaattagagcaatcacaagaaaaagagtacacggtatccattatggcaagaatcgggaaaacagtttccggagcacgctacttgcaagatcatgaaaatgccatcgctagttttagtaaaaccgatgatataggtgtttttatggacaatgacagcgccgtccgctggatattcgatggaacttcctggactacagaaaagagtgtcttttggaaagataaaaaccaggaacatactttttacgcatattatccccactccggttccaaagccgaaagtaaggaaaatataaaaatgccttctctcgacagccagaacgggacttgggaaaatattgaccaatatgactttctagtagcatccaggaagctttcctacgataccgaccttggcaatgtggccttttcgggcgattattcatttaagcacgttttgtcactattaaagataaacataaagggtgaaggagatatggcacaggccgttattgacaaaatcagacttgaaggaaatgggttgacgacccaaggatactactcctttgaaacgaacagcatcaccatcagcgaaactcccaaggaaaccttccagattactccgtcacacaccatgaacaatcaggatgtttctttttattttatcctgaacgggggcgagaatgacggaaacattgatccgaaagccgtgaaaaaccattctgttaatctcaccattgaatatacccgtaacaacaaatattacataacacgacgagacgacctgtctccgggcttattgtccggatgtattcataaatacaatattgtagtaaaagacggaaatgtaattataacgggaggaagtatttcgggttggactccgggaaatgaagaagaggatatagttataaatggagaagaaataaacccacaaacaaataatatgttatgaattatagattaaccgaattaaaggtgcttctgtttctattgctactgtctgctgtttcttgccaacgcccgatgtatgatgaagaagacgatgaagacggagtctcgcaaacaaatcttcctttaaagatatctgccaggtctagcggagaatcccagattaattatccggcctatatctatgcgtttgcagaggacggcagctgttctgccagtctgaaaatgacagataacgcccagattgaaatgaagttacctcctgcccgatatactattgttgcaatagccggtttgggagaagaatatatcgttccgaaagatcctagccttgatgatgtaattgttatgaaagaaaataacagaagctcacgcgcgctaatgatgggcacttcaactgtgacaattgccaataagaaaaatatatctgtttctgtaaccctctattatgctgtatctttagtcaatatcagtttggaagatataccggcaaacgttaaaaaggtgagtttgcagatttcgcctttatattcttccctgtcgtttacaagggagtattccggcaaagacaagagtacggaaattatttgtgagtctgagccgggtggaatttggagtgcaaagcctttttatatttttccggggagcggctctcagaccgttttttccataaccttggaagataatagtcagacaaagacgtttggatacactttcaaaggaaagccggaagcgaacgtgccattgaatatcgggggcagctattcgggtgatgtcacggtagggggcagtttgatatcaggtgaatggaaggctccggtagacatcaaattcaattttggcggtgctgatgaaggtaatggcggtagtgagccgcctcccattaatccggatctttccgggctacccgaaattggcggtatctggaacggcggtattgtagctggcatagagaatgcaagttccacaggggcggatattttgttgatgagtctggatgagtggagtggattcgcttccgatgtgcggaatatcatacaggaggaggaagcagacggatggcatcttccgactgaagaggaggcaaaaatattgcataagacgttcagcggatcatcactggatgaactgaatgaaaccatagagggattaagaaacggagacccgttattggatattgagaaacggtatgtatatgatcataacgggagcatatatgcattcggatttaaaacctcatccaaatttttacaggcagggagtacggtgaaatacaaaatacgtttggtatgcagcgctcattatgatgccggatgacccattcatatactagaaaagggcattcacacttcttgacaatatatgcttgagagtgtgaatgcgtctaatcgacttccataccgggaatctcatttccatagataaattctcaattaattgaaagttaacattctaccacccggtatacatttcccttggtggtatgtacccgttcgcccagctggggcaggatacggctcaggctgtaggcggtcatccctctcatgatcgaaggatgggcggccttcatacgttcaaacagttgggtggcggagaggctaagcacttcctgcggattgtcctcttctgtagcaaagcgaaagcaaaggcggaacacctcttcttcgggtacatgcttgtagaatagggcattatgttgctgtatagtctgttcctcttctttattgaaccagcttcgttcaccggatagaagttctgttttaagctgggcgtacaattgcttatgctctacggacgtggtgcagtctatggcatgcttcagactgacgcaaagaaagcggcgtgagccggtgcggtctaccagcaaatcctcccggttgctggtgccgatgaacgaggcaatacggggaagcgatgaagcgctgtgtttgtaggccttgcggatattcagtgcggaagcttgcatcaggttcttcagcaaaggcattttggacgcacctagtttgtcgaattcatccaggttgattaatccgtaggcagccagcttggcttcggcggatgccggggagcttaggtcgtaactttccgtgtagtaggatttcagcctatcgggcatcagcagacggcagaacgtacttttccccaatccctggcgactgctcaccagcaggggagccacactgttggcgcggttgttatccggattgagctgcatccattgggcagagagtcccagcatccaacggtggaaaccgttcacccataccgggtcgtcggacaccctgcgtgccaacgcggacacccggtccgtgccgtcccattcgggaagctgttcaaaataggcagtaaagggatggtattcactgatgcggcgtgagcgcacaaagcgttgaatgtccctgtcccaacggtctatgcccgtttcaatagcctccagacttagtgagttcatccatcgttcgtccactttggtgtaacgcagatgagtatcgggaatgttgttttctacacttgccacttcagtttcttcagtaagcacattgaaccggaagcggtagcgggaggtgaggaaagcggtcacttcctgcatcagggtatgtgatttcgccttcttgccagtatcttctagggaggttggtcccgcttttttctgaacatcttttttcaagtgagcggaatccttctctgtcttttcagttgagactgtcggatgtgtccgagaatcgtccatactccccggcaggttatccttaccgttttcagtgagaagaacctgtgagtcggccatctctcttactccgtcttcgtccgacacgatgtagtggtaactgcccgtgggagcattcccgtcggtgcgcggagtccagttcaatgccagaactacttggccctcgcggatatccagcgccagacgcacgccgggtatagtccggcaaagcggcatcagcccgttgagagcggatacgagatcacgacgcggtgttccgtcaataggaacagggcttgacaggaatttgcttccgaagaagactgttttgagagtagcgaatacattcatgagttacttttttaagtttggcaaactacaaatatacaacataaaaaggcgtttgtcaagagggggcggaaatatggcagatcttggtgcaggattcgatgaaacttggggcaagatttaatggaacttggggcaaaattcaatggatacagggcgcaatacatacgtatgtgtaggccgatgcttgcatatgtgtgacccgatgcttatgtacgtgtgggcttacacgttactaacatacgagctgacacgttactaatgttattgttgaatacgcctttatgtttttaaaatacaccttgagctttaaaaaatacgtcttcaacttttaagaaaacatcttcaggcttttaaaaaacaactatacgtttttaaaacacgccagcttgttcagtgcacagacttagcctgttcagcttacagacctagtctgttccgtgtattactcccccactaatccgatacgctcccttttcccctcatcctgtcatcttatgtaatatgcacagaaaatcagccggttaaatctgaaaccatttcccctcacttccatttcagcccgtatcgttttattccttcacaaaaaatgtgaaagagcaggctgaaaggaggctgacagagcaatgacaggagccccttcatagccggaacgcctatgggcagggagtttcagcgatagatgaaaggagaaaaggaacaaccggattttatcgctgaggcatttaaaatgaagataatctcagcatttccacctgcgaatgaacagatgatcatccatgttttgagcctgatttatgattggtatgaaagatttatatttttcagactatgtaacaataatcctcccggtatttctatactcaagataaattatatcacaattcttgctgctctaaacaaaggtatatttgcaaaatatacaaagacagatacagagggaacttggtatatccgtttacggatcggtacgctccatgcgtgatatttttgatattctgttttcgtatgccactcagaaccaattgaacctggtgatagatgaagtacaggagttcttttatgtacgtaagagtatatttgccgacatgcaagaattatgggataaatacaagccggatatgaaaataaacttcattacttgcggctccatctattcactgatgaaagaactgtttgaggataaaaaatcggccatgtatggacggatgaccaagcgtctggacttgcagccgttcagcatagcaacacagaaacagattctaagccattatcatcctgcttatactccggcagatttgctttgtctttatatgctgaccggtggggtggcaaaatatatagaaacattgatggacgaaggtgctttcaagaaagaacggatgcttacttgctttaccaatgaatacatgccttttcttacagaagggaacgacttgatcaatatggaatttagaaaagagggggccgtttactattctatcttgagcctgatagctgacgggaaaaacacatccggtgagattgattcagttttaggtatcaccacaagtgcctatctgcgcaaccttgaaatcaattatacccttttgaagaagatgcgtcccatctttgcgtctgaacggagcaagggagtcaagtacaagctgaaagacatttttctgcagttctggttccgctttatctatcctaaccttgatttggtggagaatcaccggtcggatttattattggaataacctctctttaaataattagtaactccggctgtgcatatatttgcttattttgcactattaaggtgcattttgaaataatagaaaaccttccctatctttcaataaatgtaattattcgtgcaaactgtcctccgttgataacatataaaaatctatttagattttctatagataaccaatagatggagtagtttttttatttggtagttatattgttgatttatagtgacataaatattcttttgtttcggtacaattactgtaagagaataactatttagatttcttaaataaaaaagagcggtctcatttcg

SEQ ID NO: 3906 - DNA, 13043 bp, Unknown
  gut microbiota DNA sequence
tctctttgctattctttattcagccatgcattgagttgtgtcttgatttcttcttgtgtgtcggtgtcaaagctgccgatacgggtggtatggctgccgccgggtaacacataaacttttatgtttttcttgttcttcagccaagtgacacccgaagctgtccaaggatcatcgccgccataaatatagatcatttcgggatcattctctttcaggaattttaccaccttattatatagtgtcttgtcaaatttgagatttgacagttcgggcggtaacattaccttatgaagatagtcacggctgctctttatcgtcagatactttttgaaaggtttgatgtcatatccgtaataccccagttctttggccgcttgcacattaaaggaagggtagggagattgttcggagaaataatccggttcacaaatagccatgaaatgcttgaatagcgtgtggtcatcggcatttgtttccggaatcttatttacaggagttccccattgccatagggcaaatgagtattccaatacattgaagtcgtatacttcggctataggaatgcggaaggtatatcctttatccgagcaatatttttcgaacatcggcagcagccggctcttgcgtttaagtacttccagttgaaagttttcaactcgtttacggttttcgggagtcgaaactttattggcaatgaacggttcgtgacggccgtcctccaatgattggttgaggggggctacgtaaggtacggagatatccacatcatcgggaaagtaagtgcggtagaacatcgtagtctgtccgcctttgctgattccggtagctatccatttctcatcgtatagttgtttcaaggtcgtggttacatgatgcaaatcatacagtgaattttcaaccgtgagataatcccagttacagggcttcggcatggactcaccaaaataacggtattccacgaataccagattggcgttgaataatttggataactcttcttgataacgcggatgggtggcataatgggcggcatagccttcggtaaccagtacggtagggcggtcaaaacctacatgcgagagaataaccctttgcttgaaattccctgcttcggggtgatgcggatccaatagttgattaatgaagaatacatatttctccggataggcatcactttgcattggtttaatgtcactgatgtccggaagattttgaagtcttttctgtaattcagtgggaggagctgcggcctgggccatttgtaaaggcaataagatagccagtattgcccataccataaaagagagtgtgtgtttcatcgtttataaatggtttaataactaatgggcaacaaaaatagtattttatttcgatattgtcgggtaatcttttatctttgtgttacttaataaagctgagaaatatgttttttcttcatcgtatatggaattggtgcagtcgcttccgtcaccgttgtggttacggagtacactctccgtctgatttttttctgattacttctgttgtttatgaaaaatatcactactatgcttatcgggtattgaaggaaaggggatttcctgcttatttgccacattatcgaaggaaagtgaaccgtttgctattccggttggttaattatttcagaccaaagtcgttgattgaagtggggattggtaatggggcatccataggatatatgcgggctgcgtgtcatactatggactccgtcaccttgaaaggcagggattgggcaaagacttcccgacaactggaggagaaactggcggaggtgcatacattagattgtctgcatatagggcatactcctttttataaaggagtttttgaactggtacttccttatgccggacctcgtagttgctttattgtcggaggaattcatgaatcgagggaaaaacggaaatggtgggagcaaattgtagccagtgagtcgacgggtatcacttttgatttgtatgacatagggttggtcttttttgataaagcgagatataaacagcattatattgtaaattttttataaccggaaccatgaagaaaagcatgatatacaccaaaacaggtgataagggaaccacatcattggtaggtggtacccgggtgccgaaaacgcatatacggcttgaagcctatggcacagtggatgaattgaactcctatttgggattgttgcaaacgtatttgacggatgaggaggataaacaaatcatttttcgtatacaaaataaattattctctgtcggttcgtatctggcaacggatcagacacagaccaagttgcgtatggaaagtcgtatagaggatgaagacatccggatgttggagcaggcaattgacgtaattgacaatgaacttcctcctttgaatgcttttattctgccggggggtgaccgtggagcagccgttgggcacatttgccggacggtgtgtcgccgtgccgagcgacgtattcttgcattggctgaagaatgtgacatagatgcccgtgtaacagcatttgtcaatcgtttatctgattatttattcattttgacccgaaagttaaatcatttaactaaaacggatgaaattttttgggataaaagttgcaaatgaaataatttattatacttttgcggctaattagagaacgaaagaaaagtatttacttaaaaaataagaaaactatgtactggacattagaattggcctcgaagttagaggatgctccctggcctgctacaaaggatgagttgattgactatgcaatgcgttcgggcgctccgttggaagtaatcgaaaacttgcaagagatggaagatgaaggcgaaatctatgaaagtatagaagatatttggccggattatccgagcaaagaggatttcttttttaatgaggaagaatattagaaagagaacatggcggacagaataaaaaattctgtccgttttttgtttgatatttcttcttggaaggggggattggaaagcgtaatgtaactttcctgggagattgaacattatacatggaaaaagtgtttatctttgtggcgtaaactaaaaatagacaaacatgaaaaagattattagtgtattaatggtagctgtatgtttgatgatggctgctcctgctcaggctcagttgcactttggagtaaaaggtggtttgaatatttcaaaattgagtttttcaaaggatgcttttaagggggataataagactggtttttttgtgggtccgatggctgaattcaccctgcctattatcgggataggggcagatgttgcggctttatattctcagacagacttaggggctgatggagagaaaacaatgaagttaaagacatttgcagttcctgtgaatttgaaatggtcttttggtctcggtagcatgttgggtgcttatattgctgcaggtccccagtttgattttaatattggcaataaaacatggacgcgtgaattgtcattgaaaaaatctacaaccagtttcaatgtaggagcaggtcttaaattgatacgtcatttacagttaggggttaattataattttgctctgagcaagactggtacttatgaatattatacagagggtgaatcgggtgatggacaccattctgttaatataaagaacaacacttggcaagtttctttggcatacttgttctagacaaccttatttaataaaagataaaaaggaggcattcagtgaagaatgcctccttttttgtaattttgcactatgaaaaaattcgtagatgtcatagttccattacctattgccaaccaatacacttattcccttcctcaggagatggaagagatggtacagattggttgtcgggtggttgttccgtttggaaagaaaaagttctatacggcaatagtgacaaatgtacattatgcggccccggaggggtatgaaacgaaggatatagctgaagtgctggattcatctccggtactgttaccgaaacaatatgagttctggcaatggctggcggaatattatctttgtacattaggagatgtgtacaaggcggctatcccttcgggtatgaaactggaaagcgaaacgttggtggaatataatcccgattttgaagccactgcacccttaccggagaaagagcagaaaattctggatttgttgagccgggatacagaacagtgtgtaacccagttggaaaaaaacagcggactgaaaaatgtgttgactgtcatcaagtctttgttggacaaagaggccatctttgtcaaggaggaactgaaacgtaattacaaaccgcgtactgaggcaagggtgaggttggtgaacggagaagcggatgaggcttacttacaacggctgttcaatgaattgtcacgtgctcctaaacaattgatgatattaatgaagtatgtggaattgtccggttgggtagccagagggtatgctttaaaggaagtaacaaagaaagagctgcttgaaaagtctggagggtctgcggccgtttttaacggattggtcgaaaagaaagtctttgaggtctatcatcaggagataggacgtttggataaaggaatttcggataccggtgatattaatccgctgaatattgcgcagcaacaggcttatggcaacattcttcaatgcttcagagagaaaaatgtgtgtcttctgcatggcgttacatccagtggcaagacggaaatttatatccacctcattcaggaggtgctgaaaacaggaaagcaggtcttatatttgcttccggaaattgcactgaccactcagataactgagcgtttgaaaagggtgttcggacatcggctgggtatttatcattccaagtttccggacgctgagcgggtggagatatggcagaaacagttgggagagaagagctatgatgtgattctcggagtccgttcctctatttttctgccttttcgtaatttggggctggtcatcatagatgaggaacacgagaatacgtataaacagcaagaccccgccccacgttaccatgcccgtagctcagccatcatgctggcctctatgttcaaggcgaaagtgctgctggggacggctactcctggtgtggaaacttactttaatgctacctcgggaaagtatggcttggtagaattgaaagaaagatataaagatatccggcttcctcatatagaactggttgacatcaaggaactggcgcatcagaagcggatgcagggccctttctcaccggcgctggtcaagcagataaaagaggcattggagtgtaaggagcaggttatcctgtttcagaaccgtcgcggtttcgctccgatgatagaatgtcatacctgcggctgggttcctaaatgcaagaactgtgatgtgagtctgacgtatcataaggggctgaaccagctgacttgccattactgcggatatacctatcaagttccccgttcctgcccggcgtgcggcggagtggaattgatgcatcgcggtttcggtacagagcgtatagaagatgatataaaactgatatttcccgaggcgaaagtcgcccggatggatttggataccactcgtacccgtaccgcatacgagaaaattatcgcggattttgaacagggcaagacggacatcctgattggtacgcagatggtgtccaaaggattggactttgatcatgtcagtgtggtggggattctgaatgcggatacgatgttgaacttcccggatttccggagctatgagcgtgctttccaactgatggcccaagtagcaggacgtgccgggcgtaaaaataagcaaggactggttatccttcagaccaaatcgcccgatttacccgttattcatcaagtgatgcataatgactatgagcagttatattatgaccaattggcagaacggcagatgttcaaatatcctccttattatcgtttgatttatgtatatctgaaacaccgcaaagaggatattctggatttggcggcggataccatggcggcacaactccgttccggattgggcgacagggtattgggtccggacaaaccgccggtggcccgtatccagaccttatttataaaaaaaatgattgtgaaagtggagcagaatgcttctataaagaaagtgcgtgattatctgcttgccgtacaacgtgccatattggaagatgaacgtttccgttcgttgttagtatattatgatgtagatccacagtaaccggtccatgcactggacgataatagaaaagataaacgaaaataaagatgaagatagaattagacgtacatacccataccattgccagcgggcatgcattcagtactttacaagaaatggcgcaagctgccgccgataagggattgaaggttttagggataacggaacattcgcccggtgttcccggtacttgccatcctatttattttagaaacttgcatgtggttccccgccggatgtatggggtggagctgttgttgggggctgagattaatattctggatggtaaaggaaacctcgatttggacgaggattatatgaagatgcttgatatccgtattgcgggtatccactctttatgttatgaatatggaacgatagaagaaaacacccatggaatggtacaggttatcagcaatccttttattcatattatcagtcaccccggagacggtacggcggcgttacattttgaaccgatggtattggcagccaaagaacaccatactttattggaaataaataacagttctttaaaacccacccgtaacaaacccaatgcccgtgagaacaacctcaccattctccgtttatgcaagaaatatgaagttccggtcattttgggaagtgacgcgcatatttcgtttgatatagcccgttacgataatttgtatgaattgttgcagcttaccgggtttcctgaagagctgatcatgaaccgtgatgtgaaatcatttaaagaataccttcatttgtagattatatatgaaaagaatactttttgtctgcctcggtaacatttgcaggtcttcttcggcagaagaagtgatgcgtactctcataaagaaaaaaggactggaacacgagatagaggtggattctgccggaatcctgagttatcatagaggggaattgcccgacagccgtatgcggatgcatgcttcccgccgcggttacaatctgacccatcgttcccgtcctgtctgtacggaggatttctatcattttgatatgatcatcggcatggacgaccgtaatatagaggacctgatggagcgtgctcccgatctggaaacggaaaagaaaatccatcgtatgacggattattgccgcaccaaagtggcagactatgttcccgacccttactatggcggtgcgcaagggttcgagaacgtgcttgatatactggaagatgcttgtgcaggattgcttacttccttagttccgggtaactgattcgggtgtgatacatcgttttcagcttttctttaaacagtgctttgactgttgctatatccttgaacgtaatagggcattctttgaaatacccctcagatacctgtgtgtcaataatcttatctaccagtgtgctgatgctttcttccgtgtactccggcaggctgcgtgaagccgcttctacagagtcggccatcatcaggacggcctgttccttggtgaacgggttcggaccggggtagcggaacttttcctgatccacttcttcgtcaggatgttcgtttttatatgaaatgtagaaatacttcgtcagtccccgtccatgatgggtactgataaagtctttgatcactttgggcagattatgcttttccgccagtttcagtccgtcggtgatatgactgatgataacctgggcgctttgttcataacttaaactcttgtgcgggttgactcccgactggttttctgtaaaaaaagccggattcaccattttaccgatgtcatgatataatgctcccgtacgcaccagctggcttttacctccaatcttgtttgccgccgcagcagccaggtttgccatctgcaatgagtgttggaaagtgcccggagctacttcggacatttcccgaagcaagctattgttgatatttgacagttccaccaaagtcacatctgaagtaaaaccgaatattttctccaaaaggaacagtaacggataagcgaacagcagtaagataccgttgatcataaaatagatgtacatgcgcgtattcagcttggtcaaatcatcttcatgaatcagctcgaaagcaaaatataataaagcataactgataaatacaaccaaagccgtccgtaacaattgcgaccgttgggacaattctctcaaactatagatcgccaccattcctgccactacctgtaacaagataaactcatgtggaaaacgtaaagtgatggagcaaagcaaaatgatagtgacatgtgccatgaatgccgttcttgagtcaaggaaaacacggactataatcggaatcatggcaaatggaaccacgtaaatacttgacaagttctgttccaccataatggaagacaggacggggaagaacacaatcagcgcaaatagcagggtgagtgttcctttccgttcataataatctgcccggaacaactccagataggccatgaagcagaacaggaagattcctacatataatatttgtccggccaatgtcagtcttttctcttgtaccgagtcgctacgtttttcccattccttgcgtaaggattccaatatgttgtaagtttgctcatcaacaatttctccacggtcaataatcttttgtccgttcagcacaaagccgtttgcccatgaaatattagagagcaggtctttttgcgccgcctcggacttttcttcatcataaaccagattaggtgtaatgtaatcattcagattacattgttgtaatatcttctttttgtagtgggtggtatccgcattcagcaaatattcataggcttccttcacggtgtacaattggtcgataaaacggctcgtagctacattcttgtctaccagccgtatggcaatgatactgtcttcctccatacgcttcaagtcatttccggcaatgattccgtcctcatacagtgcctttaatgtgcgttcaatataacgtacatagtccgtgcccggcagtgaatggcgtaaggtcttgttgtaatcctcccttaatttggaaaggacatttttttcggcttccttgtctatctggaaataaggttgatagtctgccaggatgctgtcctgttccttttgtacttgtatgtcgtttttgtaaatcggaaaatcaaatgatgcctgtaacagtccgtatttccaaggcttgtttatatcaaattgatagttgaactttccttcattgggtaaaaagtagactatcactgatactgtggcaatgaaaataaggcttttataaatcaaatttttatatgaaaaccgttggttggtcttgaaacttctcataatcgtatatttttgcgcgcaaaatacgaaaaaatcgggaaatttagattaattttgcagcgtattttatataaaacaacaatgtcagaaagaaaagtaagagttcgttttgctccgagcccgacgggagcgttgcatatcggcggtgtgcgcacagccttgtataactatctgtttgctcgccagcatggtggagatttaattttccgtatagaagataccgactcaaatcgctttgttccgggtgcggaagaatatatcattgagtcgtttaagtggttggggataaacttcgacgaaggagtcagctttggtggtaactacggcccctaccgtcagtctgaacgtcgtgatatttataagaaatatgtacaggtgttgcttgacagcggtaaggcgtatattgctttcgatactccggcggagttggacgccaaacgtcaggaaatctctaatttccagtacgatgcttctacccgtatgtctatgcgtaactctttgactctgccgaaagaagaagtggatgcactgattgccgatgggaagcaatatgtggtacgtttcaagattgaaccgaatgaagatgtacacgtacatgatattatccgtggcgaggtagtgatcaattcttccattttggatgataaagttttatataaatcggcggatgaactgcctacttatcatttggcaaacattgtggacgaccatttgatggaagtttcccatgtaatccgtggtgaggaatggttgccttccgctccgttgcatgtcctgctgtaccgggctttcggctgggtggataccatgcccgagttcgcacatcttcccttgttgttgaaaccggatggtaacggtaaactgagcaagcgtgatggtgaccgtcttggcttccctgttttcccgttggaatggcacgatcccaagaccggtgaggtgtcttccggttatcgtgagtcgggttacctgcccgaagctgttatcaatttccttgccctgttgggatggaatccgggaaatgaccaggaactgatgtccttggatgaactggtgaagctttttgacctgcaccgttgcagcaaagccggggcaaaattcgactttgaaaaaggaaaatggtttaaccatgaatatatattgaagaaaagcaatgaggaagtagccgggcttttcatgccgatcttgaaagagcatggcattgaagctcctatggataaagtggtgaccgtggtaggcttgatgaaagatcgtgtaagttttatcaaggatttgtgggaaacttgcaaattcttcttcgtcgctcctacggaatatgatgagaagacccgtaaaaaacgttggaaagaggactctcccgaacgtatgctggagttggcggacgtattggaggccttggacgacttctcgctggagaatcaggaggctgtggtcatgaaatggatagaagataaaggttatcacttgggtaatataatgaatgctttccgtttaaccttggtaggcgaaggtaaaggcccgcatatgtttgatatttcagccgttttagggaaagaagaaacattgcgacgcattcgtcgggctgtggaagtgctcaagtaatagccggtagttatgatttataacctagtcatctatatttatctattcggggtgaaggttgccggcctgttcagcgccaagcccgccaaaatggtgaaaggacaccgggaagtatttgatatcttgcgtaacaagatagacaaaaatgcccgttatatttggtttcatgcagcttcattgggtgagttcgaacagggacgccctttgatagaacgtatccgtaaggagcatcccgaatataaaatattgcagactttcttttctccctcagggtatgaagtgagaaagaactaccagggggcagaccttgtctgctatctgcctttcgacactccgcgtaatgtccgtcggtttgtagaattggctaatccctgtatggtgttttttatcaagtacgaattttggcagaattacttgaatgagttgcatcggagagctattcccacctatagcgtatcttccattttccgtcccaatcagatttttttccgttggtatgggaagagatatagtgaggtgctgaggacttttgctcatttgtttgtacagaacgaagtttccaaagaattgctggcgacaattggcgtgaccgatgtgacagttgtgggcgatactcgttttgaccgcgtgctggatatctgccatcaagccaagcagcttccgctggtggagaagttcaaaggtgattcgttgacttttgttgcaggcagctcatggggaccggatgaggatatttttatcaagtatttcaatgagcatcctgagatgaagctggttattgctcctcatgtggtgagcgacagtcatttgagggagattttagataaggtgaaacgtccgtgcatccgctataccgaggctacggaagaaaatgtgacacaggccgattgtttgattatcgactgttacggactgctgtcctccatttaccgatatggtgagatttcgtatattggaggtggctttggagttggaattcataatgtgctggaagcggctgtatatggtattcctgtgatattcggacctaacaacaagaaattccgcgaggcgcaacatttgttggagcagaaaggcggttttgaagtaaccggttatgatgattttaaacggttgatggacaaattcctgtcggatgaggcttatttgcaacaagcagggaaagctgccggaaattatgtgaaccataatgccggagcattagaaaagataatgaaagatatcactctctgaatgtttcaaggtgatttgagtatatgcaggttatagagaagatttggctctataacctgttttttttccttcaaatccttcattttaagctaatttattgttaatcagttggttataatgaaccattttcactttatttccttcatccggatataaatccttcagcctgctgaaatgagggcttgtccggctttggggtcagcagaaatttagtggggattttatttcatgcgattgtttgtgataccctgtacgagcgttcgtaattttatgtatggtttgtatggcaggcaaaagtaagaattgggattgcatatatgccctcactttagcatttagacttgttgctatataccatacatgtagtcagatgtatatcttcctgcccatatgctgtttcgcttttttaaaagaaggctgtctggggatttttcctccctacgtaaggaatgcgtagccttgtagtcagcttcatccttaaaagatcttatccatatctctaaccctttcccgccgtatggttaagggttttcttcctgcctgttttatctccacaagcctttggagttgactccatagtcttgggagataactccaaagcttatggagataactccaaaggctatggagatagaatacatccgtataaaaaggtttatgcaacagggcccgatctattgttatttccacaataatcccaaatgctcccggacttttatagtagaacttttaa

SEQ ID NO: 3907 - DNA, 51155 bp, Unknown
  gut microbiota DNA sequence
ataacctcttttggaacattgcggactacaataattagtagtggtcttttttgccatgaaaggcttgccgcaccactggcagattctttttacttccatttttgtattctccatattttagtgaaacatgagctttttacagctcggataatttccctttttgtctactcacgtaaaccattgtcaacacacgtcaacaaatgcgtcagtgtgacatcgggcaaaagcccttaattgttccgaggtagaaatacggtagaaaaatatggtgaacaacagtatccaactgtttatagctggatttttggcaaataaaaaagccgctgaaaatcagcgacttcattatagttggttctaattcgttgcagttgattacaatatcctacttgccgatacaaaagttttgaaatatattttgcaatgtttcttccgaggttatacctccttctgcaacaatctcacttagttcgtggatacattgtcttaaatcctcacttaccaaatctcctgataattccaattgcaatccttcctgtactctatgaatagaatccaatgctcgtgttaatgcttcgtaatggcgtacatttgtaatgataatatcgttttggttgacttccggtaaggcagctgcctgtactaacttcttttccaggatcgttatattttcccttttctttgctgagataaatagtttttccactttcatgtcagcaaatatggctgacaactcttctttttgtgttgctagtaacagatctgacttattaaataaaataatcatctttttcccttcgcagtgtggaagaatgtcggcttttaattcttcgaaccgcctttgggcatctgtagagtctatcatccataaaatgacatatgcttggtccatcttttggaaagtacgttctatccctagattttctattgtatcgttcgtttgacggattccagctgtatcaataaatcggaatgtgacaccttgtaaattgatcgtatcctctattacgtcacgggttgttccatggatatcactgacaatggctttttcttcattcagcaacgcattcagtaaggtagattttccggcattcgtttctccgataattgctacaggaatgccattcttgattgcgtttcctacactgaaagaatgagctagccgggcaataacttgttcgatatgggtagctagactgctcagttcgtcacgattggcgaattctagttcttcatgatcactgaaatccagttctaattccattaacgaagtgaaatgaagtaattggttacgcaggttagaaagttctttactgaatcctccgcgcatctggctcatggctaggcgatgggtggaggcagacgatgaggctatcagatcggccacagcttcggcttggctcaagtccatttttccgtttagaaaagcacgttgggtgtattcacctggtagagcggcacgacatccattatagatcaggagttgtataacttgctgcaggatataagatgaaccgtgacacatgatttccgtactgtcttcaccggtataagaatggggggcgcggaacaaggaaattaaaacttcgtcaattacttcttctacagaagaagtaattgacgaagttttttgtaacgtttcacttttttcttgcggaatttcacttgtttgttggaaaagtgtattattaatttttcgctttggggaacaaatctttccgaaagtaagagtatatggtgcccgttctgtcagtggcttgcctgtggcgggtgtaaatatgcgtgacgttatttcaatcgcttttgggccagatacacgaattattccgatggctcctccctgggcggtggcaatggcacagattgtatcttggtttatcattttcatttggttaataatataatgttttagctacaatggctgttacttcttctaaataacggcggtctgtttcatcaaaaaagtttaatagattactgtcaatatccaatactccctttacttgtccattagcaagaataggaacaacaatttcggagcgggaaagagaactgcaggctatatgtccggggaattgttctacattgggcactatcaaggttcgagcttctgcccatgaggttccacatactccctttcctttatggatgcgataacaggcggtgcttccctgaaaaggtcctaaaataagttggtcgtctttaaccagatagaaacctacccaaaaaaagccgaaggcttcccgaagagcagcagcagtattggccaaaacacttatttcttctttttcatctgatattaaaagttcaaactgagggaggaaaagacggtaacgttctactttattactagttgtttgtttgaaactggtttccatatttttatttgttttatgaggggacatcttgttgtttttttacaaaaaatggtcttctatgaagcgatgtcccctgttaggtaaaaagagttggcttattctgtaaaaaatctgtttatgccaatcttcttctggatgataataagaataagtcttgatagatgatccggtgaatcttatccatattatatagacaactaaattgggaattatattctttccaagactttttctatcaaaccatcaatagagtttttatagccggtattggcttcctttattagtcggttggcaatcaccatacatacagtcatggctttgtgtcccatcaggcgtgctaatccggcaagggcggaactttccatttcaaagttagtgatgcgatagtcattgtattcaaatttctcaatcttttcattctgtttaggatcggccaatgggatacgaagttctcgtccttgcgggccaaagaaacctcctgcggcgatagttacgccacggaccatatcattttgcgcaatgcggtctattaattcccggtcggcatcaataacgtatgggtgagcgatgcatacattaccttcccaccccatgtaatctataaaagcttgttctaatttcagatcgcaaacctcattgcgtccggcgtagaaattaagcagtccgtcaaaaccgatagacttttcagaacaaacataggtaccaacaggagtataaggctgtaatccgccacatgtaccgatacgtactaattccaattggcgcaagtggtctttttcataacgggtattgaaatcaatattggccaaagcatctaattcattcatcacaatgtctatattgtcacaacctataccggtggaaactacggtgagacgttttcctttataagtaccggtaatggtcttgaactcacggctttctatttcacattctttagtatcgaaatgagaagctactaatgctacacgcccggggtcacctactagaattattttatttgccaactgttcaggtttgatatgaaggtggaagatagagccgtcgggattgataatcaactcagattctgcataatattttttcataatctttatttttgtggttaatggccagtataattaatgttatatttcttgtctttttaatgagtatgcaaacagattatttcctagatgtagatgttacggatttataaactttcattgatattagcattatcaagagaaaaacagttccattcgcatccaagaaaaatatattaatcgttgaatactagttttatttacttaatggctcattaccgaaagttgtttcgggttttgcaatattttcacgcatggaggtatctgcttgtatattcttcatgcggtaatagtccataatacctaggttgccactacggaatgcttccgccatggccttgggcacttcggcctctgcctgaattacattcgcgcgtgcctcttctgctttggctttcatttcctgttccaaggcgacggccattgcacggcgttcttctgctttggcttgtgcaatattcttgtcggcattggcctggtctatttgtaaagcagctccaatatttctgcctatatcaatatcagctatatcaatagacaggatttcgaaagccgtaccggcatctaagcccttgcggagtactaatttagagatagaatcaggattttccaatacggatttgtgattttcggacgatccgatagaggacacgataccttcaccaacacgtgctagaatcgtgtcttctccagcacctcctactaattggcggatattggcgcgtacggtgacacgagctttagctataagctgtatgccgtctttggctacagcggtaacgggaggggtgtcaataaccttagggttcactgacatttgcacggcttcgaatacgtcacgaccggctaggtcaataccagttgccatttggaaagacagttcgatattggctttggacgcggatactagtgcgtgcactactttttccacatgcccgcctgccatataatgagcttccaattcatctcgggttatgttgcttaagccggctttgtgtgcttcaatcattgccgggacaatgacataaggagggacattacggatgcgcattaagaataattgcaccaatgagatgcgtacccccgaaactttggcagacagccagaggaaaaatggtacataatgaaagaatagtaccacgaaaataattccacctcctataaggatgaaaggaagatagttgagttcgatcataataatcagttgtttaaaagtaaatatttatatttgaacagctcaatatcaagtttttgctgttttcactattgtctaaaatatgcttgaatgagaatgtcaatcaagaaacctgataaattcgtatttgtaagtcatttctctatcattggttgaatttgcgtacaatcaccgttccttcaaccattctttctacataaatgggagtattctcatcaatcaaaccatcggcagagcgcacttcgatgatgtgtccgttaaagtttgcattgcctatcagtgcaaggcgggttattgctatacctttgtctccgatgcggatatgggttccttttaggggatcgattttataatccagtgttttcttcaaagaaagcttgtccatggtttttgagtgcataaaccaaacgataatggctatgcaacttaggacggatgctatcaaagtaatgaatcctgctatcggtcctaatgtgtcgaaagcgtaatagttggcatatagcaggcagatggctgatgctattccggctatactgatgccgggaataaggaaaacctctacaataaagagaagtagtcctgccaagatgagcgatacgataataaatacttccataaatatctttgtattagtgtttcaacttctttatttcttcgttgcggacactgatatccagttgggccatttctttcagaagttgttcagtacgtttttccaattccaaaatggcgggtgtcagattcttctttcgtgcactgttcccttgggcatattgttcgcgcttgtcatccaaatttttcttcaggttgtcataatccttctgcttttgtattctttgctggtaaagtttgcgtgcttcggcagagcggaagtcgttcaatgtgtggtaaacggcagaatcatctattatcaaggtgaagtctttttgttgttctccggattctttggcatacattatggctgccaggcgttgcttgccggttcgtactttctcttcatctttccaagtggtatggatagagcgcaggctggctgcatttatgatgatctgttcgtctgtactttcataattgtatacttcttttgaagagttcggtacaaacacatagatacagactttgttatcaggctgatagcggtctgaagcaaaccagccgatattgttgaattcatcaatggcatacatatagtcattggcgagagagttaaatggcattcctatattatcgggacgaagataattgctattttccgaatcatagcgagttacaaaaatatcgtatcctcccaaagagccttctccatccgatgcataatacaaggtaatgccatctgacattaagaagggatagtttacatttccctgttcattaagggacgtgaggggttcgggctcgctccagccgtccaacagacggatacgggagtacagttgcatcttgccgtctgtgctttggtttccgtagagtactttattgcccatttcggtctgatagacagtcccggatatcgcaggatcgtgatagagtgcccccgactctctactgattttatatgcttttagaaaatcatttttatcgactacaaagctgtctattacagtaatgttttccactccttttatcatacgggctgcttgctttatttgttccagctctgcttcagccatttcggtagggcgttttttcttttccaaccattctatgtgttgttcgtagttatctacggcatcgtcaaaccgatagatgtcataatatagttttcctaagtagcggtatgcgtcaatgactttgcgggcggcgcttttttcaaggtagggctgtgcttcttttttttctcctgtttcataacaacatgcgccataccaataattataattggcgttagaaggggcttgttttaccagcttttggaaagcaggtttggcttgttcaaattctccgttcaggaaaagttgtttggcttgcgccaagctttgtgccgcagcattgcctgcgcagcataaagtaaataaaccaatgatatattttttgtacatagttagtttataatccgtattatttagattcaaaaatacaaatattaattggaattctcatgcttcacataattctattttgttaaatcttccataaatcattcttttcatgtacttttgtgccctatttttaaagaagatgtatggcacaatttacggaagacgagaaaataatgcgaaggttggagcaacgctttaacaagggggtggtaaagtatcgcttgattgaggatggtgataaaattttgataggtctttctggtgggaaggattctttggctctgttggagctattggcaaggcgttcacgtattttgaaaccgaaatttacagtgatagctgtgcatgtaggcatgacaaatattccttatcaatctgatttggaatatctgaaaggctactcagaggatttaggggtgccgtttgtgcattatgaaactttttttgatccgagtaccgacactcggaagtctccttgtttcctttgttcttggaatcggagaaaagctttgttcacggtggcaaaggagcaggggtgcaataagattgctttaggacatcatatggatgatatcttggaaactttgttgatgaatattacttttcagggagccttcagtacaatgcctcctaaattagtgatgcgtaaatttgagatgacaattattcgtccgatgtgcttggtacatgaagcggatttaattgaaatggcacgtatccgcggttttcgtaaacagatcaaagattgtccttatgaaagtttgtcgaatcgttcaaatatgaaagaggttttatattctctagaaaaaatgaatcctgaagcacggtatagtttgtggaaatgcatgacaaatattcaggaagaattgttgcctgggatgaatgaacacgatttatagtggatatggttgttttgttattaggggatataacgaaactgcttatagttagttgtttgtacttgtgtgcagcttaaccaactatcaatattattaatgtatttagatgaggaagaatgttataaagttatccttcctgttgtttgttgtgccggatacaaggtgatgtacatgtctggtttgttggggaaagtgtagaaatattctacaatgaaaatgtggatctttttctttgaaaatagcttattcttaatgtatttaattgataatcaaagcctgtcttgttttggcataggctttgttttctctttgtcataagaataaccatttaaatatattaggatatgagaaagttttttgttgtgttagtatgggtaatgggattaggacttgcagcgttgtttgcaaaagatatagtacgtggagtgaagaatgtgattgcgataaatcattttacccctgttgaggtgaataatgctccaacaggatggcatcaagacttgtgttgttatcttaattaatttgccgtcatagagattttgttcataattgaaattggaaacaactgttttttatggcagctgtttccaatttatttgtattcagttgtccttatactcttttcgccaagtgatttttgtacactagcctaggacaaatgtaaaatagtaaaggggattggatgaatagttattaatgaatgtttttaatgtcatcctgtactatctgatccatttctttcattagttttttgggattctttttaggggagagtcctttatctttttcttcatgcaaaagatctgtttcagttatgttctcactccagtcttcgaacatatttgttgccggttgtcctgataatgttacattctcttctgcaatagggacatttctctcaataattttttccataatctaatctatttattgtttcctagatgacaaatacgggtagaaatggtttaatgatttaataaagtttgaagtttgtgataaatagaaagttcttgaacaagctagcaagactttatttgcgggcaatgttttatttctttttttaaatgactttgccttgtaaagagtgcttctctgtcctttcaattgaaaaacaagtttttaacaagcggttttttcggtctgtttgaggtttatctgcaaaatcgtggggaaggactttggttcttgaaggattgttttgttctctgatagctttcagaaatgttcttgacgtatcagtttttctcttgaggaagttcggatgtttatgccctcatgccctcactgtctgtataacagactaattataaacaacttatatgcatatagtaaaaatatttgttctcacttatgctctcatgctctcatagtgttctaaaatatgttttcgtgtaacatgcttgtcctcagttatatacatatattgtgggctatttcaggcttgatagggagtagggtgttttcaggcttttttctcgcaagaagtgtgcataagggggggatttccatagaatgacggtttacaaagttccggtaacggtaaaaaagatcaagacgtttttaaaaaacgcccttgtctttgatatggaattttattttggacatataattatacatacatacgtccgcacaagtctgtacgtatgtataactatatgggaatatacgtgtacaaacatgttttctgatgcgggaaaaacatactttggcattccctatatttttgcaagcaatcttactttggtttttgcctttttcatttttagcagtgacactttttttgggggggctaacaaggataaaataaaaaaggctatcttcccagacagccaatcttttgttaaccttaaatctaatactatgaaaaacacagtgcaaatatacgaatttctgagatgggtccaaattcttagaaagaaaaaaagcttgttataacatggtttagcaaatgaacttttttcttaacaaatagcagattgaaagagtggaattggttgcttttttgttcaacggaaataaaacatgcttgttgcggcaataactcattgtattattcttaattcgattatttccattatctttgcactcccaaaatgcttgttgatatgcagttgttaaaagcataatggatattataggcagattgtttccagataaaaaatagattagaatatatgttgtctcatggtatttattcagtaattttgctgattttttcaaatgtctttatgacgtttgcttggtatggtcatttaaaaatgcgacaagagttcagttggtttgcagcccttccgttgattggtgtgattgcatttagttgggcaattgctttttttgaatattgtcttcaggttcctgccaatcgtcttgggttcaaagatagtggaggaccgtttgatattatgcaactcaaggtgattcaagaagttatcacattggctgtatttacattattttctgtttgggcatttaaaacagaactgaagtggaaccatttagcggcttttctctgtttggtccttgccgtttattttgtctttaagaagtaatgagttttggttaataattgctgaatcctttttgataagcaaagtgtcttgtttgggcaatgaatcttgttcagatactttgctgattctaggaaacaagatggaatcctgtcgggttggtacgtaactttgatagattttccaacctttggcacgattacgattacgtcggatggcacgtcctcgtttggttaaagattcatacaggaatttgtcggcatccagtcctcctattaatgggttattactgggagttaccgtttgatccatgccggcaggtaatattacatagccgtttcgcaaaccgggaatcagtttgatatttagtttccatgatattgtcagagagtcttttcttttcaagaaaatgggatcattaaccggatcttcatgccatgtggtgtaaggagtgtagggagtaagacgcacaaagttagggcgtacccatttggttgtgtcgccgaagtttttaggcaagtctttcagaaacttcatccacggtttgtcttcggacatgattggagtaccttttatattgtctttgtccgattgaaagtcgaaatggatagactttacggcttctgtgttgatttttagttctccatctccattcaatagctcctgtaaacgaatcgagtcctgtttgttccattgtgcttgtgctgtcagtatactgatagtgcagaataatatgctaaaatttaccctttgggtcattcgttttttctttatggttataattggtaacaaaagtaatctggagtgggtttaatgctggttaaatttgagttattaattgtttataatgtgaatactttaaattttatttggttaataaaaggattcgtttacacctcttttgttgtcatggagcacacttcatatagacatttagatagttacttcaatatttggtaatcaagttttgtattttattttcagatatagtgacagagttcatattcatggtatgtatttcaattgatgtcagtacattggtcagataggcgatataggtctatatggatttatggggtccattctgtctgtgtgatttattttcggtatagaataaaaatagcccgttaatttttaataacgggctaaattagtgaaaatgataatatttatttggaggagagttgtgcatgcatggaagcagctgctttacgtccgtcacccattgcaaggataactgtagctccaccacgcacaatatcgccaccggcataaatagtcgggattgacgattgcatattttcatttacggcaattgttcctttgcgtcccaattccaatcccgggatggaactgggaacaatcgggttaggggagacgcctacgctgactatcgccatatcaatgtcaatggtttctgttgctcctggaatagctatcggactgcgacggccggaagcatctggttcgcctaattccattttctgtaaaacgacttgtttcacacgccccttttcatcggcaatatattctatggggttatgcagagtcaggaattccacaccttcttctttagcatgtttcacttcctccaggcgggcaggcatttcttcttccgaacggcggtaaataatcattgcgcgttctgctcccaagcggcgtgctgtgcggacagagtccatagctgtgttaccaccgccgattactgctacacgtttgccgaatgttacaggagtatctgaatcctcactggctgcatccattagatttacacgagtcagatattcgttggaagacatgatattgatagaattttcacccgggatattcatgaagttgggaagcccggcacctgatgctacaaatatacctttgaaatcttctgcttccaagtcttccacactgattgtctttcctacgatgcagtccttcatgaatttgacacccatcttggataaattgtcaatttctacatctacgattttattgggtaggcggaattcgggaatcccatattttaatacaccccctatttcatgtaaagcttcgaatacagtgacattgtatccctgtttagccatatctccagcaaatgagagtccggcgggacctgaaccgataactgccacttttatgttgttcttttccgctacttccggtacggatatttgaccgctttcacgttcgtaatcagcagcaaaacgttccaaatagcctatggcaacggcttcgtgtccggctttcagatgagtgcattgtgattcacactgtttttcttgaggacatacacgcccgcagacagcaggtaatgcactggttgcttttaaggttttggcagcttcaaggaattcaccgcgttctatatttttgatgaatttcgggatattgattcctacggggcatccgttcatacaagtagggttggggcagtccaaacaacgttttgcttccgttatagcttgctcttcattcaaacctagattgacttcttccttacggctatgtgaacggtattctgcatccagttcgttcatttttacacggggaatagccattcgttctttaggcttcatggctttacgtaagcttgcacgccattcggcatcccggccgtccagttctttagtcgcttcacaagtcgtcggcttttcggtgtctagtttgtgaatttcttctttttctatatctttgaaagctcccatgcgtttcaacatttcgtcaaaatctacttgatggccgtcgaattccgggccgtcaacacaaacaaaacgtgttttgcctcctacagtgatacggcaggcaccacacataccggttccatccaccataatggtgttcagagaaacgtcggtgggaatttcatattttttagtcagcaggcaaacgaatttcatcatgatggcaggaccgatggcgaaacatttgtttaccgtttcacgtttgattacttcctccacgccttcagtcactaatcctttgcgtccgtatgagccgtcgtctgtcataatgattacttcatcagagctttcacgcatttctttctcaaggataattaattctttggtacgtccggccaatacggtaattacgcggttgccggcagctttcaaagcctgtacgataggaagcatcggagcaacgcctactcctcctccggcacagactacagttccgaaattttcaatgtgggtggctttacccagcggaccaacaacatctgtaatataatctccttcgttcaattcacaaagtcgtgtagaagaaagaccaacttcctgtactactagtgtgatggtaccttttacgggatcggcaccggcgatagtaagtggcatacgttctcctttttcaccgacacggacaattacgaaatgtccggccttacgtgacttggcaatcagaggtgcctctattaccaatttaaagaccttttccgagaaatgttcttttgaaataatcttattcattttgctatactataagttcgttgtttttctaagttgattgtcaaattgataatttatgcaaaggtaggattatattttttaaagacaaaagaaaagccgcccttttgtgtgggggcggctaatcctatcatgataaatccgtttttgattttgttgcagtttgttcttgatgtaaaaaagagattatttctttgttctgattttatatcctatcattccataatataggatgaagaggaaacagggaacacagatccagtaggaggtctggaagctagttgcatcttgaaccacaccgcgcacccatggcataaccgctccaccggcaatagccatggttagcaatgaagagccggctttggtgaatttgccgagatccgccattgcgagaggccataatgcgggccacattaatgagcatcctaatgccataaagaatatgcaatagattgaaatttcagccggcatggttgctactaatgcagaaccaatgatggctatgatggcacatattttcattgcggtagcctggctcagatatttagggattaaggttgcaccgcaaatgtatcctactaccataccgatggaagggataaatccgtaattgtcacccggcaactccaatgctttggcatatccggttgcagttgccaaggctatggtttccacacctacataaaggaaaagagcaagtactcctaatagcaagtgaggaaattgcatgatggaagttttaccttctgcatacggacaggcaaccgcttcttccgcatctgtggcggcatcctctccggcagcttttacttcaggcagtggagccattaaggcgataatgcctaatacaacgaaaataccgacaataataccaaatggctggaacaaatcttccatttttatttggtctatggttttgccgattactaaggtaataaaaagagtagtggcaggccaagccagtttgttgcaaatacccatgatggaaatacgttttgcggcagactctatagggccaagaatagttacatatggatttactgacgcttggagtactgcattggcggcaccacagatgaatgaggcgaaaagaaaccatacaatagattctgtagcggctgcttggatgaataatccgaaagcgatagcgaaaatgatgaatgaaagagccattgtttttttgtaaccgatggcttcaatgcatttggtggccggtataccaaaaattaggaatggaacaaacgtggcggcaagcagaagattggattctgaagccgacatttccattgaccgttctaataccggcattaggaaagagttaatgcccaatgcaaaaccaattgcaaaaaacatcatgcctacaaaggcaagaggtaccatgaaatttttctgtgaagtattcataataataggttaaatggttagtaatcaggttgaaataataaaaaaagaatgtcattctgcatacaagacagaatctgtcgggaaagatcggattctgaataatactcagaatgacattcaatatatgtaattagctgttattagtcaatcatctcgaatccgcaataaggaactaatgctttagggatacggataccttccggagtctgattattttctaataaggctgcaacaatacgcggcaaagccagtgcggaaccgttcaaagtatggcataattctgttttcttttcggcagaacggtaacggcatttcaggcgattagcctgatacgtatcgaaattggatacagaacttacttccagccaacgctgttgtgcttccgaataaacctcaaagtcaaagcaaagtgcagctgtaaaactcatatcaccaccgcaaaggcggagaatgcgataggggagttctaatttcttcaacaggccttctacatggtccaacatttcctgatgtgactgtttggaatgttcgggtttgtcaatgcgtaccagttctacttttgagaattcgtgcaaacggttcaacccacgtacgtctttgccgtaagatccggcttcacgacggaaacattgagtatatgcgcaattcttgataggcaattgtttttcgtccaaaatcacgtcacgatagatattggttacaggaacttctgcggttggaatcaagtacaaatcatctacttcacaatgatacatttgtccttctttgtcgggaagttgtcctgttccgtagcccgatgcggtgtttactaccgtcggtggcatgatttcttcgtaaccggaagcgcgggcttcatccaggaagaaattgattaatgcgcgttgaagacgtgcccctttacctttatatacaggaaaacctgcccctgtgattttcacgcccaagtcaaaatctatcaagtcgtattttttggcaagttcccaatggggaagcgcattcttggggagttcggtttccataccgcccattttttccaccacattgtcttcagcgcttacaccttcgggcacactgtcataaggaacattgggaatggtgtaaagcaggttggtcatgtcttcctgtgctttgtccatttctgcttgtaaagctttgctggtttctttgatttcggctacacgtgctttagctgtttcagcatcttctttcttcccttctttcatcagttgcccgatagatttggagagcgagttcacttctgccaggtttttatctaattgattctgcgtgctacgtcttttgtcattgaatgcaagcacttgttctatcgttgcttttgcatctttaaaatgcttcttttccagtccgcggattacctcttccgtattctctgtaatttgtttaatggtaagcatatcttttcagtctttttgatatttcttgaattaatggacaaagatagataaaaaaatggtaaggtgtatgagttattcgttacttttgcattcggattagaaaatgaaaagtaagaaagatgaattatcttgagatagcgggcgctttaatcggtctgctttatttatggtttgaatatagggcgagcatttggttgtggccggtcagtgtcattatgcctgccatttatatagttgtttattatcaagtgggtctgtatgccgattctgttatcagtatctattatttgttggctggaatttatggttggtggatgtggttgcgccatacgccggataaaggggagaagcctgtttccggcacaccgtctaagctgctgttgcctatgtttgttgtgctgcttgtggtgtttgtgctgatagggattattctcgaaacttgtacagatagtacggtgccctggtgggatagttttacaacagcacttagtattattgccatgtggatgcttgcacataaatatgtggaacaatggttggcatggctggttgttgatgctgtttcttgtggtatctatatttacaaagatttatatttcacttcttttttgtatggactttatgcggtaatcgcttgtttcggttatttgaagtggaaacaattaatgaatttatcttatgaaagagtataaattaccgataggatgtgacgtgccggaaacaattattctggctgatggtgatttcccttcccatccgttggcactggagtggttgaggcagtgtccttatgtggtttgttgtgacggggcagcaaatacttatattcgttcaggtagaatgccggaagccattgttggcgatggcgattctttattgccggatattaaagagcgatatgcttcgttgattcatagtgaggcagagcaggaaacaaatgatttgagtaaggcatttcgcttctgcctgtcacaggagaggaagcgtattactatcatgggggctacaggaaaaagagaagatcatacaatagggaatgtcagcttgctggcggattatatggagcaggcggaggttagtatgatgactgattatggtatttttgttcccataagggaggacagtatgtttgaatcttatatcggtcagcagatttctgtttttaatatgaatagtacggctttatctgccgaagggttggcttatcctttgtctgtgtttaccaattggtggcaagggactttgaatgaggcattggccaggcattttataatccggactgaaggtaaggttttagtgttcagggtattctaaaagaaaagactcttcaaggaatgaagagtctttcaatttttttattttgtaactgattatgcttctacagccggaacaacagaaacagatcttctgtcattgcgacctactttgaaacatactgtaccatctactaaagcgaaaagagtatggtcacgtcccataccgatgttttcacccggatggaattctgtacctctctgacgaacaatgatgttacctgctttacaagcctgtccaccaaatatcttaacgcctaatctcttacttgctgattcacggccgttcttagaactacctacaccttttttatgtgccatttcttcttaaattttaaatgattaagcaataacttgtttaatagttaactctgtaaactgctggcggtgaccgttcagttttctataaccttttcttctctttttgtggaatacaagtactttgtcgccttttaccagcggagatactacttcacaaactaccttggcaccttctacagtaggagcacctacagttactgttccattgttgtctaccaacaatactttttcaaattcaacagttgcgccgttttctgcgttctgaatgtggtgtacaaacagttttttgccttcttcagctttgaactgctgaccgttaatttctacaattacgtacatctttttataatattaaacggttttctccgtaaggtggaatgcatcactgccttcacttttctacctcatcggactaaatcgggcacaaaattactatatttatttatatctgcaaagaaaaaacatcttcttttttcttgtactcaatgtttttattcatattgcattttgtggatgcgcgattgtataaataaggtttgtgtgattgtacttttatttaccccattgtataatataggctatcaatacaatgatgcctataatgatagaacagactagcaacagtcccaaaaagcaataccaaaacatgattattgtacggcagaagcttttccaccaggaaagtccgaacagttggcggtaatcccagacaaataatataaagattgctttgtaacttaaatcaaaaatatcattcaaatgtgctgttccggtaaatggcaggatcagtaaagaaatccataagatttggcaggctatataaacttgtgcaaaaaagttttccgtcagatttagtctacgtccgatagaggtccggcagaagcttaaccgggtgcttattgtaaaaagagggagcagagcaaggatgctgaaggctttgttgccatgtatccaacttttcatcaggttaccgactgcagagagaaagctattttctgtgaaataattgttagtcatttcgttaaagacatttttcatttcacttccggcttcgctcaaatcattccagatatcttgatcttcatagggattatcttgttggaccatgtttgccaatatgttttttcttatttccgatatggttgagtcttgtttgttggcttctcttcctaaagtggccatccgtaagctatcttgtcttgccaaagtcgtaccaatttctttcatcagacctctccagtcatcaatctcgccgttttttgcttttattttttgtttaagctccttttttatttgtttgcttatttctttttttagctcattggggtcttgattgctgaattttgcatcgatttgtgcttgtattgattctgataaactgtgagtttgggcccactgtgcactgtctgcataggtaatactttgtcctagataatatttggtacaactgtctgatgtctgttcctgttggtacttgatgtcgtccatcaggctggcgatagtaggctcttcttccatttccttttccgatagttttatcgctgccgggtcaatgagttgtacgcccatgatgtatagagcagccagaacgaacaaggtttgaaatggtttatagtaatgtacacgttttcccttcagataatcccgtatcatgtatcctggtcggtagagtagttctatcaggttacggctgaaaccatggtctatgttaaagaacccacttaaaatattctgaaaggcatttcgtatggtaaaacgtggcgtgtggcggttttgtccgcaatggggacaataatttccttgaaacgtgtttctgcagttcttacagacgcaacatgtcggattttcttttatttcatgtttccctcttatttgtttttgatggagcagtttgtagaaggctactattttttggggaaaacaggaagaataaaagaacttttccggaaaatgtttgtctggttcgtaaggggtgaatttatgaattaatggaagtaacgaaagattgtctagtatttgccggtgtgggtagaccatcagttcttcgcgggttgtcatgccattgagcacacctacgaagtctactttggctgcttgggcggtttctgcgtccactgtgctgtcaccgatgtagagtgtttcgcttttccggcgatgcagccggcgtagtgctttttttataccttggggatctggcttggcttgctttacatcctctcctccgataataatgtcaaaaaaatctttcggaaaatgttggtctaccatttcgcggatacgaaaacggaatttagtggaaatgatacctatttgggcaccttggcttttcagtgttttcagcacggtaagcgtttcaggaaaaaagaacgtgttgacagtcatgtatgtatctgcttcctttacatattcttttttatattcggctaatgtttcgggagtagtgattccgctcaaaatactgaatgaatcttccagtgtttttccaatggtgcgttttatggcttcatcactgatgcccgtatgcccatggcgttccagtacattacgaaagcagataacgatgccgcgtgaagaatcggctagtgtgtaatcaaaatcaaaaaggtatgttgtgtatttcattctttcaaattaaattcattttagtgtaatgaatatattgtccgcaaggatcttgtcaaggacggcctccacttaaccagtgtttacggtaataatcttcattcaggctgctgattatgactccccggctggtactggcatggatgaacttattatctttcaaataaatacctacatgactggcaatccgtttttttctgccgttatggaagaataccaaatctccttcgcgcaagtttctcttacttactttatggcaatcttgggtacgttggtcatccgagttacgtttcaattttttgtggtatacctttttatataaatgtgaagtcagtccggaacagtccactccccgtttgctgttaccaccgccacggtaggggactcccagccatgctgctgattctacgtacagttggtgattgtctttcatgtcaatatccatattcagacggatggaggcacgcgccagttctttgtagttataacgtggggcagaggtaccgcatgaaaccaacaacatggccagtgtacctaataccagcaaatgggatagtagttttttcattctgttacattaaaatagtcctctaattccttttcggcggaattccctttattgtcaatatctcggataatctttccgttttccaacagagcgatgcgtgggcatatatctactgtgtggttcagattatggctggataccagtatggtggctccggtttcttcattataagctttcagtaaatgcttgataatggactgcgaactagggtccagaaagttgaacggttcatctagaaccagtacctgcggttggtgcagcatagccgaaatgatacctattttctgtttgttgcctgccgaatagttacgaatcagttttttttgtccgatgacttcgccattcataaaacgttcaaacctagcgacacgtttatctacttcttcttttgttaacccgtacatttttcctacaaagtagaaatattcttcgggggtaagataatctatcaggaaaccttcgtcaatgaaagctcccgttatatttttccattcctcactccggctcacatcgatgtttccgatatgtacactgcctccgtcggctttcagcaagtccagcatcaggcggaacagggtcgtttttcctgctccgttattgcccaccagtcccaacatgtcaccgctttgaatggagtaattttctatgtctacagccactttcgggccaaagttcttttgtaattggtttattatgatattcatacgcaattcgttttaacgtgagtcacggaagccttccatattctcataacggcgcttcatgaaacggttatagatattttttatccaaatattgtgggttgcaatcagtaacaaccctataatcatcatgatgatgcaggctgtatcctgttcaaagaaagctgtcagagctttgttgataatcaagggcaggaaaaaagcacatgagatgataatggtctggaataaggaacttccccgattgcttcgcatgacattggcgtttaacgggagtgtctttttattgtacacagccagttgcagcatcatggcgaatacgaatcctgctgtaaacagcatataggatagagccatgaggaagggtatcttgcccttagctacagggatcatcataatcaggaaagggatgaacacgatgatgcagttcaggtaatacttggcacgaagcaagttatagatagattccttacggctcataagaccatccagatagttgccctcaaaagacatcacttgccccagggtcatgatacttaaaatggcaaaattgtatatgcagataaaatttatcattcctgttccgtcatacacatccgtgaaggcaatcagtgccgaaaaagccagcatgatgataaatcccatgcggaattgtgtctttacggttttgttacggaaacacagttttagttccagacgtagatattcacctacgtcaccatagcggtccaggaatttatattcggatacatgcttcatcttggtgtcttccactttggctatttcattatagatgaagtgtagctgtagcttgcgatttactagcagaagtaacagaatggctgctatgacacctagaaaggcgagtatgtttccttctataaatccttctcccaaattcatcatgaacgtggaaaccgggtttccttcgggaataaattcagttcccgctaataatccgtatactccgatcgggagaagtatataaagcagtttctcattcagtaaagttttgcatatcaaataccaataactgttcataaccatcagaagccaaatgccgcacagatagcataggatgcccgtgagtccgtagaaacggataatcgtaagcagagcaaaaggtatgatcaggaaaaaccagaagaaattgtaactgctgattccggattgtagtaacagggtatccaccagcttattcttttttaccggcataagcagatagggcttgatctcttgcgacatggccggttggagcatgaagcgtaacaggaaatcaagtatcagaagataaatcaatccttggttcataatatggtaaggttccatgctgggaaagatatcttcaaaagcaaaggacagcatgaccccgataaagatgaggtatgctgcccaaaaagcgaccataaagtaaattaaaaacttggcgaagcggttcctgtcaaatgcaggattccgcttggccgcaagtttttgattctgtcttataatagatagaagcataggcttggattattttgtttcttccgaggtcatgcttacttctacacggttattctgttccaacaaggctttggtaaattcttgcagatctttagcagtaatgctgtttacggtatttgtgtagccggtgttcatatctgttccttcccagaaatattcacccagtatatttacccaataactgttttctttggcattttccttgtatttcttcagcatgaattcttttaccttgttcaaattttcggcagacggtccttggtcgacaaactgattcagttcattcaaaatgatatccgtcattttggcacgtttggcaggatcggtatcgaaatagatttgcagaaccgctttctcttttggatatttggtcagactgccgaatgcgcttactccgtacgtaccgccttctttttcacgcacactttcggtatacatgatattcagtatctgtgaaagcatactcatcatgatttggtttttcagagtatatgcacatttaccattgttgataaccagtacagaggctttgggcgtttccagttttttgctgaaaatgttcttatagtcgccttggcgcatatcaatgtgattgtcacggaaggtttccttgcggttgacagaaggcaaagctcccagataagttgcaatcaacggctctacttcttccggtttgatgtttcctacaaagatgaaagtaaagtcgctggcgtctttgaaacggtctttgtacatctccataactttggcatagtcaatcttgtccaccatatcggctttcatacggatagtacgcggatgtcccatatagagggctttttgcaacgtatcctgtaaggcagtcatggggttggcctcttgatttgccaaagatgcttgcagacggttcttgaatgaagtgaatgcatcattgtccattcgtggagccgtgaatgacaaatagactaattgcatcaaggtctcaaaatctttgggtgagcagcttccgctcagcccctctgtattgccaccgacagaagcacttacactcgcttttttacctgccaatactttctccagatcaacattgctgaagttacccaaaccgccgatacttgccacatcattcatgacattgatattgataatttcatcattcgggaacaaggaactgccacccggactgaaagctctcattctgatttcatccgctttgaaatcggtcgactttaagataacgcgtactccattggatagagtcaggatagtagaaccgaacggaccattttcctgttttgtaatctttccaccttggggcttttcagaaatcaaaggttcatcagaaactttgtcttcataagcagtcagtgtctcagcttttaccttattgacagcagccaaaatttcttccttggatggaactttcaatccttccttttctgggaagaatacatttactaccagattgctgtcggtaaccaaggccgggatcagactgtttaccatttccacagacaggttggggacgatctgattcataatggcatattcattttcaatacctggaatcggttcgttgtcaatgaagtggcgtacatattcatccacgtatgcaccgtttttcactttattgcgttcgttgtatgcagattccagcatacgcagataatccgctttggcgcgggcatattcggacgcggtgaaaccaaatttatggacccgttcaatttcgcgtacaatggcggttattgcactgtcaattccatcttccttgcttgctactattcctgtaaaggcatcttttgttttggaaatcaggaattcttggtcgctgacttgagcgaagatgaaaggaggattggctgtttgggtcagttcgttcagacgggcgttcaacatattttctatcatggatttcatgtagttcactaccagataatccatgtttcccttttgttcattaggaatagcttcatgtttgtagcataaataagctactgggtttgcctgttctttatctgtttctattgctacaatagtttccttattgtcgggaacttggaagtattctcgttctgccgggttttctggcattttaataggagagaatatcttcttaatctttgcctcaatcttgtctacatctatatcgcctactacgacaataccctgttggtccggacgataccatttttcataataatcgcgtaatgcctgataagggaaattgtctactacttccataatgccgatgggaagcctataggcatatttactttccggataaagggtagggagggctttttcgtacatacgcatcatagcgtttgtgctggtacgccattcctcatgaatcacaccgcgttcgctgtctatttccttaggatccagtgtcaggtcgtcggcccagtcatgcaaaatcagcaaacaagaatctacaacgccgtcacgtatcacgggaacattggaaatattgtatacggtttcatctatgctggtataagcattcaggttttcaccgaatttcacccctatgctttccagatattggatgagggttttgtcgggaaagtttttagtcccgttaaagcacatgtgttctaagaagtgtgccaagcctcgctggttgtcttcttccaaaatggaacctactttttgagcgatgtagaaatcggctcttttttccgggagttcgttgtgacggatgtaataagtcaatccgttgtccaatttaccgatgcgaacgttagggtccgtcgggatgggaggcatttgctgttgtgcaaagcccaccgacacgctgcctagaataatccaggcagctgccatcttccttagaaaatgtgtcatagtgtttgttgtggggttagtttgtttttattataataagtcgttggcagataggtatctttctgcttctatggcagccttgcagccacttccggcagcagtgatagcctgacgataatgcgggtcggccacatcaccggcagcgaacacaccgggaaccttcgtacgcggagtacctgcttctgttataatgtagcctacttcgtctgtgtccaaataatccttgaaaatgtctgaattgggtttatggccgatagccagaaagaatccgtcaataggcaagtcataacgttcttcgttgcattcaccctgacgctttaccaaatgaacaccttctacgccattctctccgtataagccgacagcgttgtgctcgaacagtaccttgatgttaggatggttcataacacgtgcctgcataatcttggatgcgcgtaagaacggtttgcgtacaatcaggtaaacctgtttggccagtcctgccagatagacagcctcctcgcaagcagtgtcaccgccacctactacagctacggttttcttgcgatagaagaaaccgtcgcaggtggcgcaggcgcttacacccattccggcatatttctgttcgtcttccagacctagatatttggcggtggcacctgtggatataattacagtttctgcctcaatcactttttcgtcatcaatggtgatacggtaaggacgtttgctcaggtcggcggaggttgcaatgccattgcggatatccgcgccgaagcgttctgcttgtttgcgcaagtcctccatcagttgggtaccgctgataccttcgggatatccggggaaattttccacctcggtagtgatggtcaactggcctccgggctgtagaccttcatataagaccggggcgatgttggcacgtcctgtataaatggcggcggtgtagccggcaggacctgagccgatgataaggcatttaactttttctgtactcataatacttatttctttacttaatttaatttgatgaatattatattatctctctatcttgaactctgcttgttatcgtaagtctatcacttcggcatttgggaatttctttttatcaaacttgaatgtcgcattgtccagcggctggttggtttggtaagaagtgacgataatctcatttgccgatttattactttgttctacctttatatataaaggctgatatgtttgggaaacgaacaaggtgatggatgtgatatcctgtttattctccggagtcagtatcacttcaaacccctgtttgccgttacggcttttgatccctgtatacttataattatatccgcttttgtaaatggataacagtgcataaggattgatggtttgcaactcttccggggtaggattgctcacattcacttcttcgctgctttccagataactccattgcgttgttccgtcaaaccagctttgtattccgccactgttcagatagaaccggttgccttttagcaataaggttccatttcctgtccctccaaaggtggcacggatgcctccggcctgttgcagggcattggcggttttgtccaatatctcccgtgcctgtttgtccttttgtgcggataggctgactgaaaggaaaaggattaataccagtaaatatgttcttttcatttttatcataacattattaaacaacttattgttgcagattgttcaatttcatttccaggtctgtttcatccatgcagagtacgtcacgcgccttgcttccttgagtggggccaacaattccagctttttccagttggtccatgatacgtcccgcacggttatagccgatagagaacttgcgttggattaatgaggtagagccttgctggtgaatcacgaccagtctggctgcgtcttcaaacatagggtctaaccggttcatgtctacttcgccaacgctgctttcactctcttcgcctacatattcgggcaacatgaatgcggtggtgtatccttgttgtttactgatgtaattggctattttttccacttcaggagtatccacgaatgcacattgcacacgtaccggatcattaccttgcaagtaaagcatatctcccttaccaatcagctgttgtgctcccgaacggtccagaatagtacgtgagtccatcatggcagctacacggaaggcaacacgtgccgggaagttagctttgatagtaccggtaataatgttcgttgtcggacgctgggtcgcgataatggcatgtatgcctactgcacgtgccaactgggcgatacggcagattggtaattccacttccttacccgcagtcataatcaggtcaccgaactcatcaatgataatcactatgtaaggcatgaagcggtgtcctttttccggattcaactgccggttgatgaatttcgcgttatattccttaatattacggcaaccggctttacgcagcaagtcgtatcggctgtccatctctatacatagtgagttcaaggtttgtaccactttggtaacatcggtgataatcgcgtcttctccatccggcagcttggccagaaaatgcttctcaatcggagcatagatagcgaactccaccttcttggggtctacaattacaaacttaagttctgccggatgcttcttatataataaagaggtcacgatggcattcaatcctacggacttaccctgtccggtagcgccggctaccaacatgtggggggcttttgccaagtccaccataaagacttcgttcgtaatggtcttgcctaatgccacaggcagctcataggtggtttcttggaactttttgctgttcaggatggatttcatcggtacaatgcgcggattggcattcggaacctcaataccgatagtgcctttgcccggtatcggagcaatgatgcggatacccagtgccgacaaacttaatgcgatatcatcctccaagttcctgattttagagatacgtaccccctctgccggagtaatttcgtataatgtgatggtaggacctacacttgccttgatggaactgatttcaataccgaagctacgtaaaaccttgatgatgcggtctttgttggcgttttgctcttccatgtcaatattaggaccatcatcttcatattcatttagcaaatccagactagggaatttgtagttttccaaatccagacgagggttgtatggtggaagtacgggacctttgtacgcctcgtcttcttcatttgtttcttcactgattgaaaaatcaggttcatctgtattttcaacttcctcttcttcgtttgtgtaggcaggttcttctatcactgccggttcggtaacctgcttgctctcaaaagggaagggcacttgttcttccacttcctcttctttctttgtcggttgttctaattcgaaatctacgatagcaggaccgggattagagaattctttcctggattcttccttccggggagcttctttaatcggattttcttcagttgcagaaattgtttgatcctcttttttctttcgtctgaagctgggacgcagtgctttacggataaccagtatggtttcgttacttaaatagataaagaacaatagtgccgctatgaacagcaataatcccaaacctggaatcccaatttgtgaaatcagccaattgcttacattatgtccgtgcaatccccccggatagataaaactatccccaaaggtgccgtcaaaaataaatcccaatgtgatagagaaccagatgagcaggatagaacaggacataaaccatttccagatacggaactggtaagctttcattaatttcatacccactacggccaggaataaaatgataaaataagcagctaagccgaaacattcgtttataaggaattcggcaagttgtgcaccgcgtgctccggcgtaattttttacatgattggcggtttgcatcagttcacccggctgctgattatccaaaatactttggtcggcggcccccgtaaagaagaaagaggtaaatgccagtaacagataaactgcaaaaattacactgatcaatccgattacaaaatgtgtggtttcgttctttaaaaaagcggagaatcgtttggtagatacctttttaggctctgtctccttatctgattttttctttgccataggtcttcgttctatttattatttcgcaaatgtacatgaaaaacattaattattgccttatttaatctcttttttcttaactttgcgattcaattttaatgtttatggaaaagtacagtcaggtgatatttgacaaaaatacagtagagtttgtaacggtagccgccgaattttgtggctttctggaacgtgcccgtgatatgaaacgctatgactttgtagataccgccttaaaaatacttccgttgctttatttgaaagcgactttgttgcctccgtgtgagccgataggagaggacgaacccgaaaccttcgttactgaagaagattatgaactgatacgtagggctatagccggtgtgttaggagccaaggatgattatctggaagtgttcttgccggatatggtgtacagtgacacgcccatcaaaaaatgtatttcagaggatttggcagatatctatcaggatttgaaggactttatcagtgtgttccaactgggactgaatgagacgatgaacgattctttagtggtctgcaaggaacatttcagagagttttggggacaacggctggtaaacactatgcgtgctttgcatgatgtgaagtacagccctgccgatgatggcgaggaggaagaaatggaagatgagaattcattattatgaaacaaataaggaaaacgattactaaagccgagatagcagcaatgcccaaggtgctttttccgggacgcatcttcgtgatttataccgagagtgaggccgaaaaagcggtagcctatttgaaagatcaacgcatagtgggagtggatacggaaacacgcccttcttttaaacgcggtactacccataaggtagctttgttgcaaatatctacgcaagatacctgtttcttgtttcgcctgaaccggataggtatgcctgattctctgcaagagtttttgatgagcgataccttgaagataggtttgtctctgaaagacgattttaactcgttgcggaagcgtgaggatgtgcatcccgaccggggaaactggatagagttacaggactatgtaggacgattcggcatagctgaccggagtctgcaaaaaatcttcgccaatttgtttggccagaagatttcaaaaagccagcgtctttccaattgggaggcggaggtgctcagcgagggacagaaactatatgcagccacggatgcgtgggcttgtgtggaaatttacaattgcctgacggaattggaacgtacgggcggttatgagataacagaggaagaaccaatagaaacaacagtaaatacaaatggcttataagaaagtatacctgaaaccgggtaaggaagagtcgttaaagcgttttcatccgtgggtattctccggagctatccagcgcattgagggagaacccgaagaaggcgagatagtggatgtgtacacttcgaagaaagagtttatagcttgcgggcatttccagataggaagtattgccgtgcgcgtgctctctttcaaggaaggtgagattgatcatgaattttggaagcataaactggaagtggcatacgatttgcgccgcagtttgggtttggccggtaatcctgcaaacaatacttaccgtctggttcatggcgaaggagacaacttgccgggcttgattattgatgtatatgatcatacagctgtgatgcaggcacattcggccggaatgcatgtttaccgtatggagatagccgatgccttgtccgaggtgatgggggatgtagtccggaacatttattataaatcagaaaccacattgcctttcaaggcggatttgggaccggagaatggttttatcaaggggggaagctccgaaaacatagcgatggaatacggcttgaaattccatgtggattggctgaaaggtcagaaaacaggcttttttgtggatcagcgtgagaaccgccatttgttggagcgttatgccaaagggcgtaatgtattgaatatgttctgctatacaggaggcttctctttctatgccatgcgtggaggcgcgaatctggtacattcggtagacagttcggcaaaagctattgatcttaccaatatgaacgtggaattaaattttccgggtgatacccgtcataaggcgtatgctgaggatgcttttaaatacctggatcgtatgggggatcaatatgatttgataattcttgaccctcctgcatttgccaaacacaaggatgctctccgcaatgcattgcgcggctatacgaaattgaacgctaaagcatttgagaaaatcaaaccgggaggcattctgtttactttctcttgttcgcaggtggtggataaggtgaatttccgtaatgcggtatttacagctgccgcacaaagcggacgtagtgtgcgtattctgcatcaattgacccagccgggagatcatcccgtaaatatttaccatcctgaaggagagtatttgaaagggttggtgctgtatgtggaataatttgattggtttgtataatcatatatagtacaaaggcgtttttacagaatttgaaactgtaaaagcgcctttaaaatttaaatgatgttaattgaaagcaaataattgtagtgttattatgtttgataacataaaactacttatctttgcactgtgtttttcatggtattagatttaaggttaatgaagattgggtgtctgggatagatacccttctttttttatatatgatataggtcgtttttttaggcttcttcttcctgaaaaagagatttgctctattttttcttccacttcttacattttctcttttggggtgacagccctctgttggttcttcttcaatgctggcggcatagttcgttctgcctgggtttaaagctttatatacgctttcctaagtcttttcgggctgatgattaaggggatttgtacggttatgtagtacagactccggcagtggactgtacagtcgcctatagtagactgtatagtctattccaatcgtctgtacagtccactgccggagtctgtattaggtggctggaagaaaaagcttaatgtaacagaagaaaatgcttagatgacgggttataacatcttggtaattatagtgttggtataaacatgaaagtagtataaatgggttgcctcaatcatgaagctcacggtggcgcgttatatagaaacaggaggtgctgaagtaatttctgatatattttaactgtgccagtacaggatataattttcgtggccgcagatggaacttttgttggtagtgtgggttgatgaaccataattgtctgtcggttatttcgtatccatacttttcagcaagttgttcaaaggtgtctatggtcatgcggcagcgtttgatgtctgataattcttcaatacatgatggtgtttcatggaaacatctgagcagaaaccgatagagtataccgggacataaatgaatgaaagggagagaggagacgaaccggttgtggcaaatttgctgatgtccgccaaatggcatttgccaagacgggaatccccagaatatgatgcctctcttagctagaagaggagagaggcaacggaagaattcttctttgttactgatgtgttcaataacatcgtgtatcaggatgagttggtaacgggaagctgaggaaaagttgaagaaatccgttgtggtgaattctcctttgtagccggaggcggcgaagaaggtttctgcctggtgtatgcgactggctgcacggtctattcctgttaccttgcagcctagttcggcaaagggaagcaggttgcctccttctccgcaacctatttccagtatgtgggtggaagggctgagggagataaattgcttcacatagtctatatagaaactacgggacgtattcgccagctcgttaaaataacattgtctgtctttatgtcttttttgcatggttgttttttttatcttatagatacaaggatggacaaaagactgcatgaagtttccttaataattccagcgcacccccaattgcaggttgaaatggagcgggtgtttgtcacgtatggtgtttttaaagctgccgtccttgaaataaaaaactgttccgggctctatgaaagcacctagggtggaatttatattatattgtattcccaatgcggcgtgtagggagaattggaacggttttattttcagattctctgtactggaatagattttctctttctgaacgatgaaatcttgttccagtttacccgaaacggatttgtctattgtgcctcctcctgtggcataaaaggaaaaggtgcgggtggtataaagccggcggtctaatttcacggacaagcctatgtagtggagcttttgtcgtttaacccacttggaatcttctcctatggaactttcggacgacagataggtgtattgcagtcccgcgctgaccccccagtgcctgcttatagatttacggagcgaaagctcaatgctgacggggagattataatgggtatattctgtcatgggccgtcccgtgttgtcatttgctatttgtagtagagcttcgtaagcttgtgcatcgggaaagtccgatggatattcctgcaaatagtctttgaagtcactccaatacataatttcatccttatgagaactccctatgtctccccgggaaaaagttttgtttatgaagccggtacttgctccgttattgccggcagatatggcaagtgccaaagtatatccggaacgcttatacggtaatgcaaagtgcttgtgtccggaagggcgcttgtgtacagattctgtatcccggattgtatcttgtaccgggggcatacattctgtttctatattatttgccgtatcggtgtggatacttgtttggattggcggtcttgtcaaggaagctgtctttgatttggtcctgtcctgtaacagtttgttttcaggcataatggaaaggctgcctgtaatgcttcttggctggtatgccggtaaggatacaacaggtgaggatgctttatgtttttctgtctgtaaaaaataaaaagtagtggcaaaaggtatgaatatcaagaagaaaacggctgctatacgcatcgttttcatccttcttctcttatgtagatagggagtgaaaaattccgtttgaaaatgattccaatcatttcctgggagtggcttttcgtattcgttaacccgttgtttcaagtggtctatccacggttcttcttcctgtttcataatgattgtcgagttaagtattctttaattttctgagcaagtatacatttggcgcggtacagttgtgaggaggatgaatgttcgttaatgcctaatgtcttcgcaatctccttatgaggcatttcctcgaatacggccaagttcagtatggtgcgatagcctgtcggtaattcagctatgaatttcatcagggtttcaataggaattgaaatcatatcttcttcgtccacaggttgcatgttttcttccaggtcatctacagaaaggaaagagctgcttttctgtttgcggagatggtgcaaggaggtggttaccatgatacgggtgatccaggatctgaatccatgcaggtcggtggcatgtagctggccgatggcggaaaatactttgacgaatccatcgtgcatgacgtccagtgccgaatcttcgcctacatagcgatagcacactccatacatttggcgggagaagagcctgtatatggtttccaaagcttcccgctttccggctttacatccctctattagttctgtgtcattcattcttcttttgtcatgttattatatgaagatacaggagagggtaaaagactgcatggaaacagaagtttttctgaaaataaatgtaaaaagaagataattgtctgcatttgttaggttaaaacaaaacagatgaaaaatatgagaatacaactttatgcaacactggcttgctttcttttaactttggtcacaacttacgggcagggctgaaaaccttatgtggaagcagggatgaatgattgtatggcgaacgtttcattgtttataatccgtactgcatatggttcggaagcggaaaagataaatctgcttgcaggattgttgcagaaggcaggattacaaggcgagattaaggttgcctgtggagtggaagcactaggtcgtttgtttgggcttaagcgttatcagtcagttgtttatggattttctatcatagcggggcagacaggaatatcagcctgtcaatacgctggatggtaaaaagatggttttgaaagagaggaagcgacagggtaaaaattggttgaaatggttgaaaagttggtcatcctttgaaaaagggaaggccggcttttcttattttccatcggaggatttacatttgtggtatttaaaacctataaaatgaatgatatgaaaggaaaacagggtctggtttgtatgggcttgttgctggtgctctcttcttgtcacaccggtaagcaaatcacagcttctggattacagcggaaggattttcaaacagaagtgaatgggcagcataccgatttatttacattgagcaacaagcagggaatggaggtctgtatcacaaactatggggcacgggtggtttctatccttgtccccgacagaaatggaaaacgggaggatgtggtgtgcggattttccacgattactgaatatatggagcaacggcagaattttggttctacggtggggcgttatataggacgtattctgaatgcgcgtttcacgctggatggagtagagtataagctggtccctaacaatgggaagtccgggcatatatcacatggagggaatcccggttttgccgatagaatatggaaagtggagcaggcagatacacatagggtccgtctgtcttatctctctcctgatggagaaaatggtttccccggaaacctgaaagtgacgttggtctatagtcttggtgaggatgataatgcgttggatttgacatacgaggcaactacggatgcacccacggtacttaatctttcccatcattctttttttaatatttcgggaaattttacgaaaagcgtggaggaccagcaactttgggtagacgcagatcgttttactccatacgatgataagaaatgtgttacaggagaatatcttccggtggccggtactccccttgattttcgtatgccgcatactatcggagaatgtatagatgcggatcatccccaattgaaggtggtaaacggatatgatcatacttgggaattgaatacgaaaggagatgatacaaggccggctgcctgggtgtatgatccagcaagcgggcgtaagatggagatcttcaccaccgagccgggaatgcaaatttataccggtaatggactgaaaggaaaaatgacaggtaaaggggggatagcttatcctttccgttcggcggtatgtttcgaaacgatgcattttcaagatagccccaaccagcccggatttcctagtactgtactccgtccgggagaggtctttcgtagtcatacggtttataagtttgaataattggtgcatccgtcaactggctgatgtgccaattagcggtgctatatatgcccatacggttattggtatattggtaaattgacatgtcagcaaatttttttttcattttgatgtaacgtttccctacctctatgtgtcatactggtgaacatggaacaaaatagatttgaaatagaggcaaaacgaatgcggccggctttgttaagaatggctatccgttatttggaaaactccgacgaggcagaagatgcagtgcaagatgcactgttgaaactttggtttcttcgcgaccgtctggaccaataccgcagcgtggatgcattggctattgttataaccaagcatttgtgcatcaaccgtctgcgagtcactcggatagagaaagtcgatttggagcagggcatcagcattggtggaggtgaaaatcctgaaatgaaactggtagaggaagagaatatgcaggagatactggaagtaataggtactttgcctgacttgcaacagtctattctccgcatgaagcacctggaaggtttcgaagtagaggagatagcccgtctcacaggaagtacgccggtggcggtacgaaccaatttgtcgagagctagaaaaagagtaaaagaacaatttatgatacacagtaaggtatggaattagataagaggaatatagaagaatacattaaccgtttcctggaaggggagaccacgaatgccgaggagcaggctatttatcgcttcttccatacaggggatgtaccttctcatctgatgggatatgctccgatgtttgcctggtatgagggaggtatgcagggagaaccgggtatgtcgcagccagacggtcaggaggaggttgccggagggaagaaatcggaaaaggtaccggtggttggaaaagaaggcttttatcagcgtattccggtagctgtctggagtgccggaatagcggcaatgatggtcattgcgctggggttaggtttgattttctattcggagaaccaagcaggcggaagtggtgaatggtcgtgctacgaaggtagttatgtggaagtgggaggcaagcgaatttcggatgtgaaacagattatgccttgtattattgaaacactggaagaggcggaacgggtggagaaactggctcaggagcgtgtggaggaaatttgtcgttccgagaaagagatagaagaaaaggaattattggtaagcgaataaaaaacataaaaaaaataagatatgaaaacaagatttattttaggaagtgcattggcggctgttttgctgatgtggggtggaacaggtaaggttatggcccagaagaatattgataaaatggcggcggaactggaaaaacgggatgatgtggctatcaactctgtaacgaaacgtgaccctaaaacccgcaaagtggtgaaggtggtgaaaagtttctcgttaaaggatgagaatataggcgcaaggttgattgaggctttcgagaaggatgaggaatatgccgaaactgccatcaaggatatgccgaagggaagaggcaaggcgcagaaagcgaattttacgttcatttataagacggataatgagaaacgtacttacacccttaatgtcaaagaaagcggaagtgtaagcatgaccgtcattatcagtccgatgaaggatgggcaagaagtgggttctgttgtccttgacccggaatattgggattcgttcaatgagcagatggccgaattagggaataatctaagggattccggtatagaggtgcgccaaatgagtcgggaagagatggagaagatgcaggaaactatccgccagtcattgaaaggactggatgcttatgccatagctgaatagatgatggcattatttttcacgaacacaagataataaaacactctcttttagttagattacaaaaactttttaattgtcttgcctttccggaagttgtgaaactgccggaaaggctttgttttttaagatgaatctccatgaaaaatcgaattgttttatatctttgcaagtaatataaaaaacacacattaaagaagaaagatgaaaaacgaaattaccggaatgagattcagactgatagtcatgaacttcttgcagtttgccgtatggggggcttatcttacttccatggggacgtatttgtttaatattggcttgggggccaagataggtctgttttacgccatgcaggggattgtttccttgtttatgcctgccataatgggaattattgccgacaggtgggtgcctgctcaaaaattatatggtttctgtcattttatggctgccgtgtttatggtggctgccgggtggtatggctatgtggatggtgaagcggttaatttcggtactttgtttacattttattctcttagtgtagctttttatatgccaacattggctttgacaaattcggtagcctataccgcactggataaagtaaaactggaccctgtcatcgcttttcctcccatccgtattttcggaacgattggtttcatctgctccatgttgctgacggatatcttgggattccaaaataattatatgcagtttttttcttgtgcttgctttggagtgatactggcggtttatgcgcttactttgcctgagtgtcctgtaagtcgtggtggagaacagaaatcgttggtagatgctatgggattacgggcgtttacactgttcaaacagaaaaagatggctattttctttatattttctatgttgttgggggtttctttacagataaccaacggttttgccaatccgtttctcagcagtttcaagggagttccggagtatgccgatacgtttggagtgaatcatgccaatgcattgatatctttgtcgcaggtgtcggaaacattgtgtatcttattaataccgtttgtgttgaagcatttcggaatcaagcgtgttatgctgatagccatgttggcatgggtacttcgtttcggattgttcggactggggaatcctgggccgggtgtctggatgtttgtactgtccatgattgtgtatggggtggctttcgacttcttcaacatttctggttcgttgtttgttaacaatgaaactgatttatccatccgttccagtgctcagggattgttcgtgattatgacaaatggtattggcgctacggtgggaacgttgggagctcaggcagtggtaaatcgttttgttgatatgaacagcagtgctccgcagatggagggatggagcatgacatggtttgtctttgcgggatatgccttggcggttgcggtattgtttgctgtcatattcaagtataagcatcgtcccgggcaagtttgataaattattttttgactgtttccgatgtagacgggaatggtggaaggaaagttaaattatggatgaaatagaattgaaggtacatgatatgtcctctacattgcagccggcggatgcatatgcgttggtgttggaagaagtgaacggcaaccgtaagctgcctattattatcggttcgttggaggcgcaggctattaaggtggtaatgatgggctataagatgcccagaccattgacgcacgatctttttctgacggtgaccaaagagttggggactgctttaaagaaagtattgatatataaggtaaaggatggagtctattattcctatctgtttttggaaaaggaaggtgaggtatttaaaatagactcacgtacttccgatgcgattgcgttggctatgcgttgcgggtgtcctgtctatactactgatgagattatggaaagtgagcagttgcatgaagttgggaatacggcattttctgtcaatgtaaatacagttgatgtggtgatgctgaaagaagcattgtcaaaggctatagaagaagagaattatgagcaggcatcccgtttgcgtgatgagataaaacgacgggaacaagaggaggagaatacaatagcttgatatataaattgaaaaaacaagaagaactatgcatgttttttatacccctgatatagcgagtaaccttgagcttccggaagaggaagcaggacattgtttacgggttttgcgcctttccataggcgatgagattatgttgaccgatgggaaaggttgtttttacaaagctgtaatcagtgctgcaagcggtaaacgttgccaagtgaaggtaacggaaacgattccgcaggaaaaagggtggaacggctggttgcatattgccatggctcccactaaaaatatggatcgtactgaatggtttacagagaaagcgactgaaataggctttgatgaactgtctttcctgaattgccgttattccgaacggaaagtaatcaagaaggaacgtattgaaaagattctggtatcggcagtgaaacaatcgttgaaggcgactatgccggtgctgaatgaaatgacggactttaataagtttgtttcacgggattttaaagggcagaagttcatcgcccattgctatgaaggggaaaaacctttgttgaaagatatattgcgttccggagaagatgctttggtgatgataggtccggaaggagattttagcgaggaagaagtggctaaggctatagcggcgggttttcagcctgtcagtttgggaaagtcccgtcttcgcacggaaacagctgcattggtagcctgtcatacgctgaatttattaaaccaaaaataagaatatgagaaaaggtatttggggatttgcactcgtagcgatagtgctgcttatggcttcttgttcgtctgaaagtgagtatgccaacgctattcctaaggatgcggcaatggttatgtcattcgatttcaagacgatggcggagaagagcggcataaacggtaaaggaggagaaaaggttgtggccaaactgacggacgcattgaaaagcggtttggagggtgaagcttacaagactgccgagaagattattcaaaatccgtctgaatcgggcttgtcttttaccgataaggtgtatatgttcatcactcctcattctaatgcttttgctttattggcgaaagtggatgatgaaggtaaagtggaagctttgctggaggcattaaagaatgagcagatatgtacggagttgaaaagtgaaagcggatgtacatggacacagatgggtacggcgctgtgcgcttttaataaggggactttcttattgatgggtagtaataaaggagatgccctcagtttgaaaggaagtttgctttcattgatgcgtcaggatgctgaaaacagctacgtaaagactacagactttggtaagttggcttcggcaaaaggtgaagtcgttacagtgatgaatatgtcgttcattcctaatgatattaccatgcagatgcgtatgggaatgcctgccgatttgaaactggaagatatcaaatatctggtttccaccactttcgaaaaaggcaaaattgtagtggacgtggaaactttgattgaaaacaaggatttgattgctatgtatgaaaaacagtcggctgcttcctcatgtattaaaggagcctgtttagagtatttccctgccaatacgttggtttgggcaggaggtaatatcaatggaaagggtatttatgatttgctttgcgaaaatcctaccatcaggcaagcgttggataatccgatgttaccaatagatattgaaggtatattctcttctattcatggagatgttgcggttggctataattccttgtcgaataatgacttgctgatttatgctgatgtaacgaataaagactttttgcagtccttcgaagacctgaaacctttgttggctatgaccggtgggcagatgcagttgaactctacgggtaaagaccaatacgagttccgtatgtatcgccaaagcatttggtttggtgtgaaggacaatctgctttatatctcgaacaatgaaagactggcagatgaggcaggccgccgttacggagtttctttgcagaatactccttgggccggacaggtgacaaagaaccgtttctttatggcgttcaatgcggcgcagctggtgaaggatgttcaggagaatcctcggttaacccgtatgctgggcagcgatgccgccatgttcaatgccatcctgggaccttgcgactatatggatgtgatggctcccgattggaaaagcgcccaaatgaatattgttatgaaagataaagaggtcaacgtgctacagttgattgtacgtggattggagaatttatgaacactatagaattacaacagaccctccctgccgtttttgcagggaggaattctattatatctgatgtctggcatcagtcgttgactctgaagcgtggagaagcttatttggtggaggcagcgtccggtacaggaaaatcatcgctttgcagctacatatacggataccgtaacgactatcaaggtatcatctgttttgacgggaaaaatatccgtacgctttcggtgcgcgactgggtggagattcggaaatgttccatcagtatgttgtttcaggaattacgtttgtttacagaactgacagcgtgggagaatgtgcagttgaagaattcgctgaccggatttaaatctaagaaagaaatcaaggcttggtttgaacagttcggcattgccgataaatgggatacgccaatagctaaaatgtctttcggacaacagcagcgtgttgcgttggtccgcgccctttgccaaccttttgattttatttttctggatgaacctatcagccatctggatgaggagaatggacggattatgtcccggatattggtggaggaagcggatagacagggggcaggtatcattgtgacctctattggcaagcatttggagttgaactacacaaaaacgttgaagctatgaggttggtctggaaattattacgtcagcatatcagcttttcacaattggcgggttttttctttgccaatctgtgcggtatggtcattgtgttgctgagtgttcagttttataaagatgtgttgccggtttttacagaaggtgacagtttcatgaagaaagactatgtgatagtaagcaagaaagtgagcacattgggttcttttgtcggtaaaagcaagactttttccgaacaagacattgctgaaatcagcgaacagccgtttaccaaaggggtaggggcttttatcccttcccaatttaaagtgtcggcaggcatggggatggagaacgtgggattgcacatgtctacagccatgttctttgagtctgttcccgatgagtatgtggatgtgaacctggataaatgggagtttgatgaatatgaacgggtcgttcctattatcatcccccgtaattatctgaatctgtataacttcggttttgcacaaagccggagcctgccgcaattgtcggaaggggtgatgggtatggttaatttggatatacgtattaccggtgtggggcgtacggaaaactttaaaggaaaaatagttggtttctctaatcgtctgaatacgattcttgttccggaaacatttatgacgtgggccaacaatgagtttgccccggggcagaaaagcgaaccgtcacgactgattgttgaagtgaacaatcctacggacgaccgtattgccaggttctttaaagacaagggatatgatacggaagatgacaagttggatgcgggaaagactacctggttcttgaaagtgattataggaattgtgctttctgtaggtttgcttatcagtgtgctctctttctatattttgatgctcagtatttatttgttgctgcaaaagaatacatccaagttagagaatctgttattgataggttacagtccggctaaggtggcgctcccttatcaaatgctgacattggcactcaatgctgtggtgctgtttttatcagtgggaattgtgatttatgtgcggagtaactatatggatatgataggaaagttattcccacaattggaagcaggaaatttaggaccggccttggttataggtgttttgctttttgtgggtgtatccttatttaatatagtagcggtacgtcgtaaagtggcatctatatggatgcataaaggttgataatagttatggtatctcagacagaatttacgcttcgtccccgtaccaggggatttcacctgattactgatgaagtggtgcgcaatttgccgccacttccccaaacaggtttgctttatttgttcatcaaacatactagtgcggcattaagtatcaatgaaaatgccgatccggatgtccgtacggatatggaatctatttttaaccatttgataaaggaacgtgagccttattacgaacatactttagaaggttgggatgacatgcctgctcatgcaaaagcaacaattataggcgtcagcctcactattcctattacagaaggtcggttgaatatgggtatttggcagggaatttacctttgtgagttccgcaaccatggaggtggtcgtaaaattgtagctactgtaatgggggaataactttttcagatgttcatccgggttattatttatttaaaaaaatagattaattccactttaatcagaactctttttttaactttgtaccaattcttgaaaacagatgaaaattcatttgaaaacaagaaggaacatatataattaagagcgtttaaaatattaccttgtcttagaaaatccccaattttcaaagctgcacaagtgtaatacaacaagcgctcacgtcttgtgtttatactccttaacaggattagtatattcataaagacgtggaacactgttgttattatttgtgcagctggtatggggatacctctaaggcagataaaatattaagcaggtcccacgtctcttttttatgtctgtaccataaaaatgaacggataaaactagcctgagtgatgaaaattattgtttggaattcgcaggataaatgtgtggctgattatcataaattgataagaggctgcgatgtgttgtgcctgttggattgcgggcaatggacggttccggtgtatgcacttcagatacagaatggtctgtttcactggaaagatgagcatgaaggcctttcctatgatatattttattgcttggagaaggtggcgtttatatgtcgggatggtttgtacagcggagaatctgttctatatagcattcattccaatataggatctttggtaggtattcgtttgcaggatgatttttggctgtttgccaaccatgagtctaatcggagcaatgcctgtcatataggtgagttttatttgcgtgaaatctcagatcgtttcagaaaggcagcttttgtagccgattttaaggaaaagtcttattcttgggcacaggaaacgataggtagattatattgtatcgctcctcccaaaggataccatccgcataccatcaattatttatttaccattcatgtggcctgtacggatttctatttgttggaaggctatagtagggcttccaatcagcctactttctttaaattggaaatttaatatgttccggattataatttttcactttttcctttgataataaaagaattagtgtatatttgcacatgaacagtaacattttataaggaatttacgttatgggcagagaacttatatttgaccggttttcgcagcaggctcttcagaccttgcaccggtatcgtgccgttatgttcagtcctacgatgctcatgtctttggttgtttacctatgatttttttatccttaattcttacacattaacatgagtttactatggacaacagaccgactatcgctgaagtacaagaatgggtactgaagctttataacacgtgtgaacaaaccatcactagtgaggaacgtaaagaacagcataaatatgccgttatggtacaacggccacaggacaaaaagttcctggtgaagatgctggacgaatcttctcaaattcgtgatcgtaagaaattggcagaacgtatcaagaagctgatagaccgttatggtgtacctgagttcttgaataagcgtgatgctttcctttttaaaatgtaccaggcttttggccaccattttgattttattgccataccaatcataaagaagcgccttcgtatggatacttctaaagtgattctggatgaggcgcgtcctaaattaacagcccatctggctgcccgttttaagcaaaagattggtcagaatgtaaatttgctgggtgaggtcgtattaggaaacggagaagcagaccatcgttatttccattatttagaagctttggaggctcccgatatcaattatatctccgtgaaaatatcgggtatctacgcacagacccatgcgctgaattatgaagaaagttttccggaactggtgaaacgtatgtgtgcgctatatcagaaagcgattgactttccttacgtagatgagaatggtgtaaaacgttccaagtttgtcaatttggatatggaggagtataaagatgctcactttacattgcgcttgtttaaagaagtgttgagcagaccggaatttaaaaactattcggcaggtattgttgtacaggcttatctgcccgatgcgtatgaatttcagactgaattgttggactttgccaaagtgcgtatggctgatggcggtgcgccattgaaaatgcggttggtaaaaggttgtaatctggaaatggaaacggttatctcttctcttcgtggctggcctaatccagtgaggacatcgaaaacagaagtcgatgccaattatttgcatattctggaacaggctttgttaccggagaatgcaaaagccttgcatgtgggggtcgcttctcataatttgttcactattgcatacgcctatctgttgagtcggaagctgggaagcgcggagtacatgacttttgagatgttggaaggtatggctgatcatgtatggcgtgcccaatcccaattgggaaatcatgtgattttatatgcaccggtggtaaaagatgagcatttcctgaatgcagtatcttacttggtccgtcgtatggatgaaaatacggctccggacaactttctgacccattcgttcaatttgaagccgggtacggatacttggcgcttcttgcagaaccagtttgaggaagcttataagatgaaagatgttattacgcatattcctacccgtacacaaaaccgcttgcatcgttatactcccgttccaccagctgatgtaatgaagaatgaacctgatactgattttgatttggctcagaaccaggagtgggttcggaatatttttgcgaagtggaagaagtcaccggcggattcacctgaaatcattcctttgcagataggagctgaaacggtggtttgtgagaagcgtcataaatatatggaccgttgtcaggatgatgaagtttgtgtatgtgaaatgtcacaagctgatgccggacaggtgatgaaaattttggaaatagccgaaaaagatcctgccggatggagaaagaccacattgcaggaacggcataaaataatgtatgaagctgccaacagactgggtgagatgcgtggtgatttgataggttgtatgtgtgctgtgacagggaagacagtggtggaaggcgatgtggaggtatcggagggtatcgattatgctcgtttttataccactagcatgaagcagtttgcagaattgccggatgtggatattgctcctaaagggactattttggttatttctccgtggaactttccgtgtgccatacctattggtggtattgtggcaggactggcaggaggaaatactgtgattctgaaaccggctactgttgccgctcctgtggcatggttgtttgccaaggcattttgggatgcaggtgtgcctaaagaggctttgcaggttatcattacagaccgtgaggcattaaaggtattgactactgctccggctgtcaaacatattattctgacaggagggacagacactgcccaaaatattgcacgcagtaatccggctactccattgtcggcagaaaccggtggtaagaatgcaattatcttgacagcttccggtgaccgtgaccatgctattatgaatattgtggcttctgcttttggcaatgccggtcaaaaatgttccgcatgttctttattgctggtagaacgctcggtctatgaggacaagaactttcaagataagttgaaagatgccgcaactagtatgaaggtgggtagtgtatggaatcctgggaatgtggtaggtccgatgattaccaataagaatgataaattattgaaagctctggaactggaaaaaggggagtcttggctggttccacctcgttttcttgataagcataaatatgtattggctcctacagtgaagtggggggtacgtcccggcaactattcattcagaacggaattgttcggtccgatgctgagcgtggtttgcattgagaatttgcagcaaggcattgatttggtaaacagtttggaatatggtttgacttcgggcttacagagtctggatgaaggcgaacagaaattgtggaaagattcaattatggcaggtaacctttacatcaatcgtggtataacgggggccattgtaaatcgtcagccgttcggtggaatgaaattgtcggcttttggtggaggtgtgaaggcgggtggtcctaactattgtgcttgttttgtaaatattgcagataagccaggcagtaccaccgactatacacaaagttatgtgaaggcatacgagcaggaatttgcgcatgctcgtgatgtcaataatctgtatggcgagcaaaatgcattccgctatctgcctttaaagaatatggttttgcgtcttttcccgggagataacaatgaagatgcaaagatgattgctttggctgccagaatttgtcatactccattgagtattagttttgaacctggtgatgaccgtaccgctgcattggcttctttgggatgtcctttaaaagaagaagcgttggccggattcctgaaatcaatgaagaattatgaacgtatccgcacttgtggggctgatattccgatggaaatgtacgaggaagctgcacgtattgataagtatattgctacagctaaaccggtgaaagacggacgtgtggaattgattcattacatcaaggagcaaagtatttcatttgaatatcatcgttatggtagtattctggaggtgccgccggtagaataactgtttatattatcgggcggaaacattccgtccgataattcttttcagtgtcttt

SEQ ID NO: 3908 - DNA, 18522 bp, Unknown
  gut microbiota DNA sequence
agtgtgcaatatgctgacaatcggattgggacacaatggaagatagcagcgaagaattggacgatattacaacaaccacttacaagaaaattgactaattaccaatctacttaagacagagcagcatttgaggaaactcttatgctgtttttctttttataaagctactacagtttcaaggaatacttctatatataatcccattcacaagaatgttgcagcagtttataataaacaaaactttatataatcttctatttcttgagcggttacagcataaatcggtgcaagttgctcaaaatgggaatctcttgtaaaacgagagccgttggtgagcatagctaacaaattcttggatttcaatttatgtccagagtagttaagggctaaagataccaaatcgttgataggcacaccagactttaagatggaataaatatcataataatcgcgaaagttactcctgcgtagcatcacctccatcttcatagctccaatagactttacatctgccaatctgagattattcagatattccacaggcatactgacaggagaatatttaggacaggcataaaaagagaactttactccagacactaaatattccacatggtctatatctaaaatgtccttatgctgaatatcacctattacagcgagctctttctctatctgataccatgccacttccattttctctgttttagaggtacgccatttcataaagtccaagtcttcactttgccgagttcccatttgcaatgacaaggcagtgccacctaccaagagataggatttgatgcagtccaacttagaaacggcttcaaaaacttgcagtgtgtgtggagctaaacctttcatgcaaacattttattaaggtggcgagtagccatagattttatataagcatctggtttctttgccttaaaataataccatgcaaaaaaacgattcaacgtgtagagatattccgcttggggaacaagataatccagccacacctgcttaattttcttgaaaggataaattagaaacagttggtttatttcttccaagtcaagatgtaacaaggttttctcaatcagcatatcatctggaatatccttgattgagttttcattgtacgaccaaaagcagtgttcttgcttcagtttcgccaatagttcttgttttatcacatctcttgacataactccctgttttagaataacacaaaattagtgattattcttgtccaaagcaaatcacaatggagaatgtttcattgtgaataagatttttagtaaatttacataataaattcagtgttgatctcagaacttacacagaaataattagcgtgttgataatgaggcagatttacatttgttactcttgttacaggaatcatgaacagaatttctttctcttagtataaaatcatgagcacattatatactctaaaactgaaaatgtggatattacccttaaaaagtaggatgaaaatttgtacgaaacgggaagatggctttatctttgaagaatattaaaagatagccggattttttatttcggtggaatatagaggttgttagtataaaaataaaaaaattaaatttaggttgtatggttaaacgttatggttgtgcaggcattttattgtttgcaatgggattatttcctttattggcacaggacaatgctgcggctaaagagatggctataaagatagccgatcgtattgttgcttctacggtttatgaattcaaggatgtaaaaacaggtaaagtatacacttctttggataatgtttctttaaacccggatatgcgtgtcaatagtaaatatttgaattggcattacacaaacggagtaacaaatatggctttgatggagttgggtgataaaatacagaaccggaaatatgaggattatgtgctgaagaatatgaagttcatttttgataaaactaaccagtcctattttcatcgtttgtatgataagactttccgtgaaggaggatggagagcggttccccgtcttacttggcatatgatttatagaaacaagcgtttggatgacaacggtcctatgggggctagtttgataactttgaaccagcgtcatccggatgatgctttccaaaaatatattgaaacaaccaatcatcatattatggtttcagaacctcgtttggccgatggaaccatagcccgtttatggcctcatgaaaatacaatttgggcagatgatgcgtttatggcggtgtcttttatttcccgcatgggagaggttactggtgaaaagaagtattttgatgatgctgccaatcagatattgaattatacacgatatttgtggtgtcctgaaaaacagatttattatcattgctatcatacggataataaggaacatggagtggcgcattggtcccgggccaatggatggatttttatggcgacagccgatctgttggcaagaatgccggaaaatcatcctatgcgtgaggatgtgataaagaatttccagatgcaggctagtggggtagcgcggtatcaagggaaaaacggtttgtggcatcagttgttggataaagaagattcttatgaagaaattaccggtagttctatgtttgtatttggcatagctaaaggtgtgaaggaaggatggttgcatccggatttcatttatgtagcatggcagggattcaaaggaatgttgtcaaaaatttcagagaatggtgatgtgacggctatttgtgtcggtacaggtattatgccttccaccgtattttattataatcgtcccactcaggaaaatgatccgatgggtgaagggcctgtgttacgtgctttggtggaaatgattgatgcgcctaaatacacggagattagtgcgaatgatcagtatgataagataaaataaaaaaagagattaatttacccgttggcaagctgggtctaatttgtcaacgggtatatgttagaatgttaaatcaaaacgcccttctgtcactcttcctccttcaaaagttccgctgattattctgtttttcaaatcaaagcgggtaatattgacaatgccgtcttccagtctttcttcttgtttattaccatctttgaatacggcgtcggtatagatagtctgatcattattcatcctttcaagagcactgtaaacagtgatatttttttctttcgggtcaatgatattgaaagaaatagacgtattggtatctacccaaacgtatacatggactgttgctttttcatcttcattataagcaggatagtaggatgctttatggtccggtccatagcgttgtcctgtatatacccagccgtctatcagacagccaaaggtattggcgcctgtctgagtggcaggtggcatgagagtaggatctgctgaaaagtcttctccatcgcaggcacagcataacgcgacagttaatactattgtactaagatatttaatcatggtctgaattttttaaaagtgatagttaatacctgccgagaaagataattgagaaatgtcatccgaaccgttcatcggataatgtggttgtaccatccattctttatgatggtagcggacggaatattcaccggaatacgccaggatatagcttatccttgcactgatcccccaatgggtgaaaaggtggtattctccgcctactccaaagtttgccgcccatttgttcatggatacttttcgtggtttatcatataccatactgtcgtctttatataactggtatccggttccggtagtaaaataccaatcgaattgttgtttcagccaatgcagggagaactgtggagcaaaatagtgtgtttgaatcttgtctgtggtatttgtcgtgttgcctgtataccggctgccttgataaagtattccgaatccggctctaatggcaggcttgtttcctaccaggtaagtataacttcctgaccaacctatgccgttgcgcaaattcgaggaatatcctgctattcctatcagctttccggtgtagagggtaggacctgtctgaaaggatagaacggatcgtttgtcagtgccggattgtgcatatagcgatgttggacacagcagcgtggctactataataaaatatagtttgtttttcatggtcattgtgtttatctaggtgggtacaaaaataataaatcattggaaataacagcattaatagttttcttattttaagtaatccgtgaaaaatgtgatagattaacactttcctgccatctttattccattcattctgttttcttatgaagattattcactttaaaaccttatagtttatgaaaccagtagaatcagaccggttggatgccgaagagcgtagagaactgagcagttctgatttcggaattcctgaagagcgtgctttcccgatgcccgatgcggcacatgtgcgggcggcggaagcctatttccgttatgctagtgatgatcagaagcctgagttggcgaggaatatactggaaaaagcggctgaatacggagtgcgtgtagagagtcctgtggtgctgtcttgggccgggaaatagttgttgtataatgatttgaccttttgtgttgctgaatattgtgtaaatgtaggtgccgaatcgtgaaggaaagttattatttaaatattttcctaaggaaatttgttatataggaaagtatgaaatatatttggaaaaagtttcctgaggaaataattaaaggagataacataacagagtccggttttaattatgaagaagagtatgaaaaaagagtttataaaaaggtatggatggacattgcttggtattgtggcaggaatggtaggaggatatttgtattggcggtatgtaggttgtaccactgggacttgccctatcacttcttctcctgtcaacagttccatttggggggcggcaatggggggattgttgctcagttcatttatgccggagcataaaaagataaagaaggaggaataagtatgaataaaacgattttattttttttagcccttgtgctggctgccacaacagcctgcggcagaggaagcagtaataataaccctgtaaaagaagaaactatggcaacagaaggaaatggaaaggtcatacatttgactaaagctgaatttttggcgaaagtatataattttgagaaaaacccggaagagtggaaatatgaaggtgacaaaccggctattgtggatttctatgctgactggtgtggtccttgcaaaatggtagctcctattttggacgaattggcaaaagaatacgatggccagattgtgatttataaagtggacacggagaaagaacaggaactggcaggcgcgtttggtatacggagtattccgtccattctgttcatccccatggaaggaaagccggagatggcacagggggctatgcccaaagcgtcatttaaaaaggctattgatgagtttttattgaaaaaataagtacttttgtgcaatagcatcaagaagaaagagtaatatggaaactttatgtaaaataagagatctctatcgcgctattgcagaatttgaaacacggtttgaaaaggcgcaccacctttgtctgaacgaaggaatgttgctgtgctgtctctccagaaagaaacgcctgtcctcgggagagatagcagagcaattggggctttctaattcgaatacttctaaggttatcagatctgtagaggataaaggctatatagagcgtaatttgggagattgtgacaaacgccagatgtatttctcgcttacggcggaaggaaagaaaatactgaaggagatggaatgctgtaatattgagattcctgagttactgaggtctgtattataatagtaagaaagataccgctgtagatgaagtctgtttttatttttatatcattgctgataatgctctgtcccgctttctcgcaaagcaggatggagcattatcttgattctttgggattggtgaatgtaggccggatggacccgacattgaaaatagatttgatgtatacccgtgccgacaattttaccgggaaagtcctttatgaggatttgcaggaggcctatcttcatcccgaggctgccaaagccttgttgcaagcgcaaaagtggttgaaagagttgtatcccggttattctctgattatttatgatgccgtccgtcctatgtccgtgcagcagaaaatgtggaatgtggtaaaaggtacttcccaaaatatatatgtatccaatccggcccggggaggagggttgcataattatggtttggcggtggatgtgagtattgcagatgaaaaaggaaatcctttgcctatggggaccaaggtggatcatttgggcaaggaagcacacatagataccgaggcggcaatggtacagcagggaatcattacagcgcaggaacggaaaaaccgtttgctgctgcgccgggtcatgacggatgcgggttataaacctttgcgcagtgagtggtggcatttcaacttccgcagtcgtgaagaggcaaaacggaactataaagtaattagataaaggatggaaatatcaacaaaaacactccatttcatcgaagaacacagagaggacgatacgcgtacacttgctttgcaaagtaagaaatatcccgatgtagacatggcggcagctgtcacacaaattgccggacggcaggtggcggcccgcaagataccttcatggtatccggtttctgcattatggtatccccctcatttgtctatggagcaatgttcttccgaagcaactgctttgtataaggcctctttgttggaaggcgatacttttgccgatttaaccggaggtttcggtattgattgcagctttatctcccggaatttcaagcaggctgattatgtggaaaggcagtcaggactttgtgagctggctttgcataatttccctttgttggggttggggcacattcggatacacaaccgggacggggtatcctatttgcaggaaatgcttccggtagattgcttgtttttagaccctgccagaagagacggacacggtggaaagacggttgccatctctgattgcgagccggatgttactgttttggagcctttgctggttgataaggcaaagaaagtgatggtgaaattatcgcctatgctggatctgtcattggcattgaacgagttgaaaacagttcgtgcggtacacattgtcgctgtgaataacgagtgcaaggagttattgctgatactgcaaaaagagtccgtttcatcggaggtaagcatccattgcgaacatattgcaggcaacggggagagccggcattacacctttaccttgaagcaggaaaaaacatcgccctgtcttttggccgatgaagtcggaacttatttgtatgaaccgaatgccgctatactgaaagccggtgcttttcgttctctcacacaaacctatcctgtggcgaaacttcacctcaacagccatttatatacctctgtttctttggttccggattttccgggacgtcgtttccgggttgagaccgtatcgggttttggaaaaaaggaactgaaagcgttcttgatggatatggacaaggcgaatattacgatccgcaactttccattatcggttgcggaacttcgcaaacgtttgaaactgaaagagggaggagatgattatatctttgccactaccttgtccggcgggcagaaagtcttgattagagggaagaagtgttagtttataatcagtttgtaacctattccccttacattcacaatccgtatgctttggtctttggacagtttatggcgtaatttcgtaataaatacatgcaggctgcgtgaattgaagaagctgtcatctccccatagctccaacaagatgctttggctgttcaccacttcattccggttctcacacaggcgttttaggatttccgattcccggtgggagagttcttgtatgttccctgcaaaatccagttgttgggtgacggagttgaactgatatcctccgatggtgtaggtattggttatttctttttccacaaaagctttgtgcatcaaggctttgaggcgtacaataagctcctgcataccgaatggttttttcagatagtcattagctcccagttcaaatccttttactacatcattgatggcagaccgggcggtgaggaataataccggggttgctttatccgattggcggatgcggcgtaccatttcaaagccatccatacggggcatcatgacatcggctaccaatacgtccggtttctgttcgaaaaactttcttaagccttcttcaccatctccggcggtagtaatgataaaatcctgttcttccagtgtgtccttgataatcatggcaagagtctgttcatcctctactaataaaacgtgtatcttttccatttgcttattcgggaattttaagtgtaaaggtactgccttttcctgtgctgctttccacggaaacagttcctttatgctgttctatcattgtttttacataataaagtcctaatccatatccttttacattatgcagattaccggtcggaacccgataaaacttatcaaacagatgtttttgtctgtcggcaggaatacctattcctttgtcttgtatctttagcattacataagcgttacggtcaccgttgcatggattgttgcagcgtattgcagaaatgtaaatatatgccttttcatcggaatattttatagcattgtctatcagattgctgatcacgttatacaggtgcaagcggtctgcacgtagggttgtgttttcttccataatgagtttgaactcagtcggcttatcagctttcaatctatgttggctgatcagattttccaacataggcctcagttcgacaggttcatagttcagacggaagttcttccgttgctccatactcatggaaaggatctgttccaccagtccgctgagctgtttcagctgggtttggataatctgaagatagttctgtcgtttcgtcaggttttctgctccgttgaagttcagtaatgcatcgttggcggcgtaggctacggctatcggagttttcagttcgtgagtaatgttatgcgtgaagtcctctttcatttcttctacacttttctgccttaagatgatacggataagaaaccagaatgatacccccaatataataatgataaagaaagaggtataaagtatccccttcatttgttgcaagacgatggtatttgtcggttccacccataaccggtatgccattttgttgtacaagtcataattgtaatagtagctcactgcttctttgcccggcctgtatttttgaggtgagctgagtccttgtacgaccgtgctgtcttgacgtaaattcactatttcgatgcggtgaggcaggtagatgattccgcgcatggcaagtgtccttgtaaaaaggctgtcgaaagtgtgcaggttgatttccgtgaaaaggtccagctggctgtggataccccgttggaagtatttggtgagcagttccagtgtaccgtttttgtcgatggtagtagataccggttcattgatttccagaccaaatcttttttgctgtttgaaaggctcggtttctataactttggtaatcaaagcactgctgtccagattgatactggattcgatatagccatttatggtttcgttgcttcgtttcacggagtcgcaccgttccatcatttcattgtagtcactcacctgtaatgtttctatcaggcaattgtccatatccttcttcatcgaggtgtataatcctgtcaaccaatatgcctgataggcaaagacgcctatcagcgaaaggataatcaatgcggctatggctttaaacggtatcttcatggtttggcaaaaataggtacaaaataagtattctctttcttttgataacactaaataagacttcataagccggcggtaacacatacggcacatttttcacctttactttgcatggacactaaaaataaaacgatgatgaggacagtgattatcttttgtttatgcttgtcggcatttgcggcacaagcgcagaatgatgtgaattatacctatatggacagccttttccaacaattgccggaggtgttggtcaaaggggagcgtccggtggtaaaggccgagcggggaaagctggtctatgacttaccccgtatggtagagcggcttccggtgaataacgcctacgaggcggtaaaggaactgcccggcatcgtggaacaagatggcaatctcacttttggggggcgcagtattactttggtagtaaatggaaaagtaagtacactggacaaggacgatttgaagtccgtgcttcagaatacccctgtcagtcgtctggagaaagcggaaatcatgtatgctgctccggcacgttaccgcattcgtggagccatggtgaatgttattctaaaatcgaatatcgggcagaagccttcttggtccggtgaagtggcggctatgtatgaacagtcccgcagggaagacattgcaggccgtggaaatttgctctacacttcccggcgcttttcggcggatgtgatgtattcatacgggttcaaacataccactttcggattggacaaacagtcatggcacactatggcgggggacgtacacgagttggatttgaaaacagaggctaaagggtatggcggccggcataacctccgcttgggggcggattatgatttcgggaagaagaacttgttgagtgtggtttacaatacacaataccgctatgggcaggactgtacaaaaatgcgtggaacagcccacagtgataaaacggatgacggtgaccgccagttacataatgtggcggccgattatcaatcttctttcggcctttcggcaggaatggatttcctttttttctccaatccgtcacagacctttctggagaaagatatgcaggatgtcagccggacattgaattatgacagcaaccaacgtatcaaccgctggttattctatgccaaccagcttcattccttgcaaggtggaaccgagataaattatggtgtaaagtacactgccacacacgataacagctaccagttctatcgggatggtgaaacaggagccttgattcccgataattccgagaaactgcttcgaaaagaatatactctgaatatgtacaccggcgcttcacatagttttgggaagaagttctctgccgaagtttccttggccgcagagctttatcatgccggggaacgccatagctggatgctgtatcccattgtaaacacaacttatactccggcagatggacataccttgcaaatgtctttcaccagtaatcgtaaatatcccgcttactggcagttgcaacctattatacagtatgtggacagctataccgaggctcatggaaatcccgacctgaagccaagttccaattattcgctcgacttgaattatctgtataagaatagatatatgataggggtgaattacaattacacacccgattactttgtgcagctcccttatcaattgcccgaccgtctggcggaggtgaatcagtttgtgaattatgattttcagaaaagatggaccatacagactatggcttcttataaagtgagtacatggtggaacgggcgcatttttgctttcggcctgttctctcatgacaagaacagccatttccatgatattgcattcaaccggcataaattcagcgtcattctgaataccacaaacacattcatcttatcgaagaaaccgaatatcataggtacgttggctggtttttaccaatcacgtgccatacaaggggtgtataacttaagtcctatttgtaatgtttcgacttcacttcagtgggcttctccggatggaaagacgaaggtgatattgaaaggaaatgatattcttaatacatcgaatatgaccacccggctggcgtgggggcagcaacggaaccggacagaaatgaattgggacaatcgtagctttacattttcattcctctataaattcggcggatacaaagagaagaaacgtaccgatgtcgataccaagcggctgggacgatgattttttagtggttagtaatcactaaccactaatcactagttcgccatttttgccttgaaagccagcgcatacatacgcatctgttttaccattgccagcaagccattgctgcgggtgggcgacagatgttccttcaaacctatcttctctataaagtataaatcactgcttaatatttcatccggagtatgtccgctgactactttgataagcagggcaatgataccttttacaatcaaggcgtcactttccgcctggaacaccactttgccgtcttccatatcggcttgcagccatacgcggctctggcaaccgtctatcaggttttgttctgttttatattcgggggcgagtggttcctgctcgttacccaaatctatgagcaattgatacttgtccatccagtcatcaaaatcactgaactcttctatcacttcgttctgaagttcgtttattgttttcattattttatcatttatttctcattataaatcacatccatcactgtttgtcctaccgctttcagcgtgttacggtcaatgttttccatcgtatcgtttaccgtatgccagaaagagccgaaagaactttgcggattgtcggcatcatagttaatgatgtccacacacgggatacgcgccaacttgttgacatagatatggtcgtccaccgtctcaccgccgtcttcttttacaaaatatttgccatatcccagctcatgtgcctttttccagattttcttcatttcggaacgggcggtgcgggccgagtaaccttcataatagaacgtggcatcttttcctcctaccatatccagcaagattccatagcgtgcattatagttctgaacatgtggggtacgtgcccagtattgtgatccaagacaccaagtgtcctgtttgtacttgccgtcataaaattcgggaattccataatcctccgaatcgaaaaatacgatatctatacctagggcaggttgttccttctgtatctgacgggcgatttccagcagcacccccacaccgctggcaccatcattcactcccagtataggagtatggtgattcttcgggtcgggatcattgtcggcatacgggcggctgtcccaatgggcgcaaagcaggatacgttttttactttcgggcttgtaagcaccgataatgttgcgtgatttcagtatcgtaccgtcgtatgctatcagatcggcatattgattgtataccttggcgccgaatttttccaattgtcctgccagatattccccacattctttgtgcgcctgtgtgttgggaacacggggaccgaagtctgcttgtacctgaatgtactggtaggcgctgtctgcatcgaactcgggagccttgatcacttctttgtctacggtttctgtccggtcgtttctgcttttactgtttccgcacgaaacggctgtcaatacaagcagcaagaacgggattactaaaacatttcttatcttcatacttattcttctgttatttatttgtgcattatcctttatatagaagggggctgcgccgcaaagttacgttattttctttgtacttcttccataacgcgcaggaagtttccaccccaaatgaggcggatattttcttcactgtatctttccaacagcagccggcgtgtaaagtttatcaattctgatgccgaagcgcagcctgtgatgccgccgtcaccgtcaaaatcggttcctatccctacatgttctatgcccatgacatttaccatgtggttcagatgctcgatggcatccttgatggtagcttctccgttcttgcgcaggaatccgccatacatacatacctgtgccaccccccccttggctgccaatgctttcaattggtcatccgtcagattgcgcggatggtcgcaaagggcacgggccgaagaatgagaggctacgatcggtttgccgctgattgccagtgcatcatagaaacttttctctccggcatgagaaacatctaccatcattcccacacggttcatttcttttatcacctgttcaccgaatgtgcttacgcccagtccttcctcattataacgggcagagccgcagatatcattatttccgttgtggcaaagtgtcatgtacaccacgccacgatggcggaaacgttctacattcgtgatatccttgccaatggcatatccgttttcaatgcccagcatgacagcctttttccctgcttttttcaaacggcacagatcagcgggagtatatgctatatctacggctgtacagttcttggcaaccatctcctctatttcgttcaggatgcggtctgctttggcagtagcggccgataaggcttcatcggtacgttccaattgcttcaggtaagccaccatgatggtcgcgtccagatgtccttccgtcatcttatgcaggtctaccaggattttcttgtcacgggtggcgaagtttattccttgatcgaagaacatgggagtgtcgcaatgtgaatccagcgttatcatgcggctgtgaagttttttggcttctctgaaagaagtggattcctgtataagccagtggaataccggcatcatgcaggtattgttttccagaatgaaacattccggatgccattgcactcccatcatggacttgcattcggtagattccatcgcttcaatgactccgtcggatgagcgggcagttaccctgaaacccggcgcaacctcctttaccgcctgatggtgaaacgaattgaccggcaatatttctgtttcaaacaatttataaagtaaggaatctttctctatccggaccgtatgcgaggcatatccccgtcccaaatcctgatcgtgtttgatccgttccccttccatctgtacgtggatatcctgatacaggctgcctccaaaagcggcgttcatcacctgtatgccgcggcatattcccagaatcggtatctgccggtcggcggccagtttggcaagcaataactcctgacgatccctccggggatttatactgtgtaattcctttatcggttcttctccaaggaacaagggattgatatccgcaccgccggtcagtagcaagccatccaatgcattcagtgagtttatcaaactgttagtttcgtcaacaggaggaataatgaaaggaatacctcctgctttcagaatggaagtgaaatatccttccagcaaagtacatgcgccttcctggaagtttccggtaagccctatgactggagcatctttgtggcagggaaaggtgcggtgtatggcatcgtactcggctgaaatgtcaaatgtttgaaacgttttcataagttaaattattcatagaaactaagcaaagatagggataaattcagatttatttttcatatttgctaaaaatctaatgaccatggaacctatacaagacttcgccggcctgatatgccgtttgcgttcgttgaaggagcggaaacgtgtggtggttgtttgccccaatgaccctcataccgaatacgttataacccgcagtttgcacgaaggctttgccgatttcttattggtggcggatacgccccatttgctgaactcggaatatatccgccttcaatatccggatcatgtgaaagtatacgaggcgacaagtcccgataaagcagcccaggaagctgtttcgctgatacgtgagggacatgcggacgtgttgatgaaagggattatcaatacggataatttattgcgggccgtgcttaataaggaacatggtatcctgccgaaagggaatgtgctgagccatatcacggtggcacagatcccgatgtacaagaaattgctgttcttctcggatgcggcggtcattccccgtcctaccttggaacaattcgaggcgatgctgcggtatgatctggaggtatgccgccgcatgggaatagaagctccccgtgtggccttgattcattgtacggaaaaagtaaacgagaaattccctcatacactggattatgtgactttaaaggaacgtgccgccgccggtgcttacggaaacatgtacttggacgggcccatggatgtgaagacggcatgtgatgcgcatagcggtgaggtgaaaggaatcagctcgccggtggtgggacatgcggatttgttgatctttcccaatatcgagtcgggaaatacattctataaaacggtgtcgttgtttggtgacgccaacatggcaggcatgttgcgaggtactacttctcctgtagtggttccttcgcgtgccgattccggtaattcgaaatattatagtctggcattggcctgcgtggccggataaaacctttaaattatgaagatatttgtgattaatccgggctctacttctaccaaaatagcccttttcatcgatgaaaagccggtgtgggcggcaggggcccatcatactgcggatgacttgtcggagtttcaccacgtcaacgaacagtatgcgtaccgtaaggactttgtattgcgattgcttgccgaggcggatattccgttggattttgatgccgtcattgcccgtggcggtctgctgaagcctacgcccggcggggtgtatgccattaacgaacagatgaaacacgatttgctcaacgcccggatggagcacgcctgtaatttgggcgcgctgattgccgatgaaatagcccgggaatgccattgtcccgcctacattgccgatcccgaagtggtagacgagctgcaaccggccgcccgcctgacgggaataccggagatagagcgcatttccatcttccatgccttgaacagtaaggcggtatcgcgtaaatatgccgcttccatcgggaaacattatgaagagttgaatctgattgtggtgcatctggggggtggcatatcggtgggtgcccattgcaaaggacgggtgattgatgttaacaatgccttgaacggtgaggggccgttttctcccgaacgtgcgggaaccattcctgccgaccagttggcggaattgtgcttcagcggtaagtatacgttaaagcagatcaagaagatgctgaatggcaaaggggggctgactgcccatctgggtatgaatgatgtggtgactattgcccggaaagcttccgaaggcgaggagccttataaaggggtattggatgcgatgctctatacggtggcgaaacaggcaggggccatgtatgtcacgctccgtgggcaggtggatgccattattctgacgggaggcattgcccatagtgattactgtgtagggattctcaaggaacagattgattatctggcgccggttgtgctgatgcccggtgaagacgagatgggctcgctggcttataatgcgttgggagccttgaaaggtgagctgcctttgcaggtttaccggccggaataagaagatggtggtacatcggaattaaaataagcgataaaattgttcaaatccttcatggaagggtaatgtgttgatatacagaaggctattatgaaggaatcattataaattccttcataatagcttcagggatgtttttacccggccagtgctaccagtttatacatatttcctgttgtggtatgcatccgttccgctcccagggaattcatgattcttcccattttgtttatcgtgatgccgcgcatggctgccggatatcgtttcagcaggatattgaacaagcatactgccgagtaaagtttgaagtcttcccctttctccggcagtctgaaacaatggagaatcatttccgcttcggtaggcaaggcataataggcctggttgcgcagtttcagctcggattcctccgccgccgagaaccagtaacgctttccctcgtccagttctgctttcagctgggcgaaaagctgtttgtgctccagtggcgagcagtctatcttctcctttacctcggcaaagaaataacggcggcttccgctggggtcggtgagcagcgctttccggttactggtgccgatgaacgaggccatccggggcagatggctgtaggacgagcggtgcgacttgcggaaatccagttttttcatttgcatcagatttttcagcaatggcagtttctgtggtgaaagacggtcgtactcatccagattaatcagtccgaagaaagccagcttctgctcgcatcctgcctgtccggtcagttcgaagctgtccgtatagtagtctttcaacgaatcgggcatcagcaattcgcagaaagtggatttgcatctcccttgctcgctgctcaccagcatgggggccacagcgttggcgcaccggtccatgcgtccgctccactgggcagttacgcccagcatccagcggtggaaactgttcacccagaaatctttcgtagatatgcgttgtgccagcggagtcactcggtacttgccgtcccattcgggaagggtgttcatataggaaagtaacggatgatagtccggcatctgctccgagttcacgaaccggcttacatcct

SEQ ID NO: 3909 - DNA, 22506 bp, Unknown
  gut microbiota DNA sequence
gagttcagtcaaatctattgatttataccatttcaggtataatagttcttgcctgaatataattgttcctgttagagcatacaaacattttccatagtggacaaacggaggaagttacatttttccaaacgaataaatctgatttattacactttttccaacggccagctctactcctataccttttctttcagagatgagaaaaataaacatcaacgacctttactcatccaaggatacttggcaagataccatcaaatcaaaagctcagaaggacggtatagggattacactttattcacagagttcaatgaagagcagtccatgttacagaacattttccacatttctgctttactcctagcaacatcccattatgaaattccatgaaactttcattcaacctcctcacattcttctcactcgttccgcttcgcatcatcacctgcacccatactctcaagatactgcaattcccgttccgcaaactcacgattctcctcctctcccagcatttgatagagcagttccctagcttgcgaataatatttcaagtttactaatacttgtgctgccctgcgccgaagaaaatgataaagtggaaacaaggtattcttttcatcaccatacatctttatctgactgccaaccaaactcaccatagaataaatatactcaagagctcctgtatccttcatttcgacgagacagttggtaaaatcacgaatcgcatgaatggatgaatttcttttagcattagtcaaataataataagccttttcaaaatgccctaatgtgagataaacaaaaccgatatgataacaaatcacataatattcttccttgccacgctccggcaattctgtccagtggacttgataataccgaaaaatagaaagataacaccccaacgcctgaagataacattgctgcctgaaaaatttcttcccccaataaatagtagtctgcaaggtaggctcggtataagccagcaacgcctgttgttcctccgtcagttcgtcaaactgtttgtttgccgctttttctttagcatcgtccaacatatatttcaactcccaataatcatcatgatccgttgtcaatcttacctcaatcatactactgaatactctgcctttttgggtttcatcgaaaaaagcatctaccctgtccgtccgcatagccgacaacttataataaagagatcgttcattactgccttcagctttctccaacgcaatcaccaactgcccttcggcaagtgtaatacagatcagagcatcttttcccgcctgtcctttttcatccatcacagcatctttcaaccgaaaagaaagaatagacaataattcggtacgcctctctatccgcccattgcaaaccagtgtcattccctttatatcttcctgtttcactgtaccaaaaagagaaagaatatcctctatctgatccatatcttgccgggaaacatcgacaggttccaacagcttaccatgtccaatctccaattttcgtctcaacaaagccaagcgattttcgaattcttttttcaccaacatgtcttgtattgaagcagattgttctgccaactctttaaaactacgggctatcataaaagatgactcaagcaatacccgcaaatgttgttttaactgagtttcactgcccgacaagaacagacaggcagacagacaagccgtaaaaggtgtctcactttctccatcctcatgacttttacgcaaatagcaagtccaagctgtgtatcggcagttaatgttgttaatgtcaaaaactatttttttagactgttcatagctacatgcgtaaaaatctttataatataactgaatattctgacctgttttttctcttaacaaatgaaaataacctccttgaaaaccgatgataatggcatcagcatcaattctcttcactagttcacagtgcatggactgcacgaacctgataagttcatcggtggtcatcgccgaataaatcttttcttgctgctttttcggctttgcaacaaaataataaactgttacgaaaaccaccatcatagatacgaagacgacagaaataatcatatcttgttacagttaatctttgtatgtctgtaaaaatacaaaattaatcgggaaatgttagaagtgataggatattttaatgaattcccctaagaagttacttaaaaatccggttcaatcaattccttccgatgcatccggtgccacctccacaaaatcataagacatagaggaaattccattggagatattctgaaatacctaaaaatagggattgtccatatccatattttcatcgaactttgcaaccccaaaaaacgaacaaatgaagatactttatataatactgttcatacaaataggatggatatttcccctctccgcacaaaaacaagattccatttatatcggaacgcgtcatacattgttttctgaaatactgaatgaagaaagaaaatattggatttatgtacctgagaccaaagctggtgaaaaaggaaaggcttatccggttctttatctattggatggagattccttctttcattccgtggttggttttacgcgtttcttctcttcttctaaaacctcaaacttacctccttgcatcgttgtggctgttttaaacacagaccggaccagagatttcactcctacctgctcagccgcccgccgggatggtaccatttgtccctatgataagccggcaggtggtggagctgaacagttccatcgctttctgatagaggaactacgtctggaagtggaaaataaagttcctgccaacggtacaaactttcttgtcggacattcatacgcaggtttatttaccctacagacactgtcaaatcatcccgagtcttttgactcgtatatagcaatagacccaagtttatggtgggaccgaggagtctttctacaacaagcagcaaagaatgtttatcaaaaagacttctccagcaaacatttgtatgttgctttcgccacccgccaacgtcctgcaatcaaacttattcagttttcattggccgacagcttaaaaaataagatcatccctgaaatgaaaaacaagcatttgcatgtcatttataaaaaatttcccgacgaggtgcatggcaccattgctcttcctgccattttcgatggattaaaatctctatttcataacactatttcaaccaaagaggcaacatgataatttcttgcagtattcaatttctcatctgttataaatacgctccggtttactattggtaaaaataacataactaatgccgatggtgtagccactcgctcaattccggggtattgcacggctataattctcacataccctcctgtttaacatcaatttaagatttcaaattctatacttatcattttctagaataacagattgagacattgtatcaaccttggctacagatttatgctattctttccggaaatcatgtaattagggttataacatctgtaatttatctacactgtattttcagtcatgtacttatctttgcatcaagattctggaattcaaaacttaataaaatcaagtgataatgaaacgtataccagtcatcatgattgcaagtttatttgttataggaatacctgccataacacagtccgatccggttcccaagaaaaatggtaataagtatgtgctttacgaagaacgtacagataacggggcggtctgtcacctatttcaagcgcaacaagcgaatggatgtttggaaaaaccgatggtaaagggtacactgtttcgcagtggtgtatggcacatggaagaaatcaaaggaaacccgaaatcgcaagaggcatacgaaacgagtaaacaagtataggaaaaaagaatattatgacattagatgattttttgaatcatattgaagccggcggtgcactcaatacaccggaaatctatcggctgatggatgaaatgagcgatgaagcccggcgcgttacctgtgagataaacaactcgtaccattcacaagaagaattgcgtgcgttcatgtcgcgcctgaccggtaaacctgtggacgaaacattcaagatgtttcctccgttctacacagacttcggcaagaatattaccatcgggcgtcgtgtctttatcaatgccggttgccacttccaggatcatggcggtgtgacgttgggtgacggctgtcttatcgggcataatgtggtctttgccacgctcaatcacggtacggctcccgaagaccgcggggcgatgtatccggcgcctatccggttaggcaaaaatgtatgggtaggttccaactccaccatcctgcggggtgtgaccgtgggtgacaacgccattatcgccgccggatctgtggtgacgaaagacgtagcggccaacacggttgtaggaggtgtaccggcaaggcatatccgagatatcgacaggaacgaaaagtgatagcctatggaatcggaatcactaaccaaccatactgccatccttgtcagatccatccgaacggtacaccatactgaacgggttgtgcggattggttctaccgggcattacactgaccaactttccggagttctcgttgtattcccttcttccggttgaaacgacgagtgccatgcctactgccggagtcggccgtatcataatctgcaatacatctttatcgacggcagattttgcacaagactcttgctactgttcgatatcggtttctccatcatcatcaccaatgcggcaagaaaaagaggctgattttcctgatctgcttgaagtgggaacgttggatgagatgcatgtaaaataatgtctgtaattgaggttatacaatcagtaatccatctaccggcttttcctgtaatccgctgtaattttgcactatgaaaagaaaacaagaaacaataaaaatttaaattacatcggttatgaaacgtacaactattttaatggctgctttcctctgcctcttcagcctgacggaaagcccggcacaaaacactcacaaaaatatggaactgttaaatctgacacaggaatgggacaagacgttcccgaagagcgacaaggtgaaccatagcaaagtgactttcgtaaatcgttacggcatcacactcgctgccgacctgtatgcaccgaaaacgattttcggaggtaagctgcctgctattgctgtcagcggtccgtttggagctgtaaaggaacagtcgtcggggctgtatgcccagacattggccgaacgaggattcctgacgattgctttcgatccttcgtttaccggtgaaagcggtggacagcctcgcagcgtagcttcgccggacatcaacaccgaagacttctcggcggcggtggattacctcgcgacacgtccggatgtggatgccgaacgaatcggcatcattggcatttgtggttggggtggttttgctatcaatgcggctgccaacgacacacgtatcaaggcaacggtagcttccacaatgtacgacattagccgctgtacagcaaacggttacttcgatgccgctgacaatgcagatgcacgttacaaaatgcgtcaggagtttaacgcccagcgcacggaagactaccgtaccgacacttatccccgcaccgtgacgaacccggaacctaccggtgatgcgccgcagttcatgaaggattattatgattattacaagaccgaacgaggttatcatcctcgttccatcaactccggtttgggctggaacaaaacctccaatcttgcatttctcaacgcacctatccttgcgtatgccgatgaaatccgcagtgccgtgttgctcattcatggagaaaaagctcactcccgctattttagtgaggatactttcaagaagctgaaaggcgataataaagaactgatgattattcccgatgccgtacatacggatttatatgaccggacagacattattccattcgataagctggaggaatttttcaaagaatacttaaaatagaaggcttcaagaaaaaggaattgcctatatcctgattggcttcagttcgcggacgcagcaatgtgaacatgacttttaaaattaataatgactgacaactaaaacaatatatcaaatgaaactgattaaaaatgctgaattcgggggcgagcgtcccttgttcgagtcccacgaccttcgtctggaaaatgtgattattcgtaccggtgaatcggccatcaaagaatgtagcaatatcgaagctgtagattgccgctttgagggtaactatcccttctggcatgtacacggtttcaaaatcgaccgttgctatttcgatgtcggagggcgttcggcattgtggtattccgatcacctgaagatgaccgacacgattatcgacgcaccgaagatgttccgtgaaatggacgaaatagatatcgagaacgtaacgatgaacgatgccgacgaagtattctggcgttgtaatggtatccgcatcaagaatctcaagctgcacagcggaacttatcctttcatgttcagcaacaacatttatgtggacggactggaaagcaacagcaagtatgtgttccagtacgtgaaaaatgtagagattcatcatgcaaagattacaacgaaggatgccttctgggaagtggaaaatgtgaccatctacgattccgaactcaacggcgaatacctcggctggcattcgaagaatctacgtttggtcaactgccacattaccggtgagcaaccgctttgctatgcacacgaccttattcttgaaaactgtaccttcggacctgactgcgaccgtgcctttgagtacagcacgttgcaggccgatattcacggagctattacaaatatcaagaacccgatgtcgggatgcattgtggctgacgaattcggttccataaccatagatgagaacatcaaggctcctgccgattgtgaaatccgtctccgggacgagcgtacctgttttaccgattaagatgaagatatgaaatacaactttgacaaacaaatttcaagacggggaaccgattcctacaaatgggatagcgcagaaagcgaaaatgtattgccgatgtgggtggctgacatggatttccgtacagctcccgctatcgtcgatgctttacgccgacgggtagaacacggcattttcggttatacccgtgtgcccgacagttactacgaggctgttacaggctggttcgcacgtcgtcacggttggacgattgaccgtgaatggataatttacacatcgggcgtagtcccagccatctcggcagtcatcaaggctttgaccgttccgggagataaggtattggtgcagaccccggtctataattgtttcttttcttcaatccgtaacaatgggtgtgaaatggtatcatcaccgttggtctttgcaagtaatactttcaccatcgattatgaagatttagagcgtaagactgctgatccgaaagtgaaggtgatgctgctgtgcaatcctcacaatcctgccggaagggtgtggaaacgtgaagaactggtacgtattggtgaaatttgtattcgacacgatgttacggtcgtttcggatgagattcattgcgaactggtttttccagagtaccgttacacaccgtttgcttccatctcagaaaatttccgtcaccattctgtagtctgtatatctcccagtaaagcgttcaatattgccggattacagattgcgaacattatttgtgctgatgctaaccgtcgagcgaaaatcgaccgggccattaacgataacgaagtatgtgatgtcaatccttttggtgtaattgcgactcaagtagcttacaacgaaggggaagagtggctgaaccaactcatcaaatatttacaggccaattttctctatatgcaggagttctgtcgggaacatctgcccgagtttcctatcacggtattggagggaacctatctcgtttggatggactgtcacagactcggcatacactcgcaggaactcgaacagcgattggttaacgaagccggattatggctcaatgcaggaacaatgtatgggactgaaggaaaaggattcatgcgctggaatatcgcctgcccacgtactacactggcagaaggattgaaacgttttactggtttcgtaagaaatctttaagagatatatacggcaaattcatttttaatagaacgcaactatatagtttaccataccaagcattacgtataacaaagtaaatagttgcgacttaattttttatctcattttttcttttcttccacaactgataactattgatgatgttctgccacaaattatatatcatagagtgtattaatctgattatcaataaggaagcccacctattactaacagtgggtaacaaaatagtaacaaaaaaacgaagaaattcgcttagtggtgggcttacgctgcaaaggtaacaaaagcccgccaatcataaaaataaagctggcgaaaagagaaacattctttttcttttcgccagcatctattttgctgtcaacacaaacaggtttagtccgttttggatatctatacaaagcgataaactaaaactcaattttcacctacctgaaaaaaagttcctacttctttttgctatttaaaatattgttcgttgttttgcgaacaacaaataaaaaggagatattgaagtgaaagataaaccgtacacagtagagcaggaacagattgctcgttttgccaaagcaatgggacatcccgcacgaatggctattcttgcttttttagcaaatcaagaaagttgcttcttcggtgatatacacgaagtgctgcctatcgctaaggcaaccgtttctcaacatttgaaagaactgaaagaagctggcttaattcaaggagaaatagaaacgccaaaagtacgatattgtatcaaccgggaaaattgggaactcgcacgaaagttatttactacttttttgggggattgccaatgtaaaggtacatcgtgctgtgaataacagcacctttttttaaaatcattgttcgtagttctacgaattacgattattatattaactttaaagtagaattagaaatggaaatcaaagtattaggaaccgggtgttcaagctgtaaagcattgtatgaaaccactaaacaagctatttcagaattaggctgcgatgcaacactaatcaaggaagaagatttattgaaaatcatggagtacaacattttaggtcttccggctttggtgattgacggaaaagttgtatcagccggaaaaagattgtccctttcggaagtaaaagagttgataaccaaataaaaaatgaactatgagaaagttattttatctactgattgcgatgctggtcttaatgtcctgtggaaatggttcaaagaaaaaaaacgaggaaaacaaagcggaagaaatacagcctaaccgcattgaagttctctattttcatggagcgcaacgatgtatcacttgcagggcgattgaagccaatacagtagcccttttggatagtctttattcccaagaaaaagcaaatggcaagattatctacaaagtagtagatatttctaagaaagagaatgaagcgattgcagacaagtacgaagttacatggtcgtctttgtttgtgaatggctggaaagacggaaaagagaatgtaaacaatatgaccgagtttagtttctccaatgcgagaaatgcaccggacaagtttaaagagggaattaaaagcaagattgacgaattgttaaaacagttgtaagatggactttcttcaatcattattagatagcagttctgttcccgctattacagcctttatattggggattttaacggcagttagcccgtgcccgctggctacaaacataacggcaataggatttataagcaaggatatagaaaaccgtcaccggatttttataaacgggttgctctacactttcggcagaatagtgacctatacggttcttggctttattcttattcctattcttcgtgagggcgcaagtatgtttatggtgcaaaaagctgtaagcaaatacggggaaatgctgattgctccggtgttaatcatcattggaatatttatgcttgatataataaaactcaatctacccaaaattaatatcggtggggaaagcctgaaaaagaaaactaaaggcggttggggagctatgttgttgggggtcttattcgctcttgctttttgtcctaccagtggagtattttatttcggtatgcttatccctctatcagcagcagaaacaggcggctatctcttacctgtaatctatgctattgctacgggattacctgtaatcctttttgcatggattttagcttatagtgttgccggactggggaagttttacaaccgaatacagatatttgagaaatggtttcgcaaaatagttgctattctctttatcgcagttggaatatattacgcaatagtattttatctataaataaacattaagtatcattttaaataaaaaacagtatgaaaaagatagaaattttcgacccggcaatgtgctgccctacgggtctttgtggaacaaacatcaatcctgaattgatgcgtattgcggtagtaatcgaatcattgaagaaacaaggtatcatcgttacccgccacaatttacgtgacgaaccacaagtatacgtaagcaataagacggtgaacgacttcctgcaaaagcatggtgcggacgcactgcctattactttagtagatggagaaatagctgtttcacaaacctatcctaccaccaaacaaatgagtgaatggacgggggtcaatttagattttatgccagttaaataagtattcaccaattaattatttaagaaaaatgagaacattcaatttatcagatatagaattgacaaaataccttttcttcaccggaaaaggcggtgtgggcaaaacttctattgcctgtgctactgcggtaggtttggcagataatggtaagaaaatacttcttatcagcacagacccggcttcaaacctgcaagatgtctttaatcaaactttaaacggacacggcacggatattcaggaagtacccggcttaactgtagttaatctcgacccggaacaagctgctgccgaatacagggaaagcgttattgcgcctttccgaggaaaactgcccgatagtgttatccaaaatatggaagaacaactttcaggttcttgcacggtagaaattgctgctttcaatcaattttccgattttatcacggatgctgataaagcaaaagaatatgaccatatcatctttgatacagccccaacgggacatacattgcgaatgctacaactaccatcggcttggagtacgtttattagcgaaagtacgcacggtgcatcatgcttagggcaattatccggtttggaagaaaggaaaggcatctataagcaagcggttgaaacactctcggatgcaaatgcaactcgcttagtgttggtaagtcgtcccgaaatcgcacctttgaaagaagctgcccgttcttcgcatgaattacaattactgggaattaataaccagctattagtaatcaacggacttttgctgcaattagatgaagccgatagcgtatcgaaacaaatatatgacagacagcaaaccgccctgaaacaaacccctgcggaactgctggattacccctcttattctgttcctttacggtcgtataatctatctaacattgcaaatatccgccggatgctatacgatgataatttaacagacaatgcggattatcaacggattactgatgcaaaaggtatagacgaattggttaatgacctctatcagtcagggaaaagagttgtatttactatgggaaagggtggcgtaggtaaaacaacgttagccacggaaatagccctgaaattaactaaactgggtgcaaaggtgcatctaaccaccactgacccggcaaaccacctgaattacaaccttgcagttcaggcaggtattacagtaagccgcattgatgaagcggaagtactggaagcctataaaaacgaagttcgtagtaaagctgcggaaacaatgactgccgaagatatggaatacatagaggaagatttgcgttcaccgtgtacgcaagaaatcgcagtgttccgggcttttgccgaaatcgtagacaaagcggaaaatgaaattgttgtgattgataccgcacctaccggacacaccttgttactgctggatgcaacggaaagctaccacaaggaagtacaacgcacgcatggcgattctcctgcttcggtaagaaaattattaccacgtttaagaaaccagcaagaaacggaagttgttattgtgaccttgcccgaagcaacccccgtctttgaagccgaacgtttgcaaaaggatttacagcgtgcgggaattaataacaaatggtgggttgtaaacgcttgtttatcattaaccgatacggaaaattcttttttgcgggcaaaggcacaaaatgaattgacttggattaagaaagtagaagaattgtcaaagggaaacgctgccctgatagcttggaaaaataattgagaatatgagaattttaatcctttgtactggaaatagttgccgtagccaaatggcacacggcttattacaatcatttgacagtaaactggaagtcttttcagcaggaacaaagcctgctgaaaaggttaatccgatggcagtaaaggttatgactgaaataggtattgatttagcccaacatacccctaaaagtgtcaatctatatgtaggaaaaaaatgggactatgttattacggtctgcggtggtgcaaacgaaagctgtcctatgtttactggtgaagtaaaaaacaggttgcatattgggtttgacgacccatcggaagcaaccggaagtccggaatttatcgacaatgaatttcatcgggtacgggatgaaataaaagcccgtttctatgacttctatctaaatgaattaaaaccgcaattaaactaaatagttgttgttatggaaaagaaacaaggaattggattttttgaaaaatacttaaccatttgggttgccttgtgcattgttatcggaattgctgtggggcaatggctcccggtaatcccgcaaacattaagcaagcttgaatacgccaacgtgtcgatacccgtagctatcctgatatggttaatgatttacccgatgatgctaaaagtggattttcaaagcgttaagaatgtcggcaaacgtccgagaggaataattgtcacctgtgttacaaattggcttataaaaccgtttaccatgttcgggatagcttatttgttcttctatgtcatttttaaaacttttatacctgccgaattagcagaagaatatttagccggagcggtattattgggggctgcaccttgcacggctatggtattcgtgtggagttatctcactaaaggggatgccgcttatacgctggtacaagttgcagtgaacgatttaatcatattgatagcgtttgctcctatcgttgctttcttgctgggggttggcggcgtatctattccgtgggacactttaatgttatctgttggcttgtttgttgtgataccacttgctgctggggtcattacccgcataatgattatacgccgtaaagggatagaatacttcaataatgtatttattaagaagtttgataattatacggtgggtgggctgttattgacacttatcatcctattttcatttcagggagaaacgatactgaacaatcctctgcatatcgtattgattgcagttccgctcgtgctgcaaacggttctgatattcttcgttgcctacggttgggcgaaatggtggaaattaccccatgatattgctgcgcctgccggaatgattggagcaagtaatttctttgaattagcggttgctgtggctatttctctattcggtttacaatccggggctgcattggctacggtggtaggtgtgctggttgaagttccggttatgttgatgttggtaaggattgcaaataatacacggaaatggtttccgattacaaaataattgtagataaaaaggagaatgtgtccattctgacacattctcctaatggaatgtttttgttttactatcacttagtttaccgttgacaacagcaagtatgtgtatggcaagacctgtgatttaagtgatgatgatgtctacagtttctatggcttaaagtacatccgactagtgacatcaataaaactaaagtaaatgctattcctagaattctcatattattgttgattttgagtttattttataatttaaaatctgagtttaacacccgcattcattacaaatccatccaaaggagcataaatatcccggaaaacaggattagatatacttccggtatatatagtatcaaagcgggtttgccgtctgtcggtgaagttttcaaagttagcatacaatgaaaacatctcccatattttttcaatcatgaagccgcacaccacatattgttttcctttttgtccgtctcctagtttttgggggctgaaataataagcctctaatcctattttccatttatcttctacttcatacattagaatactgttcaacctatgtttcggagttaatatattctcttgtttcaccccattttctttggttcgggtatcggtgtatgtatagcctaagtataagtggaaatctttgtatccgatttttacattcgtttctcctcctttgctatctgtattgccggatatgttgttaagtcgatatagcccatcttttgtagattgcaataataaaggattatcgagataagtgtagaagaataattggtttatgctgaaagttacatttccatcgaagattgatgtgacataattaaagtctaaattcaaaccataacttctttcgagcttgttattgtctttatcaattggcaatacattctgatattgtagcctttcgctatcctctgtaaatatggtaggtgatttatagccaaatcctcctccaagtcgagatgaaaacttatccgtaattttgaaatgtgcagaaactcgtggtagaattgctgcgccataatccggaatatagtctgctcttaatccggtttccagattcaaccattttgttgcctcccaattgttttgtacgaatgctcccatggttgtctggttgtagtctcttaactgaaaatcagtaagtttcttttcatcaaatttgtctgtccataagttgagaccagccacccattctgttttttgattcgtgcgtgtgtaagtcaattcactaaaggtagatacctgagtaccttcaaaagtataagtgggtacaccgatatttctattgaagtatgttacactgtttttgaaatcaattctgtctttttcgccgaatttgtgttcgaatgtcagttgtgtggaatgtctttgagtcttgtttttctcgaaataggaatgtgtgtcatttccatttcctttaatatactcaatatccccgcccaaacggtcttcaaacatagcatttagccctacactcatttgcgtgttctctgaaaaatagagaaataatttggggttgaagacatatctgtcaaactgcggaatggctgtgaatccggtgttagaggggtcgtaagcccaatttctgttgtaggaagcaaaaatggttgtaccgacctttttgaatcgttgcccatagaaagcgctgacgtccaaaccttttccggatgtcccgttaagatgcagacctaaatctcttttctcttcgggagtttttgagataagattaatcaagcctgctattgctccaccgccatataaagttgaagttgagcctttgatgatttccacttgttttaagtcaagaggtggcgtttgcaataatcccagtccgctcgctgcaccagcaaaaacggggaatccatcttttaatatttgtgtatatctgccatccaatccttgtatgcggattgatgcatttccggatgtggcagaagtttgctgggtgataatacctgtgctttcgtttagtaacatacgaatgtcgcccggtttcatgctccctttttctcctagttcttcgcttgaaataaattcaacacgggtcgggatgttttgaatagtgcgtgtacctctggttgaagaaatggtaacttcttccagcatttcatcatcttgttccaagaagatttcgaccggagctgaagaagataaagggaatgtgtatgatttggtttccgattcatagcctaagtagctgaatgtgatatgttgctttccgtcaggtatgttcgaaatggtgattattccgttttcatctgagcttgctccattggcggttttattaagaacggcattcacgccaaccagtatctctttagtatctccgtctttaacgattgctttaaatatgttttgcgcacaaatgctttgtgccagcaatgtaattattgccagtgctattaatttaattttcatttttcttgttttgtcaatttagtgccacacacttaatctgtattataataagtgcacgacgtactggtgatgaaacagcggtttcatcatcatgaatttaataaataaatggtgaggtcatattaattatgacatacagaattctgctaaattcatcagcttaggcggctgccaaattgaggaagagaaatgaggaatcattttctctttgtaaaacgaaaggttattatttaatagaattaattcggcggttggtgaatgaaacaatttgggtattggacaacctgtgcatgtgttgcaatgtagaaatggtgaacaattgcagtctgtacatgaggaaccatcattatcagcacatggttcttctgtttgttcattagcacattgaaacagacatttgtcttcaagaaagcatggaactgttgataataacagcacccataaagctaatatgtaggacaaatgtttcattaatatctatgctttgttctgattttgagctgcaaaattagttatttatattttataaacaaaacattctgcaatttttattatatctattaagaagtttgacaattttatggtgaggtgaccgctactgacactcattatcttgttttcattccaaagaataacatcaccagtgtaatagtccaaatagatagactgattaccattggcaagttgcttaaaccggattcttacaggctccttcaattttgcctcttgtttcttcttcgccatacttatgtttttattttgttaccgatggcaaatatagatattttttttgttactcaacgctattcgagtaacaaactggtaacaaaataaacgcatttattggaattaataggaaaatcggaaaaacaaaggaaaagatgaatataaacagcaaataactaaatatcaatatcttatattcattattttatctcattctttctctttttccatagctgccatgagttgataatgttttgccacaccacataactacccggaccgacagacgataaaggattaagatacgtaaccgccatccaaatagctagtactgtatttttttgccccaatgcctgtcctgcacttatacggtcattatatgcactaccaattcttttaccaaaataaaattgtaaacaacaagttactaaaccggcaaaagcaatcaacatctctaccgttacatcagcagtactgttaaccaaagagcgagtagtctgccccattacaatggtcaatgctaccgcccataaataaaaagccgaagtatgatatttcagtaaaaacttgtggagccggggaatataataacggaataataaagcgataaaaaacggtgcaagcaacaatggaaaaaccttacttaaaatcttaagaaaagcaataccaaaagtaacatctgtatgtggttcaaccaatggaaatatcaaaggaactgctattgcagccaaaatatttgaaagcaatgtataagtagtcaaactggaagcacttccacctagttttcccgtaattactgccgctgccgtagcagtaggacaaataagacaaaccatagccgcctcgaatatctccttataagattcatccatcggacaaaatattaacaacaacgcaataataccacaagaaatggcttgaatagccaacaaccagccatgccatactctaggaaccaactcttttggttcaattttacagaatgtaagcaacaattgggcaaaaatcaaggaaggagttaaaaaagaaatcaacccattcataaatggctttgtcggctccagaaaagtgaagttggcaaaaacaaaataaccgataactcctgcaagcatcgctagaggtaacgtccaattcttcataaacttaaacaaatccatctttcaatatttatttcagaatacaaaataaaagaatttagtccaaacactcgtctatttttcgggttttgtggcaagtttcgaataaaaaacgcaaaacttaaagacaaaagccgagttttcactaaaaatcgctacatttgcaacttaattgatatgaaaaccgatagacttaaaataatattcctgttgtgtagcctgtggctggtctttccctgtttctgcctggcggcaaagggaaaggactttgtagtcgtcattgatcccggtcatggcggacatgatcccggtgctatcggcagacgtggaaaagaaaaaaacatcaatctgaacgtagctttaaaagtaggacaactgatccaaaataactgtaatgacgtaaaggtaatatatacccggaaaacagatgtctttatccctttggatcgtcgtgcacaaatagccaataatgccaaggccgatttattcatctctatacatactaattccatagcccgtggcagaactgtacggggagcagagacttatacgttaggactccaccgtactgaagaaaatttagaagttgctaaaaaagagaactcggttattttgatagaggataattatgaacaacgttatgccggattcaatccaaattcttctgaaagctatattatttttgaatttgtacaagacaaaaatatggagaagagtgtaaaattagccactcttatccaaaaacaattcaagaatacagccaaacgaatagacaaaggagtacatcaagccggattcctagttctacgtgccacttccatgcctagtgttttggttgaattaggctatatctcaacaccggatgaagaacaatatcttttatccgatgcaggcactacggcgttatctaacagcatttataaagcattcctcaattacaagcgcgaacatgacgcccccatcggccgcagcagagtacaagaacaagaattaccggaaccagaaaacaaaccgaaagaatcaagaatagaaatacaaactgcggaaccggacactgcaacggaaccggacaaggttaccaaaaagcctgtacctgccacacaaaaaaagatcacaggcgaccaagcccgaacatctgccaagcctgtatttaaaatacaaatattggtatcaaacaaaatattgcccaaaggaagcaaacaactgaaaggtgtatcacctgttagctattaccgcgaaaaaggactttataaatatacttacggagaaaatacggattataataaaatactacgcatgaaacgtaatattactcctaaatttaaggacgctttcattatcgctttcaaaaacggagagaaaatgaatgtgaacgaagccatcaaagaatttaaaaagaatagataatataaaaggtataattgaaatgacgaaagaggtaaaaataggattaataggcatcgctgcattggctatgctgatctttggtatcaactacctgaaaggaataaatatgttccaatctgccaattactattatgtagaatatacaaatataaacggattagccggatcaagccccgtctttgccaatggttataaagtaggtacagtaagaaatatcaattacaactatgcaaaaccgggacatgtcacagtagaagtggaagtggacaaggaaatgcgtatccccaaaggaagtacaggagaactggttacagaaatgctgggaacggtaaagatgaacttactccttaactttaattctacagaatactatcaaccgggagataccctgcccggcaaaacgaatgcggggctcatgggagccgctgaagaaaagctagttcctcaaatagagcagatgttacccaaaatggattctatcctatattcattaaataaaatattagctgatcctgcattgagtgcaaccttgcacaacgcagaaaaactgacagccaatctggatgtgacaacacgtcaattaaacatgttaatgcaaaaggatcttccgcaacttactggaaaattaaacacaattgctgataacttcattgctatcagcgacaatttgaaaggtattgattatgcttcaacgttcaataaaatagactccactttatataatgtacaaatgctgacagaaaaactcaatcgcaaggacaacagtatcggattgctattcaatgatcctactttctaccaaaatttgagtgcgacgacagcaaacgctgcaaccttattggaggatttgaaagcgcatcctaaacgttatgtacatttctctttgtttggcaagaaagataagtaacatatttgctaatttaaaaatattctaaataagtctactcaaccatttttccacttattttcagtaaatgactgcaaatagggaagaaataccatgtagacttatttcatttaaaataaataaaagcctattttgactgatagtcatctaagaatcagtcaattatcaaacaacaagaatctttcaaaagcctttagatagaggtttttataagtaactgaaactaaagatattactctttaaaaataaaaagcaagaaaaaagcgatttgttttttcagaaattcatttcgaaatttgcattgtagaagtttcgctttttataataaatgtttcatatgattgaaaacgatcacgtcgttttatggggtcgttgcctgaaccttatcagagacaacgtaccagaaacgacctttaaaacgtggtttgagcctatcgtaccgcttaaatatgaggacaaggcactgacaattggcgtccccagcccattcttctatgaatttctagaagaaaagtttgtggacttgctgcgcgctgccctatataaagaaattggggagggaacgcagcttatgtattgtatcttgaccgataagaccaaccatataactgttaacatggagggaagcaaacgctcttcagcactacccacacaaacagttatacgagatggtaacaaggcacctaatccaatgcaggcaccggctccgcaggatttagacccacatttgaatccaaattacaattttgagaatttcataaaaggaaatagtaatgagttctcacgtacagtaggagaaactgtagctaaaaatccggcaaaaacattcaaccctttgtttttgtatggaccatccggtgtgggcaaaactcacttgactaatgctattggtacccgcatcaaggaattatatcctgaaaaaagagtattgtacgtatcagcacatctgtttcaggtgcaatacactgactctgttcgtaccaatcatttcaatgatttcattagtttttatcaaaccatagacgttttgattattgatgatattcaagaattcgccggagtaaccaaaacccagaacacattcttccacatctttaaccatctgcaccagaacggtaagcaacttattctgacttctgaccgtgcgccggtaatgctacaaggtatggaagaacgccttctgacccgctttaaatggggcttagtggccgaattggaaaagccggacgtagaattgagaaagaatatcttacgtaataaaatacgtcgtgacggtttgaatataccggaaacagtaattaattatattgctgaaaacgtaaatgaaagtgtacgtgaattagagggcatcattaattcacttttggcacaatccattattttcaagcgtgatgtcgatttggatttggctgaaagaattgtacgaaaagctgtacgctgttgtgagagcaagcctgtcacagtagaagatatcatacagaaagtatgcagccattacgagatagaagaatctgccatccatactaaaacaagaaaaagagaagtggtacaagtacgtcaggtagctatgtatctggccaaaaaacatacagactcctcttcttccaaaattggtaaattaataggtaataaagatcatgcaaccgtattgcacgcttgcaaaatagtaaaagaccaagtagaggttgacaaagcatttaaagcggatattgaggaaattgaagcttctctcaaaaggaaatagggacattcattaaatattacaaaatcagccaactaattcatacacaaagtattgcgaattagttggcttttttgtatctttaggtattc

SEQ ID NO: 3910 - DNA, 72908 bp, Unknown
  gut microbiota DNA sequence
tttccttcacatcaacaagatcaaagtaatctaaagtgccttcaggaagaagaaggcgataaccgtttaactccataagctatgaatttggaaacaaagataacaatttataaatttacccctcagctttttacattgacccacgttttcgggctcgaaaaacgtataaaaaaatgttttcagaaagaaaaagaaaaggaacttcaggtcagcggattttcgggtcagcgaaaagcgtaccttctgatacaaaataagcatatccccctacactctccatatttttacaggtgattcatacgtttcacattcgaaaaattgtagtactaataaaaaaaatgtatttttgtactaatcatgaatcaaacaacgcataagatgaccgaccccatccagataaagcactataaagaagacattacctcttttaaccaactctacaaggagtttcaaagacgttttgtacgcttcgccaatacttatgtcagagatttaaccacagcagaagatattactattgaggcgatgatgtattattgggaaaacaggcaatccttaagcgaagattccaatattccagcctatatcttaacaattataaaaaacaaatgcctgaattatctgcgtcatcagcaaattcatgaagaatactcggataaaataaaagattactatgaatgggaactgaatacccggatcgccactttacaagcatgcgaaccttatgagctttttatttccgaaattcaagaactcgtccaacaaaccctcaccgacatgcccgaaaaaacccgtactatcttcatgttgagccgatacgaaaacaaatcctataaggaaattgcagttctcatgaatatcacccccaaaggagtagatttccatataaacaaggcattaaagatgcttcagactaacttaaaagattattttccactctttctctatttttttatgaaatgccactaggaattttccattctgaagtgctgtttatatagaagcataaaagaatgcaataaaatggaaaaagagaaactacatcgtttttttgccggaactacttctatacaagaaggcatggacataagagcatggatggaagcatccgaagagaacaagcgcattttttacaaagagcgtaaattgttcgatgccctcatggtgcatgatgaccaaactacaaataactgcatttccaccaaacgaattcccaaaattattcgtcaatggctgaaaatagcttccgtcatcatactgacgcttaccattaactatttatatcagaaatataaatcggaaaatgaagtcattgccatgaatacagtatctgttccggcaggacaacgtaccaatattactttaccagatggaactaatgtatggctgaatgcccgtaccactttacaatatccggtcactttcagccaaaagcaacgaacagtttttttaaaaggagaagcttattttgatgtaaccaagaagaaaaaaactccttttattgtacggacagacaaatatgacattgaagttttgggtacacagtttgatgtagatgcttatcctgaccaaacggcgtttgaaacaactttaatgaaaggtagtgtaaaagttacctcacagcactttcctgaacagacaataaccttgaagcctcatcataaagcatatgtaaaagacgggcagttggcagttaccaaagtaaacgatttcactccttaccgctggaaagaaggtttgatctgttttaaagatgaacctttccagaccatcatggaagattttgaaaaatattatggcatccggatcatcatcaataacaaaaaggtattgaaatattcctataatggcaagttccgtcaagcagacggtattgattatgcactaagagtgctgcaaagggatatccattttaaatatgaaaaagccaacgatgaagaaattatttacatcaattgaccagacaatactaacctaaaaacaacaagcctatgaagaaaagctcaagttaaccttaaaaagaaaaatgccgataagtgttgccgcacttaccggcatagactcaaaacaatttttcaagtaaaaaaatctatttaaatcaacgcaaaggtatgaaaaataacactttgtcggggagatattgcttcaaaaatccccgatttaaacaaatctttagaattatgagaatttccactttcctattgatggtctgtgtgttctgttcgtatgctgggaatgcccattctcaaaatgcaaaagtcagcatacatatgaataatgttaaactggataagatcctgaatgaaattgaaaaccaaactgattatctttttatctacaataaccaagtagatattaacaaaattatttccgtaaaggtcaaaaatgaagccgtagcacaagtactggacagaattctgtcagggaccggtatcaactatgaactggaaggtacacacattattttaactacagaagctattaaagacttgcatgctcaacaacaagctaaaacagtaacgggaacggtaacagatgtcagcggagaacccattatcggagccaacatccgtataaagggaaccacaacaggtacaatcacagatatagatggcaacttcagtattgaagccgaaccacaatctgttatcgaagtttcctacattggttacctcacacaagaaacggttatcaacaaccaaaaaagtatccgttttctattaaaagaagatacaaaaactcttgatgaagtggtagtcattggatacggtgtacagaaaaaagcagacttgacaggatctgttgcaaacattaacacagaaaaactaaatacacaaagtaacgccaacatcggccaggcgctgcaaggcaaaattgcaggggtagacatcgtatctcaaggtggtgccccaggttcgggaacccgtatcatggtccgcggtattggtacgctaaacaacgcctcccctctttacattgtcgatggcatgtatatgaacagtattgatcatatcaaccccaatgatattgccagcattgacgtattgaaagatgcctcatccgcagctatctacggttcccgtgcagccaacggtgttatcattgtcactaccaaagaaggaagtaacacagaaggaaaacctatcattgatttatctgtcaacttaggtatatcaactgccagcaaatttcttgatatgctagatgccaaaggatgggcagaagttaccactatagcccgtcaagctatcggcaaaccggcattagacatggctaccgatctggctaacaaaccagacaatgactggcaagacatcatgtttcgccccgcactgatgcaaaactacaatttgtctgtaaaaggtggtggaaaatattccacttattacaccggcttaggttatttcaaccaagacggtattgtaaaaggtaccaattaccaacggtataatatccaatccaagaatgattataaaagagggatattctctgctggaacaaatctcattatttcattcagtcatgacaagccccttcaccaggaacttcgaggcggcatgattggcaccattctgcaaagtgttcctactttggaaaaatatgatgatactcgtgaaggtggatatggtggcacatatggtgatgtagtaaacattcctcacccattggccattattgatgacaacatcatggaccgttataacgaaaatgtaaaaatattcgctaacttgtatgcacaaattgaactttttaaaggactaaaatacaaactgaatttaactccagacttttctttcgaaagatataagaattatctcaataaatatgattttggattagcgaccaacagcatcacccaattaacagaaagacaaagaaggagacgtaatatacttgttgaaaatttattaactttcgaccgtacgttcggagagcataaaatttcagcattggcaggttatacctatcaagacagcagattccgccacatacaagcctatggtgaaggattaccccagggattagaagaaatagatgcagccacaaccaatcgcagcaacgaaggcaattcatggagaagtgtccttacctctattctcggacgcgtattctattcctaccaaaataaatacttattcaccgccactatccgccgggacggttcctccaaattcggtaagaacaatcgatatggttacttcccctctttttcattaggatggaatgtggccgaagaaaagttcatggaaaacgtgcattggcttgatcagctaaagcttcgtggcggatatggcgttttaggaaatcaagaaatcgataactatcaatattcctccaccatcactaccggcatcaattatcccgatggcaacggtggtctgcttcaaggagcatttcctaaaaattttgccaatccggatataaaatgggaagaaaccgctatgactaatgtcggcattgattttatggcttttaataaccgactaagcttaacagcagactattatgtgaaaaatacaaaagatatcttgctgaccgttcctattcctatctcttccggtggtgccaatgaccctatacgcaatgcgggcaagatacgtaacaatggctttgaattcaatttaggatggatggaccaacccaatccggatatttcgtatggcatcaacttaattgggtctttcaataaaaacaaagtaatagccatgggaagtgaaagcggatctatcaaaggcggttctaccaaccaaaacatcactaccagtgaaaccaaagccggatatcctattggaggttattggcttatctctacagccggatatttcaatagtcaggaagaagtagacgcatatgccaaagacggtaaaaaaatacaaccagccgccgaaccgggtgatataaaatttgtagatgccaacaacgatggcgttatcaatgacgacgaccgtgtatttcaaggcagtccttttcccgattttactttcgcgctgaatggtaatatgagatacaaaaatttcgacttatcaatcggactgcaaggagtgttaggaaataaaatttataatgcaacccgtcagacattagaagatgtaaccaaaggttccaattttctggcaagttgcctggattattggactcctgaaaacaaaaatgcctcccatccacgtctgacatgggatgatcctaaccgtaatacccgtgcagaatccgaccgttatcttgaaaatggttcttatttgcgtctccgcagtgttcaattaggttatacatttcctcagacatggtttaaaggtgccatacagcatgcccgtgtgtatattaacgctgaaaacttatttactatcaccagttacagcggatattcaccggatgtcaatgcagacaatgccaattatcggggatttgataattttatttacccgactaaccgtactttcatgttaggactaaatgtaacattctaaaaataaacatcttatgaaaacatatattaaaacgacattgaccatattgatttcaggcatgctattcagttcctgcgaagatcaattaaaccaggccaatcccaaccaagcaacagaagatactttttggaaagatgaaaccgatttcaatctggccttgacctcttgctatactccactgaagaatgccctaaacggcggttattatggaactcgcggtgtaatgctgagaatagcccgagccgatgaagtcgacttccgcaacgatatttcggatgtatatacagtaaaccgttttactaatagtaatacaaactcactgacacaaggcatgttctatcaattttacaatgccttgtaccgtaccaactccattatgcaaaaactggaagaaaagaaagaacaattttctaccgattttcaaaattcggtaaaaggagaatgtcttttcatacgtggcttctatttattccagttagccaaagagtttaaagacgcccctctccgcctgacagcctcccaatctccctcgactttccctttagcaaaatcatcacaagctgatatatgggcacaagccaaagaagatttaaaaaccgctgcttccctattgcccataacgaataaaataggaaagcctacacaaggagccgcttatgccgctttgggtaaaatatatgtctatgaagaaaattggcaagaagcgataaacgtcctcgagcctctgacgcagaatccttacacctacaaactagtagaggactttaattggaattttgatgacactcatgaaaacaatgccgaaagtattttcgagttattgatagaagatgtgggtggaacagatctttggggagatggagaaaatatcaattccacccaatccaatacccgccctaaagaatatgccgctgctgaagtcggaggatggtatgaagcaaatcctacccagcaaattatggatatcttctggaaggaaaaagacaaagacggcaattttgattatcgtgcccgctgttctgtggcatgggactatgagggatgcacttactaccaaagacctttccgggaagtttttgcacaagacaagtggaaaacatactggattttgaaatatcagaactggaagactcaaaaagatgaaccggcacctcccaagtcattcatcaatgaaagagccatccgctatgccgatgtattattgatgctggcagaagcctatatgaacaaaggggctttagacacatctatcggatatattaatcaaatccgccgacgcgccaacctgaatgactatagcggcccaataaccaaagaaggggtttttgaagatctggtacaccaacgcgccattgaattctttgtggaaggcgaacgtttctacgatttacgcagatggggattgttagagcagacattaaaaacttgtgatgatacccgctataaaaactatcagactggcaaatccggtaatatcaataagttcaactacttcccgataccagccaaagaacttgacaccaatccactttgtacgcctagtgaaggatggtaaatcaacaggtattagcttatatataacatcagtaaattagttctggggctgattgttcttcaagcaacattcagcctctctttctcttcacactaaccatgaaacgtatccttttatttgtttgcatacaatttttcttattggcatcttttgccggagaaaccataaatttctgtaaaggctggaaattccatctaggagatgcaggcaaaggagcctcttcttcctcatataacgattctcaatggcgcatattgaatattcctcatgactggagcatagaaggcacttataaacaatttgaaaacggaaccgactggcaaagcggcttcctgcctgccggaataagctggtatcgaaaaacttttaccattccttccaaatggaaaaataaaaaagtacaaatcctatttgagggcgtatatctgaacagcgaagtatggataaacggtcattggctgggcaaacgtcctaatgggtatatcagctttgtatatgatttaactccatatttgcaagaaggcaagaaccaaatcgctgtaaaagtagatcacagcaaagcattaaccggacgttggtatacaggatcaggaatatatcgtcctgtatacctgctggtcagtaaccccacccacattccttattccggaatccatttcagatccaagctacaaaataagcaatctgccacctacaccctatctatagaaattgaaacacaggagaaaaagccaatcaaagtaaaaacatatctacaagctcccaacggtagcatagccgatacttctgaaaaaatatttgtctcatctgcagattctctttgcttcctgtcagggagcatcaggaaaccattattatggtcgcctgattctcctaacgtctatacacttatatgccaactgacaagagataacaagatactagatgaatgtagattacctgtaggcttccgtcaattagaattcaacccggtcagcggattcctgctcaatggcaaatcactaaagataaaaggagtatgcgatcatcatacagccggtgctgtaggagccgccgtacccgacgacctacttcattatcgtctcaaattattgaaagatatgggatgtaatgcgatacgcaccagtcataatcccttctctcctgctttctataatttatgcgatacgatgggaatcatggtactaaacgaaggattggacggatggaatcaacctaaagccgccgatgactatggaaattactttgatgaatggtggcaaaaagatatgactgatttcataaaacgagaccgtaaccatccctctatcattatgtggagtatcggcaacgaagtaacgggagctacccccgaaatccaacacaacctagtcagcctatttcaccaactggaccctgaccgccctgtcactcaaggaggaactgatcctactagaggtatgaagaccgattatcaaaaaaaattcaactatctagacattatcggcttcaatggaaatggagaagaaataggagaactagaacacttccacaaaaactacccaacactttgtgccattgctacagaggtaccccacacttatcaaacccgtggcgtataccgaagccagacacaatggagaagacgggatttccccgctccttgggaaaaaggaaacataaactgggaacaatttaaacatcgggtctttcctatacctgacctgacggaaaaagaatgcttccccgaagaatccgattatccctattatcaatcgtcctacgacaatgcttctgtacgtatcagcgcccgtaaatcatggcaacgcacctgttctttcccttggttaatgggagaattccgatggggcagttttgactatttaggtgaagccgaatggcctcaacgatgtggcaatttcggtattatcgacatagctgccattccgaaagacgcctatttcctctaccaaagtttatggaccgacaaaccaatggtacaccttcttccgcattggacgcatccgggaaaagaaggaaaaacaattcccgtagtcatttataccaactgtgatgcagtagagttatttataaataatgtatctttgggcagtaaaccttatacaggggagcaactgatatggttagttccttattcgcccggaaaaatagaagcccgaggcataaaaaaaggaaaaatcgtggcaacagactgttatcaaagtgcagaagcacctcattctgtcgcccttgccagtaacaagtattctgtaaaagccggttcggatgaagtcatacgcatagagatcgacataacagataaaaacggaattccttgtccttatgcctccaatgaactcagtttccacgtaagtggaccactccggctattaggggtagacaacggaaaccctacagatatgtttccataccaacagccccactgccgttgctttcggggaaaatgtgtagtattattacaatctgacgaagaaaaaggaaaaggaaccctgactgtacaaggaacaaaattagtagaaaaaaaattaatcatcgaagtgatatgaaaaaaattcttttattactctgtttatgcttattcatagaagaggttgcttctcgagaattagacaagacattccagttgcttccacaaccacaatccatagaactgacttctggaaaaggaatcaattattgggagttatcctatattctgtcatcagacacaacttccatccccatattgggagatatgctcaacaaacttccccgttgcccacgaaaagggaaacccatccggctccaactcaccagccagcatgttcctgcttctccggaaggatacatgatggaaattaatgaaaaaggagtctgtatatcagccagaaccatgacaggtatcttctacggttgccaaactttagaacaattaatggaagacagccgggatttcaacatacttattccagccatgctaatcatcgattatccggccatttcctatcgggccgtgcactttgatgtaaaacatcatttagaccgcatggagtattattatcaggaaatagacaaactggcccgatacaaaataaacgcagttatttgggagctggaagataaactgcgttatacccgacgccccgaaataggtgcccccaatgccatcagcaagcaggaaatgcaagccttatgccgctatgccaaagaacggaatattgaaataacccccttggtccaaggtttgggacatgccggttttattttaaaacatcattgggaactacgtgaaaaccccgacagcgactgggagttttgcccatctgaccctcgtacctatgatttgcaattcgacctttaccgggatgctatcgaagccatgccttacagcaaatacttacatataggaggagatgaaattaccgccataggcatagaccaacgctgtaaagccaccggaaaaactccatttgaactacaaatgatctggttgaaaaaagtatgcgatttcgcaacagctcacaaccgcattcctattttctgggatgatatgccattaaaatacggcggtgtatgggatttggtcaacagtaatgaaacccaggatgaaatagcagcaaaatggaacgataaaaaattgaatgaaagcatcaaattattccccaaagaatgtgtgtatatgcgatggaactacaaagatgccacccaaccggggcatcaacgcattttacaatggtatcatgacaaaggactgaaagtaatgggagctaccgctgcttcgtgtggcagttctccatttataccgcgtgaaaattcactggccggctatatcaaaggattcagcaaattagttgctcaaaatcaactggaaggaattttggccacagcatgggatgatggttccccacactctgaaacggtgtggcgtggatacatcgcacagggagaatatggctggaacccaacagcacggacagtcgaagccttcaaagccgcacatgcccaacgagaatttggctttcatccaaatgacaaccatatggcttttctggatgaactggaacaagaagcatttttctttgatgatgccctggtcaattcgggaaggcgcaatccggcatggggaactactgattttactttaatcagcctaccggatccagacgcaccgggagcatggagccgtacctaccaacaaaaaatagcccaagcaaaggtggaacaaaaacgatatgaaaaaatatgccaaggcataaaagaggctaaacaacatgctttacgcaaccgctatacattagaggtatacgaacagacaaatcacttgttcaacttccctgtccgtctgattctagccttgcacaactatgatatcactatacatgaacaagacaaacagacagcattgcaacaaataaatgaagtgtgcaatgactttcagaccatgagaaaacaattggaagagacctattcacagacccgttttatggaacaacctgacggttacattgctgaccaaaaccaccacaaccatcttgccgccaaaaccaacaacagcgactggtggtattattatgaaattccaatgataaggaagacaagaacatggatgaactctcagaccgcccgacagaaaaacattccataagaaacaacgaatgaaactttaatataaaaaataatatgaaccttataatacaacactactttatgaaacaacattttttatcttatctcatcgccctgctgctatttcctctctatgagatgcaagcagcctaccagcctgagttttctactgccggtttctatgaactggcaaactccggacgtgaagtatattccatgaatccggcatggcgattccacaaaggaaccgctacaggtgcggaaaccaccgactttaatgaccaggactggaaagtggtttccctgcccgacggaattgaatatgtaccgactgaggccagtggatgtatcaactatcaaggtgaggtatggtaccgcaaacatttcactccggcaaatgaattgaaaggcaaaaaacttttcctgcatttcgaagctatcatgggaaaaagcaaagtttttgtaaacggcaatttattgaccgaacactttggcggatacctgcctgtagtcattgatgtcaccgatgcactgaattgggggacagacaatgtgatagctgtatgggcagacaacagcaatgaccccagttatcctcccggcaaagcacaggatgtactggattatacttattttggcggcatctatcgtgactgctggctcatagcccatcgtccggttttcatcaccgatcccaatttcgaaaacgaaatggcaggcggcgggcttttcgtggcatacgacaaagtttccgacacttccgcagaaataatcctgaaagcccatatacgtaatgacagtaaaaagaacttcaaaggagtagtagaatatgaacttcagcaacccgacggcacacaagccgcatttctgaacgatgtcattcaagtacgtccgggcaaggcagtcacttcaaaagataaaataacgttgaagtctcctctgctttggagccctgaaacgcctacgttatataacctgattgtccgtatccgcgacaatgaaggaaatgtagtggacggctaccgccgccgtatcggtatccgcagcgtagaattcaaaggcaaggacggattctggctgaacggcaaaccttatccaagcccgctgattggcgccaaccgccatcaggattttgccgtagtaggcaatgccgttgccaacagcattcattggcgcgacgctaaaaagctacgcgacacaggtatgaaagttatccggaatgctcactgccctcaagaccccgcctttatggatgcatgtgacgaactggggctgttcgtcattgtaaacacaccgggatggcaattctggaatgacgctcctgaatttgcacaacgggtttatagcgatatccgcaacctggtacggcgtgaccgcaatcacccttgtgtatggttatgggaacctatcctgaatgaaacctggtatccggcagacttcgccaaaaataccctcgatattgtcaatcaagaatacccttatccgtattgctattccggttgcgacagcgaagcacggggacatgaggtatatccggtactcttcactcatccggccaatgcagacaaggactgggccatcaaaagcctcgaccctaaaataacctatttcacccgcgagtggggagataatgtagacgactggaactcgcacaactcccccagccgtgtggcacgcaactggggggaacaggctatgctcatccaggcacagcattatgccgccccccgttatcctttcacctgttacgatgtactctgccgtactccgcgccaacacgtcggcggctgtttgtggcactcgttcgaccaccagcgcggctatcatcccgatcccttctatggtggtgtgatggacgtattccgtcaacccaaatatgcttattatatgttcaaagcccagcgctcgcccgaaaagcaagaccgtcttttcgaaacaggaccgatggtgtacatcgcccatgaaatgactcccttctcacccaaagacgttactgtgtactccaattgtgacgaggtgcggcttacttataataaaggtggcaagacatggacttacaccaagccggcaacaaaagaaggaatgccctcacccgttattacattcaaagatatatacgacttcatgatagacaaaaacatgtctatgagaaagaagaaacaggacgaggtgttcctactggccgaaggcatcatagatggaaaagtagttgccacgcacgaagtacgaccggcccggcgtcccgagaaagtgctactttgggttgacaatgaaaacaccgacttaaaagctgatggctccgactttgtaaccgtagtagccgccatagccgataaaaacgggaacatcaaacgtctgaacaactattatgtgaaattccatgtagaaggcgaaggacgtattttgggcggagcgaatatactggccaatccggctccggtaaaatggggaacagcccccgtgctgatacaatccaccttgaagccgggtaaaatcaaaatcactgccagcgtattgttcgaaggctcgcaaatgcctgccagcgcagtgttggaattagaaagcaagccggcggctcatcctctcatctacaccgaaagtgaagctgcgctgatttccatgaacagcgactcacctttcgggcaatcagccgccaaatcggcttccgaactggaacaggaacgtttgctgaaagaacggaatgcacaaaagctgaaagaagtggaaaaacagcaagctgatttcggtgaaaagaagtaaacctttccatccggtgtggggaagaggcagaaaaagaaaagcaattcaaagcctcttctactccatccccacaagggatggaacaaaatgaaaaaactaaaatacaaatcacccatgacatataagttaaccgttacaaccctggcactaactgccataacctccactgtagcagccactcacgccaaaccagacacggaacatccccatatcgtattgattttatgcgatgatatgggattctctgatttatcctgctacggaggagaaatacatacccccaatatagattatctggccgaacaaggcatacgtttcagccaatttaaaaacacaggacgaagctgccccagccgtgccgccttactcaccggacattatcagcacgaagcgggaatgggatggatgaccgcggtagacgaacatcgtccggggtatcggggacagatttcggatcacctgcccacccttgccgaagtactgcgcgaccaaggctatgccacttacatgagtggcaaatggcatgttaccttagatgcggcctttgaaacccccaatggaagttatccagttcaacggggattcgacaaatactacggctgcctgcatggagggggaagctattacaaaccagatcccgtttatcataatctgcaacggattaccgagtttccggatgattattactataccaccgctatcacagactctgccgttagttttatcaaacaacatcccacgcagactcccatgttcatgtacatagcacattacgcacctcacttgcccctacaagccccccaagacaagatagatgcttgccgtgagcgctataaagccggctacgatgttctacgccaacaacgtttcgaacgtcaaaaagccttagggctgataacgccggaaatggttcttccagtcttccaaaaagaatttccggacggtaaacgacccgcctggaccgaacttactccacagcagcaagaaaaatggataaccgatatggctacctatgccgccatgatcgaaatcatggacagcggcataggaaaggtaatacagaccttaaaagacaaaggaatgtatgaacataccctgtttctgtttatgagcgacaacggctctaccagtgaagggggattcatcaaacagctgatggctgatttaagcaataccccctatcgcagttacaaacaatgggtattccaaggaggaaccagttcccctctcatccttacagacggaagaagcaaaagccagacagaaaaaggcagtatctgtcgggaacccagtcatatcattgatatttttcccacctgcctggatattgcttccgcacattaccccgacacgtttcacaatcaaaaagtgaaattggccggaaccagtctcctgccggctatacgaaaacaaaaaatacagccgcgcgatcttttctttgaacatcagacctcatgcgccatcctgtctgacggttggaaactagtacgtgccaacggcagacagccttgggaattgattcacctcaccaccgatccttttgagacacaagatctttccgaacaatttcctttaaaagcaaaagaattagaaaacaaatggacacgatgggcagagcaacaacacgtttatccttttgaataccgtccatggacagaacgaatcaattattaccagtcactatatcccgatcaaaaaggcaaagaaaactaaaaagtttccataaaaatccctgtttaaattttcattcatacaattcccttcattcaaaacaacaaaaaactatgattttcaatgagaatttaaacagggagacaatgccccccccctgccatctcctcaaatttccccttattcccctaatttatcgaaaaaaaatcagctttcgccgaatagattagaaaaatcggccgagaacatttacctttgctgtctaaaattaaataataaataccattcaagttttaatcataaaacagcaaaacgaaaacgatgatgaaaaagacaacaactattctctgtttgggcatcgctctatgcatgttggggtgtagcgatgacgacgatcaagttacgacaacctccaccgttcctttttctctcacagcatctctgtctccccgttcttcagatgcagaggatacaggcatcctgcaaggcaactgggacgccaacagccaactggccgtaataaaaaccggttccagcggcgttcccaaaagcattctcacaagaaaaaccgactcttctgacacctttacgggcaatctttcgacactggtaaagaatgagaatgaaattgccgtattttacccggcggcagccatcaccgcgaacagcagtgacaccctgacccaaaccctcaacctgagcggacaggacggaacactggcaggtataacaaattatgattacttatgggcacaatgtaaagccggcatgaacgaaaccacaggctcttccgcctgcgaaatgaccagtttggtcactatcggtaaattccagttcaccgtcaacggtggcagtcctttgaacaacatcacaagaattaccataaccgccactgccggaaccctctactccagtgccgttatgaaactaaaaaacggagagttcagcagtacccaaacaggaaatatcactattaaaaacaaagccggtatttccggaaccacctacatctccttcttcccttccgaagcacagttgcatttcactcttgttaccaccaccggtgaagtgtatgaggcagctacttcgacaaccatcaaattggagaaaggcaaagtatacgaagctccggcactcacttgcactcttttaccttctgccaaggtaggcgattattactatagcgacgctactttctccagcgagaagaatgagaataaaacctgcatcggtattgtctatgccctggatgatgcggacggcaatctctcgcccaccctgtccacttctccattcggacgcatcgtggcattaggcgacaaccagtccagtaccaaatggatcagcaaagcagaagatatagaaggcatcgaaaactataccaccgccgacggcacattgacaagcggtgtcctcccttattataacggaaccgccgattctttcttctccgataaggacgaggaacgtatcaagggggcaaccattcatgttgaaaccggacaacctgccacctgggtgtcagaaggagccatcagcgacttcaatggaaaggctcacaccgcctacctcggtaaaagttcttccagctacccggcaggaggctactgctaccaatacagtaccagcggcaaatcggcaggtgaatggtatttaccgtcggcaggcgagttgactttgttgtgggaacttcaaaaagccggaatcatttgcaaagacaaacaagattgtttcaatgattttgcacgcaaagcgtactggtcttcttccgaacactcggcagaatccgcctggcatctgaattttgtaagtggtgcgatagttgccaacagtaaagccagcaactacgccacacgccctgtcgcacaattctaaaggtccgatggaggcacagcagttcccattggctataaatggttgacaaattgattgtaaagcccggtccgttcaccaccaaacggaccgggcttcttttttttcatattttccactcttcctttatcaacccggacattttccgatctttgcaacacactaattcttatgcccatgaaaatacgccccacctgtaaattacaagcaatcatgaagaaaacggaaagattggcaataagcatgggaaccagcctgaagagatgtaacgtatcatcgcccgcaaactgaacatgcccgtatagaaagtgtatggcatggttgcttgctatacgttctttgtcatgatccccaaaggaaaaacatcccatctccgtatgcatgggaacggtctgccgtgtacgtggttccgaaaaactaccggaagaatttaaacggatattgggaatagaagcaggagaaacaactcccgatggtaagttctttccggactgtctgtggtgtgtaggcgcctatggattgctccctgtaataatgatagaaagtctatgaccgactgcaacctgtggatgtggagaagattattgaagacttggaatgaaatgcaatccttttttcttattattaaaatctttctttttaaccattaagcgttttcttccttttatgttctatctcccaagcttgcggagttaactccatagcctttggagttatctccataagcttgggagttaactccaaaggctatggagatagaacacatcctttcaaaaaggcttactcttacagtcaaaaagaattagctattcctatactatcactaaaccctacaataaagttaaatgaggaaaagccgcataaacaacgaataatgcaaaagtttgataaaccggtgaaagaataccacaagatatcagaagagttccccgttttccatctgtttggaaagcggggaactcttctgcattaataaatgcattcagttcaaacaggttataaaaacaagtataaactattttataatgaaacgcagacaaattattctttatccttgtctgccggaagcctttctatccgaactctgcctgccttgcccttgtctgctttgagcctgtttcttcctgcgccaataatcaccattgcttttgctgccccggtacaccttattggcttttgctttttctttcagttcttcggtcttgccggcctgcgctttttccccttccacggtcacccaaggatggcctttcacaacaggaatctgtagtcctatcagtttttggatatcctttaaataaggcaattcttccgattcacaaaaagagatggctattccgtcgtgtccggcacgcccggtacgaccgatgcggtgcacataagtttccgatatattgggcagctcatagttgataacgtgagaaagctggttcacatcaatgcctctggctgcaatatctgtggctatcagcactcttgtggtatgatccttgaagtttgtcaacgccctttggcgtgcgttctgcgatttgtttccatgaatagcttccgccccgatctcactcttgttcaaaatcctcgccaatttatccgcaccatgcttggtacgggtaaaaatcaacactgactctatctcaggattcttcagcaaatgcagcaacaagtccttcttttccttcttctctacaaaataaacactctgccggatagtatcaacagtagatgaaactggagtcacctctatcttctccggattagtcaacatggaatctgccagcttctctatttcagaaggcatggtagccgagaaaaacaaagtctgtcgccgggcaggaatcagtttcaatactttcttgatatcgtgtatgaagcccatatcaagcatacggtctgcctcatccaatacaaaatactccaaccccttcaatgaaatacagccttgcgactgcaaatcaagcaaacgtccgggagtggcaatcaatacctgcacacctcgtttcaaagcatcaacttgcgccttttggggcactccaccgaaaatgacggcatgcttcactccggtatatccggcatattggtcaaagttctcgcctatctgtatagcaagctcacgcgtcggggtgagtatcaatgctttgataccttttttatggtctgattgataaagtcgttgtataagggggatagcaaacgctgctgtttttcctgttcctgtctgggcgcatcccagcaaatctttaccttttaataatacaggaattgcttgttcctgaatgggggtcggcgttgtatagccggtttgttgtaaagccttcaaaataggctctataagatctaattctttaaatgtcatgtgaaataattaaattgggcctcacggcctgtatctattttatgggaacaaaggtacagtaatgattctgcccgaaagtatttccgggcagactttatggttatttaactagatagttcctgtttgatccattgaatagttccatcataagaaagaagatgcttcacacttaccgcccatatcatatcgtaatctatgtaactctacttacagaacaaataaacatttccaccaaagtccgaaaccaccaatgcattacccgacagggctaccgacccgaacataggagctcctgtagcatgtttccataccaccttgccatcctctttattaattccgtataccgtaccgtccgaagcggctacataaacaatatctcctgcccataccgcactggtttcaatcgtagcggaaggctgacggctataaggacaggtataaaccaaagcatcccccacaggacaaatccatttttcttccaatgtctcactatccaaggctatcagccctttctgtgcagaaccaaagataatctccttgtcagtgagtaaaggagtagaagtaacgtccacattataaggtaatggtttacggactatcacttttccggtagcagcctctaatataaagaaagacttatctgagatcagatacaacaaggcaccatgcatggcaggagatgctccccgattacgcaaaccgttatcgctgaccgcccaaagtttctcacctgttttggcatcattgccgtaaagggcattccattgtgcaccggcaaccagcaggttgttacccaaagtcagcgtgctcgtagtcccttctccttgtccccagccttcatttttccaaagttgtttgcccgttcgggcttcaaaagcacaaagcccctttccggttcccgcatagaccactccttcaccggccaccagtccgtcaataagggccggcaagccatttacgggcaattgcttttcccaacacaatttaccggtttcggtatcaatggcatacaaaaagccttgggcatcctgggcaaacacgatgtcactatcaaccgcaatggagtttttaatagaattacgaacaggacaactccaaagaattgtaccgtccttcccattcaaagcatacacatggcctgcacctttcagatcctcatccacagaggcaacaattacttttcccttgtgtatcagtggagaagtcatataaagattagctccgacattgttagtccatgccagctgcaaaggcaaattcaatggagcggaaacgggggcggaatgtttcgcattgcctgacagattatcccagtcagcagaaaacaaaggaacggccttttcagtccggcagataaaattactttctgcttcagctatctctccgttattaaaacgggctgttacccgcaaagtaagttccttacccacatatttatgagacaagggaagctccccgttccatgaccagtcagtactttgcagcaatcgcttgtttttcagcacaggtttcccgtcggccagacaagtatagagcacttctctcaccggcgacacggaagaatacacgttgacagccaccggaaggacacccgaagccattactccggcaggcgaagcgatacagatattcttgtccaaataggtataacggagctcggaagtgaaatctcctttactatctacgtgcatcacacgaaaagcagtagtggaatgatctatgcctcctttatccaatgaagaggtacaaacactgtaaacatctccctgtttcttcatatagttaatatgccaatgaccatatacccatgctttcaagttgtactcattcagattaatgcttccggcattcttgctcttaaaaataaaggtatcttcgtatgtcagcaaatcatgattgaaaacaacaacaggagttccagggcggatatgagccaagtcgttcttcaaccaacgacatacgtcatcggaagtatagcctggagcatggtctcctccgggcatcggcgtaacaacatagtgcacattacctgcatcaaaagaataatataccggcccataaatgctttcaaaaagttcttcgccatactttccctttaccaaatcatgatttccgatacaataaaagacaggacagtccatattttccgtattcatcagtttgatatgagccttcaagcctttttcatagcagatatccccggtatgaatgataaaagccgcctgttcattcctggcatagtcacgcacattattcacccagtctgcatgattttccgtattaaatatctctgtatcagcaatatgaatatacctatgggagccgtctttacgaatccgtccactgtaagggatcaaaccgaaatcataaccggactgtttcttttctattttatgataatgacggttaaatgttttataccccgaaggagtggtaatgaaaataaaacgttcacgctcatgaccgggtaaagtaaaactaccgtcggcagccgtttcaaccacattcaagccatcggatactttgatgcccgccagcggtttttcactttggtcaaatacgccattcttgtttttatctacatatacatggcccgtgtaagcaaccatcaccggcattgcggccaacatcaggcacgataataaaaaggtctttttcatgaatatctatttttatcaactcttattttaatcaagttcgaatttcgaaaggacaaaaccatgatctgaaggatagaaaaaatcttctcctttaaaagtaaaagttttacccaaactattgtcataacactcagatgctatcgcctgaatggtttttccctgataataaataaaatcaatgcggtccatacgacactcggtttccaacgaatccgcatctgtcagccacgttactcccagattggccaccggattggggttcatctcacggaaactatctttaaatcccgcctcttccatagcaatggaaacaggccaatccaccactgcaccaccatgaagatacaggttacgggtagcttccgtccaatccagatgagaatgcacgttaaaatcaccgcccattataattggaatactgtcggcctctgccaacaagggttgaagaacagacaaaatcttatgtatttcctcatcacgtgttccctccatctcccaagccaatatttcttccttggatttatccgtcggggccaaacgcatatcaggaagataatgcaaccaagtattaaaaacacggacaggtttcccatccacatctatcatcactccgccaaaattaaaggtacttatgctgtcggcaaaagcatatttccgaataatgggataacggctataaatagaaagattatcagaaatgagattgtacgaatatcccaatgagtcggctaccatcggggcagctccataagtttcaatcatcaagaccacatcagcctcactttttttcagaatatcaatagttccctcacacccttttccggaataagtttttgaatgaccgccatgccatacattccatgaaaggacagtcagcgtctttttcgactcttttgaagatgtgcaagctgccaatgcacacaagcaaaggactactaccccaataaaatttcttgttatcatcatagattagacttgttaattccggacaaagatagtgaattattcaggagacaacactataaaatataccctaaatagggtatttccgccatgaacatcttcccctatctttgcattataaaatcagaacccactaaatgaaaagattatggcaagaataaaaaaagaattgaccgaactcatcggaggaactcccttgttggaactgtcacgccttagtaaaaaacacgatgcgaaagcgcaaataattgccaaactggaatacttcaatcccggaggaagtgtaaaagaccgtatagccctggcaatgatagaggatgcagaagccaaaggaatcttgaaacccggagcggttatcattgaaccaaccagcggcaacaccggcgtagggttagcatgggttgccagcgtgaaaggttacaaagccatactgaccatgcccgaaaccatgagcgaggaacgccagaacctgttaaaagccatgggagcacaattggtactgaccgaaggtgcaaaaggaatgaaaggagccatagaaaaagcggaggaattgcgtgaccggactccgggagccgtcattctgggacaattcgaaaacccggcgaatcccgccgcccatgcacgtaccactgcacaggaaatatggaacgacacggacggaaaggtagacatctttgttgccggagtcggtacaggcggcactttaagcggagtagcggaaggattaaaaaaacagaatccccatatacagattgtagctgtagagccggataactcccccgtcctttcgggaggaaatccgggactgcacaagatacaaggtatcggagccggatttatccctcatacctacaatgaaaaattagtagacaagataatccgggtgaaagacgatgacgccatccgcacaggacgcgaactctctctgacggaagggttattggtcggaatatcttcgggagcagctgcctatgccgcattggaactggccaaactccccgaaaatgaaggaaaacaaattgtagtaatcttgcccgatacgggggaacgatatttgtctaccgtgctttatgcttttgaagaatacccattatcataaaatgagatgaacatagctgcattaatttcaggaggagtagacagcgcggttgtcgtacatctcctctgcgaacaaggatacaaaccggatcttttctatattaaaatcggaatggacggtgacgaagatctcacctgcacggcagaagaggacattgaactatgtaccgccaccgcccgcaaatacggtctgagcctgaatatcattgacctgcaccgacagtactgggataatgtagtggcatacgccatcgataaagtgaaacgcggtcttactcccaacccggatgtaatgtgcaacaagctcatcaaattcggatgttttgagcaggaagcagggcatttatatgacaagacagctaccggacattacgccagtattcttgaaaaagacgggaaaatatggctgggaaccgcacaagaccccgtcaaggaccaaacagatttcctggcacaaatagattatctgcaaatttcaaaactgatgttccctttgggaggtctgatgaagaatgaggtcagggatatcgcccgcattgccaaactgcccagtgcacaacgcaaggacagtcaaggtatctgctttctaggaaaaatcaactataatgagttcctccgccgtttcttgggtgaaaaagaaggggatatcattgaaatggaaacaggaaaacggattggcactcacaaaggatattggtttcacaccatcggacagcgcaaaggattgggactaggtggaggaccatggtttgttatccgcaaagatatagacgagaatatcatttatgtctcacacggttatgatacagacaaacaatatgggacagactttgccttgcatgattttcatttcatcacagaggacttatggaagggagcaccttccgcagatgtttctttcaagatccggcatacagacactttcatgaaaggaatattgacacgggaagataacttgttccgaatccacagccacgtccccttacagggtatagcccccggacagttcggtgtgctgtatgacaagaatgcggaaatctgtgtgggaagcggtgaaatcactttatcctaaatataatattccaccacatccacaatccctgcacgaagggcatattttgttgcttcgtgcacattgttcacttccagcttgcgaaagatatttttgcggtgagtcattaccgtatatacacttaggaaacgctcagccgcaatctctttcgtagtcttgcccaatgccatcagtttcagaatttcacgctccgtgaccgtaagcggtgaaactaacttatcttttttgtcttctttatgctgcaacagccagactgcacgcgtacacatgtattgtaaatgctgttttgccttccgcagcccttcctctatctctatcatcggcgcatctttcatcaccacgctgaatgaagttccgctaaaaaccatacgccggatgaaatcctcactcagattatcgctgaacagaacaaaatgtgcctccttaaaccgttcctgcaatataagcaaatattcagccgaagtatcaaacaatgtatagtccaacactgcaacggcattgggattatcgacaagaagtccggttaattcactctgactgccggcttcctttattgcggcgaaccctcctatccgaccggccaccgttttcataccttcacgggtaatatcctgattatcgataagtagcaatgttttcatgcccatacattttaactagggaaacttactgaaacaaaaaagccttgcatcattgtgtgcaaggcttcattcttcggtgggcgttgacggattcgaaccgccgaccctctgcttgtaaggcagatgctctgaaccagctgagctaaacgcccgatagtgctttctcgtgcaatatttaatttctttcttcggtgggcgttgacggattcgaaccgccgaccctctgcttgtaaggcagatgctctgaaccagctgagctaaacgcccgaaagttgctttttataaaacaagaggtgaagatggagtgggcgttgacggattcgaaccgccgaccctctgcttgtaaggcagatgctctgaaccagctgagctaaacgcccgatagcctcttgtttcaaaagcgttgcaaagatacggctatttccgataactgcaaattttatgcacactatttttttatttatttttcaatccagcacttaacaaactgaaatacagaggataaattacaaatcctgtcttatcattcaagaaacaaaaaagggaaactataccttattatatatagtttcccctttttccttttgaatttattttattcctgcccgaaacgctttgcctgttcggcaatcaattccacatcatcaaaatagttaatcttcatcgccttgcgtacttcatccaatgtagcggttgccgtagcacgggctgtttcgcatcccttacgtaacatatcgtaaatagccggaatatccttttcaaactctttacgacgttcgcggataggcgtcaattcttcttgcataatagcggcaaggaacttcttcaccttcatgtctcccaatccaccacgggtgtaatgtgccttcagttcatccaaattaggataatcgggcaaataacgtccaaaatgctcaggcttacaaaaagcatccagataagtgaatactgtatttccttccaatttacccggatcagaaactttcaggtgagtagggtcggtatacatgctctttactttcttttccacctcgtcggctgtgtccgacaaataaatacagttacccaatgatttgctcatcttagcctttccatccgtacccggcagacgcagacaagccgcattgtccggcaacaggatttcgggttctaccaacgtatcaccataaatatgattgaaacgacgtacaatttcacgggtctgctcaatcatcggctcctgatcttcacccaccggaacggtagttgctttgaaagcggtaatatcagcagcctgactgataggataagtgaagaaccctaccgggatgctggtttcaaaattacgcatctggatttcggttttcactgtcgggttacgctgcaagcgtgacactgtgaccaaatccatataatagaaagtcaattcgcacaattcgggaatctgagactggataaagatggtggacttcatcgggtccagaccgacagccatataatcaagcgccacctcaatcacattctgacgcaccttctcgggattttctatattatcggttaatgcctgcgcatcggcaatgaaaataaaagtcttgtcatacagtccggaattctgaagttcaactctgcgcttcaacgaacctacgtaatgaccgatatgcaatcttcccgtaggacggtcaccggtcagtatgattttttcttttcccatatctcttaaatattatcttatattaaaaattacgcaaagataggaatattctgacacaaacacttaactttgaaccgctatttcacatataataattgtttcgatgaataaactaagaccgaccattaaactagctctatttatttctgtagcaagcctgttctttgccgcatgttccgatgatgacgataaaagtattcccgtaccggaaccttcacggatgattaccggaattaaagtgcataaaatttcagatgttatcacttatcagggaatgataagcctcacttacgacaacaacaaacggctgacccgcatttatagcagttcaccgttagcggcagtaaattacacgtacaaagagaactctgaagtcagttatacttactctacggaaaattctcctttggtagaaataagcacctcgttggaaaacggcagaagttatgtatgcaaattctccaaccgggaaaatccggtaacctattcttatgacaatgaaggttatctgaaaagctgcaataacaatggaaccgtattggaatacaattgggaaagcggaaatctatcttccataaccactactccaagaggaacttacaacagtgattacagagtttccaatatcgccaatgattatagtctggacttgaacacactggcacaatggattgatgaccgtgaaaactataccaccgtaatgaacactttcggacagatggccgaaattctagggaaaagaagcgccaatattctggaagacacttattatatatacgactatagtttccggcaggatggaagactaaaagatatgaccctgatgggcggatcggaaaatataggatattcattccgcttttcgtatgccgatgatacagaagtatccgaataaatatacaaaaaacagaacattcggagaggatttcagacttttattttaatttgtgttgacaaagatcttgatttattttgttatcttggaaataagtcgttactttgcacaaaatttagtaatgctatgtatcctacaggaacaaagataatatagacatacgaacaaatgcgttagtcctcgtacgaggatggacgcattttttttaatatttagcgacattaaaacaactattataataaaagaaactttcaatgaaaaaggatttaaagaaagtcctggtattgggttcgggtgcactcaagataggccaggcaggagagtttgactactcaggttcacaagcgctgaaagcattgcgcgaagaaggcattcattcggtgttggtaaatcctaacatcgcgactatccagacttcggaaggcatagccgacaaggtttattttcttcctgtcactcccttctttgttgaagaaattatcaaaaaagaacaaccggacggtattttattggctttcggtggacaaactgcattgaactgcggtaccgaactttacctgaacggtacactgaagaaatatggtgtagaagtattgggtacttcggtagaagccatcatgtacactgaagaccgtgatttattcgtaaagaagctggatgaaattccgatgaaaaccccgaagagccacgccgtggaaagtatggaagaggctctgaaagctgcccgcgaaatcggttatccggttatggtacgctccgcatacgcactaggtggtttaggcagcggcatctgtccggatgaagaagctttcatcaaactggctgaaagttcattcgcattctctaaacagatcctggttgaagagtcattgaaaggttggaaagaaatagaattcgaagtaatccgcgatgccaacgaccattgttttacagtggcaagcatggaaaacttcgacccgctgggaatccataccggtgaatctatcgtggtggcccccacttgctctctgacagaagaacaagtaacaatgttgcaagatttgtctacaaaatgtatccgtcacttgggtattgtgggtgaatgtaatatccagtatgctttcaatgcagaaacgaatgactaccgtgttatcgaagtaaatgcacgcctgagccgttcttctgccttggcttctaaagcaaccggattccctctggcattcgttgccgccaaaatcgctttaggctacacactagaccagattggcgagatgggtactcccaactcagcctacgaagctccccagttggattacttgatttgtaaaatcccccgttgggacttgactaaattcgcaggtgtatcacgccagattggctccagcatgaagtctgtgggtgaaatcatgtctataggccgctctttcgaagaaatcattcagaaaggtcttcgtatgataggtcagggtatgcatggtttcgtaggaaatgaccatactaaatttgaaaacctggatgaggaactggccaacccgacagacctccgtattttctccatcgcctcggcattggaagaaggatacagcattgaacgcatccacgaactgaccaaaatcgacccgtggttcctgggtaagttgaaaaacattgttgactataaggccaaactttcgacttataataagattgaggatctgcccgaagatgtgcttcgccaagctaaagtattaggcttctccgacttccagattgcacgcttcgtattgaaagccagtggcaatatggaaaaggagaacttggctgtacgcgcccgtcgtaaagctttgaatatccttccggctgtcaagcgtatcaataccgtcgcatctgaacatcccgaattgaccaattacctgtatatgacatacgctactacgggttatgacgtcaattattataaaaatgaaaaatcggtagttgtattaggttcaggcgcttaccgcatcggttcatccgtggaattcgactggtgctctgtaaatgctgtccaaaccgcacgcaagttgggttacaaatccatcatgattaactataaccccgaaacagtttctaccgactatgatatgtgcgaccgtctgtattttgacgaactttcatttgaacgtgtacttgacgtgattgatctggagcagccgggtggtgtcattgtatcggtaggtggacaaatacctaataacctggcgatgaagcttcaccgtcagtcggtacctgtattgggaacttctccgctttctatcgaccgtgcggaaaaccgtcataaattctcggccatgcttgaccaactgggtattgaccaaccggcatggaaagaattgaccagcctggaagacatggaagaatttgtaaacaaagtaggttacccggtattggtccgtccttcctatgtgctctctggcgctgccatgaacgtatgctataacgaagatgaactgaaggaattcttgcagatggctaaagaagtttctaaagaatatccggtagtcgtatcccaattcatgcaagatactaaagaaatagaattcgacgctgtagcccaaaacggtgaagtagtggaatatgccatctccgaacacattgaatatgcaggtgtccattcaggtgatgccacattagtattcccggctcagaagatttatttcgaaacagcacgccgtatcaagaaaattggtcgccgtatcgctaaagaattaaacatttccggtccgttcaacatgcagttcctggctaagaacaatgaagtgaaagtgattgaatgcaacctgcgcgcatcacgttcattcccgtttgtttccaaagtattgaaacgcaacttcattgaaaccgcaacccgcatcatgttgggtgctccatacagccaaccggacaagtcggcattcgatattgactggatcggtgtgaaagcttcccagttctctttctcccgtctgcacaaggcagaccctgtattgggcgtagatatgtcttcaacaggtgaagtgggttgtatcggtgatgacttccatgaagctttgctgaactctatgattgctgtcggtttcaagattcctacaaaatctgtcatgttctcgtcaggtgccaccaaatccaaagtagatttgctggaagcaagccgtatgctggcagaaaaagaatatgagatctatgcaactgccggaaccgcaactttcttgaatgcacacggagtaaataccacaccggtttactggccggatgaaaagcccgatgcagaaaacaatgtcatgaagatgattgccgaacataaattcgacctgatagtcaacattccgaaaaaccataccaaacgtgagctgactaatggttacaaaattcgtcgtggagcaatcgaccacaatattcctttgattaccaacgcccgtttggcaagtgctttcattgaagcattctgtgaaatgagtgaaaaggatattcagataaagagctggcaagattacaaataatctttcttagggatattcaaaaaggagctgattcgtttttcctgaatcagctccttttttatctcctaacgggaaagatcattaaaacgataagtaaaagtagccatcgcataacgtcccaatccccaagtccaagtttctccctgtccggtatcattcatccaacgattgacaaaatcccgttgttgcagaatatcaacaacctgaaatttaagcaacccttttttccctttcagaaaactgtaagtcagctcaccgttccaaagccactgcgtcgtattggaggcctcatccttatatcccctgcgattcatacttctcacaacggtataaagattcaagttgagaggtaacttcagtcgacactccgcaccataataaaaatcatacgtcctgtaatccgaattgtttgtataactgttatcggcttgctgataagtgattgctccatttatcttaaactcatgctcttccaatttataggcaaactccacatcctgcatcaaggaaagcatttgggaggtgttacgatcattctcattggcttctcccattatctgcacatacgaaaccctccggttataatttgcattggtagcaagacgagcgaaaattttcttgaataatttattcgtataatatatattcccgccaatgccccaattaccatttatattctcgggccgactggtatataccccactcttctcatcataggttcttttccggcttatatcatttatcgtattattatatctcaaaccacaatataacatttcctgcttttccatatttcctcctctgtaattcacagatatactttgcccgaaagcgggtttcagccccggattccccattgttatgttcagaggattagtataatcgggcacagacaacaaatcataaatggaaggctgccgggtgtatccgctataatacacactcatattatggttattgcccaaatcataatcaaaatgcagttcgggcactatgttcaacacggtaatggtcgtatctatcttcacttttcccctgttgcttttcgtcgtagacttctgaggcgacagcccaaaccggatattcaacctcacttttctccaattaagtgtggtgcgcagtccgaattcattggaatgaagatcattacgagtataatcacttaaactatccacccttcctgcctcataaccagatggaagacttccccacaaagcatcctcatccaaattgtacgtaaccgcattattactctgccgttgatactcatgccgataataaacctgaagcatttgttttcctattggctccgtatagctgacctcccccgccaataataaatttctggcaggtgactcccggtattgatttctatataaaaccgaatctgcccccaggtcattcttcaattgataataagtaatagacgattgctgataattaccactcgcctgattactataatcatttcttaactctatggagagtttccggccgatatcattcaaattatgagtgagcaaaagattattgcctatcatcagattgttcgtcttattttgagaatttcccgtatttttatttatcctgaactcaggaggaatcattgcatcgtccctccaaggctctgaaacatagtccaaaggattggtactgaaagtcgccgaaatattttctgataccgaatttaaccggctatgattgatgttatgcctgaaattaatttccgtccggtcactcaaacttcccgtcagatatatattctcccaaaaagaactattcctacccgtactcaagcctttattataggcatattggctaccgttaggcagatattcttctgactggcttcgcgattcatccgcgcttttattattattatatgaagcactgacattgaggttgagcttctttatttccgttcccaagctaaaaccaatatccttcatttgagcaggattatcggccatatcactgataaaattaccatatctggggagttttcctaaatcaccatacaaggacatccgccattttccgacaaatttattcaaactcattttcgctccatacatatcccccgaacctttcaaagctgaaacgtcccccattaatccatctgtcaaatccttcttggtcttcacatccatcaccgttttcttcttaccgtctgacacccctgtcatttgctctttatccgactgctgctcgtatacctttacctctttcaaagcatctaccggcatattgttcaaagcaactttgctatctgcaaaaaactcctttccatttaataagatctgagtgatttcctttccatgaaaattcatcttgccggatttctcgtctaattccaatccgggaagctgcctcaccaaatcctgcagaacagctccttccgatgtcttaaaggctccggtattatatactaatgtatctccggacatcttcattttctgcagttcggcctttataaccgtttcatccaatacaatactggaaggtttcatcatcagagcacctccataaacttctttccgataagcaggaatattcacttttttttcaatggtttcatatcctaaaaaagaagcccttattaaataattaccgggattcatagggtacaaacggaaaacacccttcttatcgctcaccgtaccttctataaaactcgtatcaggcaaagaataaagttggatatttacatccggcaaaggatcgggataagggcgttctccctgttctctgacagaacccgtcaaatgataagctttttcttttcttgctttatctgaatcaagcttttcctgtccactaaccgggagaacaaaagacaatataataaacaacgagaacagtttagtcatcttgaaatatcaacagggtcctatttcaatgcttccgcaatggcattcatcagatatccaaattcttctttctcatacccgatggaagtataaacggcttctccttctttattgaaaagataggcgcgaggaattgacttttcagcaaataaagagaacacctcacgtttaggatcgggatataacgggaaagtgaatttcttccgttcattataagccctcaactgttcatccgtatgctcacgaccaattactaataatacgaagtccttgttatctttatattcaggccacaaagtcttctctatttcagccagttccagctgacagggcccgcaccaagtggcaaataagctcaccaaaacgaccttacctttcaattcagccgaagaaacatctccatataccgcagattttagatgaaaatcaggtaatttatctccttttttcaattcttgagcatttacggcaaataccatgcaaagcatcatgaacaataatcctaactttttcattttcatagttctcaatatttaattatggaataacaaagacaaatatatctgtttttcttatatttgccgccagaaaatattattttttagcctatgatgacttttatttcatgtgccaaaacaatgaccggacggagcaaaatacaaactcctgttaccagcacaccacaattccaaaccgaagcaatacagaatgcacttgatatgtcccaattctctgctgaagaactggaacgacttttacgtgtgaacagcaaaatagcagcggagaactatatgcgatttcaagatttctgttcggactctccctcggctttagctgccttactggcttataccggtatagtatataaacgtatccatccacaggactttactcctgaagattttcaatatgcacaggatcacttgcggatcacttcttttctttacggattactccgcccgttagaccagatcaagaattacagaatggaaggagatatcaaactgcccgaacgtggaggaatatccatgtttgactattggaagccgattctgaccgacacctttatcaaagaaattaaagcaagaggaggaatactaatcaatctggcaagtggggagatgaaagatttattcgactggaaacgcgtggagcaggaagtacaagtgatcacgccggaatttcaggtatggaaaaaagggaaattaaccaccgttgtggtttatgcaaaaatgtgccgtggagaattgacacgcttcatcattaaaaaccggatagagaatcctggggatttaaaaggattcaaatgggaaggattcagttttgatgccggacacagcacagatacccactatctttttagccttctttcataaaaaaatattaaatagtcaacctactcaaactttttatcagcactcatgttatttagttgaatttgggaagataaacctggacaataattaactaatagaaatgagtatgaaaaaattaatgtttttgctggctgcggccagtttaagttctgtagcgtttgcgcaacagaaaagcaattcacaaaacgtccttgtaggcgagagtgtagatgtaatggaggtacctgtggataagtacaaggtagagaccaatcacttcttcgataattggttcttctctgttggtggaggtgcacaagtactgttcggcgatcagtccgatcttggtaaattcaagaaacgtattgctcccgctcttcaaatatcaatcggcaaatggtttactcccggcttaggattacgtttgcaatatagtggtttgcagtcgaagagtttttccagtgaaccttccgcatattccaaacctcacatgttaagcgaaggatactatcaggataagttcaactacatgaatttgcatggtgacatcttatttaatgtcagtaacatgatagccggatataatgaagaccgcatatacgacttcgtgccattcgtaggtttcggttttgcccactcatatgatgctccacgtcgtaattcactggcattcaatttcggtatcatcaatacattccatctggccagtgcctgggacttgaatctggaactttacggaatgggtacagaaaacaaatttgatggaaaaaccaccagtaaaggccctgattttatggcaggtgctacagtgggtatcacttataaatttccacaaagaggattcaaacctgctccggatgtagatgctatcatggcacttacctcttcacaaatggatgccatcaataccgctttggctcaacagatagaacaaaaccgtcaattaaaggcccaacttgccaaccaacccactgaagtggttacagaacaagtgacagtgaaccaaattgctccggctcctcaatctgtatttttccagatcggttcagcggttcttcctaccaactctactgtaaatttgcaacaaatcgcagatctggtaaaagacaacccgggactaaaattgaaagtaaccggttatgctgatagtgatacaggtagcgctgcatggaacaagcagttaagtgaagaccgtgccaacaacgtggctaatgaactggttaaattgggtgtcaacaaaaacaatctgattatcagcggaatgggtggtgtcaacaccttaactcctccggcattcaaccgtcgtgtaattatcgaagcccaataatatacactgatttctgtcagcagaagataatcatgcccgcaattccttataaaaacagtattgcgggcatttattttttagatggaatagccccactgatccagtgcaaacttccaattctcttccactaaccggaccgtacggtcgtcatacttatacttattcttcttatatcccttctttccgcctatatattggctgatagccggagcagctgcttcgaatccgggaatagaaagagatttatagatatgctcggtcatagccattgcatccgcttcaaaatcctcgaacttcacttccatcaaatttccttcaggaatgaattgtttatccgcctcatatttatgatacagcttggcataaatggaaagcacattctgttccaacgcctctggagaaatatcctccagtttcaacggctggattgtattggtgaagaaattccttgtagattcgaataccgtatacggattacgcatcaaatagatgaatttggcattcggaaacatcttgaccaactcttttacacggcctgtatgaggcggattcttacttaagaattgtgttccgcctgtattccaaagagaaattttaataagtttggtgaatatatcctcaaacactttcaattcctcatcactgatatcattgaataacaaatatttatcagcatattcctgttggtacttaggcaggaaccaaaagttataataggtatagggcatcatattggccaatgcaaactcttcctcctgaggcaagtctacagccagttccatattatccgtcggacgcttgtcgggcatcagccaactcatattcttcttgaaaaaaggctgtccccacatcatcaggtgaggaaacaccgtctgataagtagtattatatccgaaatgtttgtcacaagagaacacattatgcataaaggtagtcccgctacgccaatgtccgaggataaagaccggatcgtgttccaaaggcttgtcggccaacagtttcctgtatcgcttttcctgcaatggagccaaggtggaaagcaaacggcatactgctttcgtcaaacggtattttcctctatatgccggatcaatttcccttcccgcagtaatcgccttgaacgttttccaatcggcgcctaccaatgtattaatcggcagcttgttgaattcaagtaatcccattacttttctttttttaattgtacgctgttatttttctatcttgactgaaatgccttgacggtccaattctttcaccaccttttctatggcttcataatgttcctcaccaatacccatagctgccagattcaaagtaggaacttccatggcattcagcatatctttggcttccactctgtctataatcatccccaccgcactggtgttattggtaatggggtcaatcagaataaaagaaccgcaagctttattcttttgataagaatcaaagaaaagcggcttggcggtagtaaatgtcacacgggcaatctgattcaattgcaaaggcagatcctcctttttcaatttaccgttttcaacagacagatgctccatcgtattcacatccactttatacttaatgctatctatacgggtacgtcctgtattggtggtatgcttgataaagaaagatttgtcaaggtccatcgcctcctcatccatccataccaacatggcttcaaagttacgatctatcacaggcacattatcggcatgcaccaacatatctccgcgagacacgtcaatctcatcctccaaagtcaatgtcactgcttgcggcgggaaagcatactctaactcaccatcataagtaacaatactcttgatatgagatttcttgccggaaggcaaagccatcacctcatctcctttatggatgacaccggaagcaacctttccacagaaaccgcggaaatccagattcggtcttaatacatactgaaccgggaaacggaaatcagtcagattatggtcattctcgatggaaaccgtttcaagcaattccaataaagaagtacctttgtaccatggcgtacgttcagatttctgcaccacattgtcaccgtcaagtgccgaaagaggaatacaagtcacatccgggattcccaatggctctacaaatttcttatattcggtcacgatttcgttgaaacgctcctccgaaaacccgacaaggtccatcttgttcaccgccagcaccacatgctttattcccaataaagataccagaaaagtatggcggcaggtctgcgtaatcacacccaagcgagcatctaccaagattatggcaagattggcagtagaacctccggtaatcatattgcgggtatattgttcatgtcccggagtatcggctatgataaatttacggttgttcgttgaaaaataacggtaagctacatcaatcgtaataccctgctcgcgctctgctttcaacccgtcgcacaacaaagcgtaatctatatggtcacctgcattccccacacgtttgctgtcacgttccaaagcggcaagctggtcctcgtacaacttcttgctgtcaaacaacagacgtcctatcagggtagactttccatcgtctaccgaaccggctgtcaacaggcgtagcaagtctttctgttcatccttatctaaatattcctttatattcagtttattctccatcacccattccttcattttaaattcctacttatccatttaaaaatatccttcacgtttcttctgctccatactggcatcctggtcgaaatcaatgacacgggtagtacgctcgcttttggtagtggtcatcatttcctctacaattttctcaatcgtatcggcatcactctctacggccccggtcaaaggccaacaccccaaagtacggaaacgcactttcttcatttcaatacggtcccgatattcttcgggcagtcggtcatcatcagccataatcagatttccatctatattcaccacaggacgttccttggcaaaatagagcggcacgataggaatattttccaaacggatgtactgccagatatccagctcagtccagttgcttaatggaaacacacggatactttcccctttatgaatcttagcattataaatatcccacaactcaggacgctggtttttaggatcccactgatgaaaacggtcacgaaaagagaatatacgttctttggcacgtgacttttcctcatcacgacgtgctccaccaaaggcggcatcaaacctgtatttatccaacccgtgaagcaacgcctgtgtcttcattaaatcggtatgcactttgctgccatgcgtaaaaggccctactccggcattaaaagcctccatattactttccactatcaaattccatccatgttctttggcgtattgatcacggaactctatcatttccctgaatttccatttagaatcgatatgcatcaaagggaaaggcacttttcccggatagaaagccttctctgccaaacgtaccatgacagacgaatctttaccaatactataaagcataacaggattctcaaattcagctgccacttcacgaatgatatggatagactccgcttccagttcccttaagtggctcaatttataattttcttccattttataatgaattatattttttctccttttttaccaacaatggggagcaccaactccaacaaagtattgaccgactcttccaaactcagcttagaagtatccaaagataaggcaggatgctccggagcttcaaaaggggcggaaattccggtaaagttcttgatttcaccccgacgtgctttggcataaagtcctttcacatcacgtttctcacactctaccaaaggagtgctgacatagatttccaggaaatcctctatcccgataatacgggcagccatctgccgaagctcattgccgggactgatgaaagcggcaatggtaatgattcccgtatcaacaaacaacttgcctatttcggctatgcgacggatgttttccacacgatcctctgccgaaaagcccaaattattattgatgccactacgaatattatccccgtccaatatacggcagagcaaaccacgtttatgtaattcacgttccaaagctatggcaatagtactcttaccggaaccgctaagtcccgtcagccacagcataactccccgttgtcccagcagttcttctttatctttccgggaaagcatacggtcaaagataggatatatattttcctcttccattctctattttcattttgtctttaacttcatcaaaaaggccatatcagcggtatcagaataaccgaaattataaatgtcaatatattcaacggcaaaccgatacgtacaaaatccgtaaacttatagtttccgataccctgcacaatcaaattagtctgataaccgataggagtggaaaaactggcagatgcagcgatgcaaatgacaacaaaaaagggcatcggacttacccccaactgattggataaggaaagggcaagcggaaaagccaatgcggcggcggcattattggttatcagttcggtaaacagatttgtaatgataaacaaaacagccagcaacacatgcggactgtagtcatcactcatatcaatgattccatgcgcaatgatatccgccactccggaatttaccatggcgcgacttatagcaaacgcacaggcaatggttatcaagatatcccatgatatatattttgtatatttacgtgccggaaaaagtttggtccatgccattatcacagtcgttacagctgcaaaaaagaacatatcaagatcaataccgggaagtaattcttccataaaaggcaactctcctactgttgcccccacaatcatcagcaccaataaagtcaatgcaaaccaacgtttctttctcccggctttcggctcggtatctttgccattggccaataacacgaatacagaagaatctccccatgtagagataaatgaatcatccgcccatagcaccaacgtatctccctcatgaaacttcacccgtgacagattctctacaatactaactccgcttcgttttatttcttttacttcagcaccataatgacggacaaaattaaaatcccccacccttttattgatacccgggaaacgagcacctatcaccgcctcaacacgatgaaaagaagacgcatccgcttccccatgttcgtcgcctaccgtgtctttccgaacctccggcaataacctggaagaaaaaaacaacaaataaacaattcctgccaaagcaatgaaaatacccacccggcctaattcaaacataccaaagcccttatatccggcatctaaaatcataccatccaccaccagattagtagaagtcccgataagcgtacacattccccccagtatggtagcatatgaaagagggatcaagaatttagttgccggaatgcggacagattccgcccaacgtttaataataggagcaaaaatcacaaccactggcgtattattgagaaaagcagaaacaaaagaaatagcgggcagcatacgtgcctgcgccttcatgaccgttgtcttctcttgaggcagaagtttctttatcaactgtcccaacgctcccgattgccggactccttcactgatcaggaaaagcaacgctacggtaatcatccctttattactgaatccctccaacatctctttcggagtcaatataccgaaacaaagaaagagtacagtaacagagaacagaatcattccgggacgcattttatcaaggactaatgcagtcaccatccctattaatcccaaaaacacaataatcatttcgaatgtcagcatcgtttccggatattaatttcgtttaacgacaaaccaaggattcagcaagtccggcttgttatatttcaacggttcttcttttcccgcctgatatatttctgctccggatgccttggctatggcatgaccggcagccgtatcccactccatggtaggagcaaaacggggatattcatcggccagtccctcacacactttgcaaatcttgatggaactgcctacagacaccaactccacatgagggtatatctttcgcttttcctcaatatactcttccgtttcggccgacagatgggaacgggaagcaacaatgacaaaaacttcatttgtttcggcacagggcatacgaaatgccgatgccttcatttcttccagtgaacggcctgcacgtccggtcactccttccattttataagcgccggttgccacttcaccccaataaagcgtttctttgacaggaacataaatcactccaaaaacaggaactccttcttttaccaaagcaatattgacagtaaattccccattccgttttataaattcctttgttccatccaagggatcgactatccacaacgtatcccattgcgcccgtttctcgtaaggcaaatgctttccttcctcactcaataccggatagtctgtttcctgcaaataagtcataatggtttcatgcgccttacggtctgcaagagtcagtggagaattatcggctttcctttcaacctgaaaatcagaagaaggatcattataaacgttcagaatttccttaccggcagctaaagccgcatccatcgcttttaatatatattcagtctgcatagtgtttacttccattaaaatgcttctgtcatattgaaatagaacaaactttgatcattggcaaaattacgtccgaaatccagacgtacattcatacgcggctgcacctcgatacgaagtcccacaccggcattaggaagcactccttcaatcttacccatggtaggccccataaaaccgcaccctccccatgcaacaaaacccaaatgatgcaacatacgctttacccatgtacttttatccgtattgaacatctgacgatattcggcaagcaccacatgagaggatttatcacgatactgccccatataatatccacgaagatcaaaaggagtgccacttaaagcatattggttcataggaacatccccaaacacattcttggtttgggcagtccaagctataacttttctatttcctacctttttgtattggcggtagtccacttccaagcggtagaagttattatctcctcccaaaaacttctggtacatcagcccacgaaaatccagataaatgcctttataagcattggcaggaatatcccggctgtcataagtcagcagaaatcccactcccgaactgaaattggaatatccgtgagcagtgcctcccaaccttttgtaatcaggctgatctaccaaatacttggcaggctcggatattttatcataactcaagtcaatctggggaccggcaaagaaattacttttacccaaacggaataaaaaccacggattaatctggaaaccgctataacgatattcactggtagagtcactgcgctcataatgcttattggtagcatagccgataccataaaaattctccaatgtattcttgtaagtgaattttccaaaaatacggaatttatcatttttgaaaaacaactgaggcttcaccatcagattcaagcccccctcgaacattaccgcaacagccatcggcaacacagaacgtttctgcaaggtatccgacggattcatacgaaatgtaacaagagcactacctcctattaacgcaccaaagtccggagtataactcggtcctcccaatatattataatgtatattgcgcttagccaccttccggcgtcttaattctttttttgaaagttgatggatggtggtatcctcaggattactacctatgtcacttccttgtgccgccatattcaaagaacaaagcaggcacaggaccaagctaagtaatgttattttcatataatagtttattgtctgcccaaagtccttactcaaaaaaactttctacggcaaatgagttttcaaaagtacaaaagtcctgccaaagaataacggtgtgttgaatttgtttttatttagttcaagaatcttcacgttctttataatgtaacaatgtgtcaatatgccaatgtgtcaattaccatgcggacatagagcagcacattggcaaaccagcacattggcaaattatttaaacagtttttccaaatcatcctcattaatcacggaaagaaccgttttaccatccggagtataattaggagtagccacagcaaacaagccatccaccaaacctgtcatttcctcattcgtcaacacttgtccgggaacaattgccgccgctttagccaaagtcaatgccagaatactctgcacctcttcttttaccttgccacctttttccatagctgtatgcaccatattttggatcaagtctatcgggttaaggccttcaatacctgcaggaacaccgtttatggcataacttcctcctcccaaatcagtcagttcaaatcccaggaaagacaagtcttccataatttcctgcaaaatagccacttcggaaagcggaaactgcacaatatccggaaacagcattccttgagaaacaccttgacgacgacttatctggtctatatacttgtcatataaaatacggatatgggcacgctgctgatcaatgatcattaagccggactttacagaagtcaaaataaaacgtcctttaaactgataatgctggccggatttctcactgactgaagagtcctccacatgatcatacaatccgggattttcctccgcaggagaagcctcttccgccctataatcattctcgtcaggatgaaagttttgagaagaagcatgacgttccagccccgcatacagttgttcccagtccttactaggctttgaataagaagagggaggagcagccgaaacattaaaaggattataatcaggattataagtcgtctttggtggctgtataccagtgtatggagatgcatcaaaggctggaatatccggcattccctccgtatcaaaatcaatggaaggtaccgcattgaacttacctagagtttctttcacggcagctgccaatatctgccagatggcttgctcgttctcaaactttatctctgttttagtaggatgtatgttcacatcaatattagcaggatccacctcaaaataaatgaaataagatacttgctcacccacgggaaccaactgctcgtatgcatccatgatagccttatgaaaataaggatggcgcatatatcgcccgtttacaaagaaatattggcgggctcctttcttacgggctgtttcaggttttcctacaaacccggaaacacggaccattgtagtatctacatccagcgataacaactcctgatttattttctttccgaaaactcccatgatacgctggcgcaactgaagtgcaggaagattgaacagttccgccccattatgatgcaaagtgaaagacacctccggattaaccaatacaatccgttcaaactccgtcaatatattactcagttccgtctggttcgacttcaggaacttacgacgcgccggcacattaaagaataaattcttcacactgaagctactgcctttcgggcaagaaaccgcctcctgtccctctaccttggagccggatatcgtcaacatcgttcccaattcctccccttccatacgagtacgaagctccacctgagccacagcagcaatagaagccaaagcctctccacgaaatcccatggtatgcaaagcaaacaaatcagcagcttcacgaattttagaagtcgcatggcgctcaaaagacaaacgtgcatctgtttccgacataccttttccatcatcaatcacctgaatggaagtctttcctgcatccactaccaacacgtcaacgtgctgagcacctgcgtcgatagcattctccaccaattctttaatcactgatgcaggacgctgaatcacctctcccgctgctatctgattggcaacggaatccggcagcaaacggataatatcgctcatatatcttataaacttacgtaattaaaaagtaaactcaccggtcaccaggtaatgcagaatatacaacaaaaccaaaatggccacaaacaaagctccataagtcatcggcttacgcccgctttcttttctgcgttttaaatgcttggtaccttgaacgaactttccacggatatcttccggagaaaattctttgggaggaagcatacccaactcgcgtttggctttctcctccagtttttgcagcttctccttccgttcatccacataaatatattgatggttgaaacggcggggcttttccatcttaaacattcccatagctatttctttttattaaataaattatgattgggcaaaggaacagcactccggttactcttcttcaacccctgaccggctttctttccacgccacttaaagatatcctctttatcaagcggacggatatagtcaaaccacccaaagttatccaacttcatcttctccggcggacgttggagcataggataaagagtaccgttcgatttcggactcataatcatttttttcatcttccggttttccagaaacatattcagcagactggtttcagaaacattcattccaatcagtgtactgtcgctttccatcggataatataccagacgaaccgaaccgatcacatctactttgcgcatctcaccgccttgaaaccaagccttcatctcttttcctgtcacctgattataactagtagaatccagttgttctacagacaaagcctgattctgaatatgtgcccagtctatcgtactgtcattcatataaatcatgattttctctcccagcaactgctggttgttattccacagtatagggtcataatacatggtcaggcagctatccttggaggaaaagaccaacgaatcgcataccccctgcacatccgtgcgatacatacgtactttatgatacgcccgcgtttcccggaacatagaatcagtattcaaatagtaggtatacatttgcaatgtatcggcatgcataaacaagctgtcaccttgtgaataatccactgccaccgcttttttagtagcaaaagcatacttggtcaattcattataataacaataatcaccagtcagcatattcttgtttacagtatctgtcatgatcacattatcaaacgcctccccgtatccttttacacgatcataaaacagactgtctccagtcaaacgcttcccctcattggtcagcacggaccggtccaacaattccgcctgccctatctgagtattataaaagcccaattccgaataaatatggttagcatcactgacaatatcggacggaccaaggatattggctattttggttgctgtgctgtatcgtaatgtatcggaagtcaaagtaaacttaggattgaccaacttcacatcataattgaacacagatattttggtagccggactatattccccccattccgaagtcaatacattctcctcgtccatcaatgtcccgccatcaaagtaatatcccaaattataaatacgatcgtagttcaggctatccgtcaacaaagtcgtattcttgttttccatgcgtacattatagcgtacctgggcaatctgggtatttccgtcataaaacaaatagtccccatacagaaacaaggtatccccctgcaccatcttcacattgtcaaaagcttccagcgaattcgttttctcatagaaacaggcactgtcacaatacatatatacactgtcgtgacggaacgcaacgtttccaatcagaatctgtgcatccgggtccggattcaacggacttttcttcaacacatccgaatgcaacagatacaccttgcttttagccggtttctgttccccttttttagccggtctcacctgagccagcaagcaaaagccgaacaggcacaggacacttaccacaagtatcctatgcctgcccgaagagtatttattctttctttttccaagcatatactttatacactacattatttctttacccaacccggatatttgaaatcgcatttctgccacttctcattaatacgcacgtaggtatgtttttgtttatccctgatccacttatcaagtttttcttcgctgcgtttttccatcacgatgcctttcagccgttggtagtcttccgttatggttgccttatgcccgttcaagcgggttttcaatttcacgatagcgcaaatttcctttccttttgcattaatcatggtaaaaggtttggaaatttcccccacattcatgccttccaccatctttgcagcctcttgtgacacctgtgccaattgttgcatttcaaaacgcgccgtaccagtctgcggattcgccatcaaaccatggttattacgcgtgtccttatcgtgagagatataagtagcggcatcatcaaaagtaaatttctcattacggatatcattggcaatagaatccagacgtaacaaggctgcttccagatctttttcatccactttcggttttaacaagatatggcgggtattgatacggtcaccacgtttttcgatcaactggataatatggaagccgaattcagactccacaatcttggataccttgttaggatcttgcagattgaatgccacattcgcatattcaggtaccagctcagccctgcccataaagccgagttcaccaccacggcggcgcgaaccttcatcttccgaatacagacgtgccaaagtggagaaagctatttcaccggaagtaacacgttccgtatagtcacgcaaagtcttcttcacacgctcaatttcttcctgcggaatcttaggttccatagtaatgatctgcacttctacctgagtaggaataaaaggaatactgtcttgaggaagatccttgaaataacgacggacttcggccggagtaatcttgatatcccccacaatctgctgctgcattttctgcaccgtttttccatcacgtatattctcgcggagcatttcgcgtatttgtgtagaagtcttattataatattcttctactttttccttagaaccaatctgatcaatcagccaatttgtacgtctttccacatcactgataatttcctgttcggaaacctcaatactatcaatagcagcctgatgaagaaacaatttctggatggcaagctgctccggaataatacaatacggatcaccgtcaaacttgcggccttcatactgggcattcagacgttcattctccacgtccgattttagaatggcctcatcacctactacccatacaacctcgtctatcacattgtcttgcccgtatactgaaacaacggcaaacagcatcagcatcagtgcataaactttggtacacatcaatttattcatttgaattcaaataatagtaattaatcttgttcctgtccgaagcgtgtcggtataactcttctttgactttatttataaattcaacccgcttcaggtttattaaaatctccttaatttccgtctttgcaaaatccagcggcctctgttggtccttacccaagaattcctctacatgcaggaaataacaaaacgccgtgtcttttacctctatattccggttcttgtccaaatagttctcatccgtatcaagcgctttcaaaggtattttgacagcaatatcggacaatggcatccaacggtcataaaaataatcatagctcaccgcattgcgcaaactgtatttttccaggctctcaatagcatcccggttattttttttataccatttgcgtacacttgccaaatcctgagaatgaagagggacttttataaacagccctttcacaaaaggatgttctgtatgaaacaactccttgtttttctcataataagtgctgatttcctcatcacttatctcattggccagtttctgattaaccagttcctcctgatacgtatgcatgatcaatgccctgcgatagttctccactaacttggcaatctttgcattatcaggaatatttccttccgctttatcaaaaagcagcacatcctccacccagttttttatatagtgctcggcaaacaagacactatcgtcttttgaaatatggaaaggcaacgccgcctgcaaatcttctttatagagatattcaccagcaacttccactaaaggagtcctccccttatggtcgtgctcctggccgcatcccgacaaagcacctgctataacaagtaacaccccccagtttttcacgatattcatataacattaaaatagtgaacgaagatactgcaataattaattacttccgttattattaactgtttttaaaacctcttggttaatttcaaccttatatttccgcttcaaatctttcaaccaggcatcctcatagacagtcagataatccttgacaaccgcttctcttacatcctcataactttcaggacctttctttaacttctttcccatcacaaaagtataaggtaaatccggctcaggctgaaagctaccgcatttaaagaccaatttatcaatatacctgttggtccctatctgaaagacacctgcttccatacgaactttggaggaagcatcatctccagtcagtgtatgtaatatatctttccactgggataccggtttttttttcaattgtttcttaatagctgaagccgtttttctatctttacaatgaatcactgctccccgataatgcggcaattcccaggcatagtctgatttatgttgcttgaagaagcgttccaggtcatcctcattccaggcttcatcacccgattgatatttttgcgacaaataagccgcaagcaaaccatcctgcaattcctgcacccggaactccagttcttccttctgttctgcagaaagctccttccatgtacaattgccattcttctccagataattcaataactgttcccgtttttcttcaaaactgacaccctgcctgcggtctatccatttcactatatgaatgcccataggtgaataaaaaggagctgaaatcttatttctttccaaagattccagtttgtctatccattcctgcatattcttgttcacaggcatccacggcaacactcctcccacatttttacaagcttcatcatccgagtaccggcgggccagcgttgcaaaatccgcgccttcccgcaatgcttcataaaccgaatccatttgctgccgcaccctcatttcctcctgacggcttgcattctgggataaatatttgctaatatgggcaattttgatccaatcatttgcctgcaaacgttgttcaccttgcaggtataaccggcgggcagcctgttcctccttttctgcatctgccaaataagttcttaaaagtttgccccgataccagtccacctgcctgcggaaaacagacaacgtatctattcccatatcatgtgcatagcgtacttttaatttatagttgataaaagaaggtagaaaagaaagcggggtccgatgagaagatttacgaaaataatattcaaactcggaacgttttacaggttcaccgtcaatagataacacaacttctccttgcgcccgcatttccaacgcgaacacaaggagaagtgacagaataccgaccattctatgcggcatcattcatacattttattgaggacggctgtagttaggagcctcgctggttatggccacatcatgcggatgactttccaatacacctgcgttagtaatacgggtgaatttggcatcatgcaattgttctatattagcagcgccacaatatcccattcccgcacgaagaccacctaccagctggtaaatcacttcatacaaagtacctttataaggtacacgggctgcaataccttccggaaccagtttcttcacatcggcagttccgctctggaaataacgatccttcgagccgttctccatcgcttccaaagatcccattccacgataagatttgaatttacgtccgttaaagataatcgtatcacccggtgactcttccgttccggcaaccaatgaaccgatcattacactataaccgccggcagccaaagcttttaccacatcccccgaataacgcaagccaccatcagcaatcaagggtatacctgtacctttcagcgccttggcaacatcataaacggcagaaagctggggaacacccacaccggcaaccacacgggtagtacagatagaacccggaccgataccgaccttcacaccatccgcaccggcttccaccaacattttggcagcttcgcccgtagcgatattacctaccacaatatcaatattcgggaaacgtttcttagcttctttcaatttttcgatcacatacatggagtggccatgagccgtatcaataacgattgcatccgcaccggcatcaaccaaggcctgcatacggtccagcgtatcggcagtaacccctacaccggcagccacacgcaaacgtcctttggcatccttgcaagccatcggtttatctttcgcttttgtaatatctttataagtaataagacctaccagtttaccttccttatccaccaccggcaacttttcaatcttatgctcttgcagaatccgtgaggcagcctccatgtcagtggactggttggtagtgacaatattctccttcgtcattacctcatcaatacgtttgtccatatccttctcaaaacgaaggtcacggttcgtcacaatacctaccaaatatctttcatcgtctactacagggataccgccgattctatattcagacatcaacgcaagtgcatctctcacagtagatcctctcttgatagtcacaggatcataaatcataccgttttccgcacgtttcactatggctacctgacgtgcctgctcttcgatagacatgtttttgtgaatcacaccgattcccccttcacgggcaatggcaatggccattttcgcttctgtaaccgtatccatagcggcagtcacaaaagggactttcaactcgatgttgcgtgagaacttagtcgtgagttcgactgtttttggtaaaacttcagaataggcggggatcaacaatacatcgtcgtaggttaatccgtccattacgattttatctgcaataaatgacatagggctttatgcgtttagattttattgcgtgcaaatatacgcattttattcaatatgggaaaacgatagaatatttttttgctaagagaatacgaaattttgcagaaataaaaagaatcagtcccccaaatggctcacataaaacaattacaaaaaaacagggagttcatgaaacaaatgaagcgcttttattcttcaggtccagtgtttttcattaaatttgtactttgaacaaaagaaacaaaagaaacatggaaaaacaaccgcaatttccctttgcgcccaaagacttcgcacgctgccttaacgccacatgcccccgttcccaaaactgcctgagacgaactgccgccctgcaggatacggatgaacatctatttctcaaagtggtaaacccgctccgttatcccaaggagggtgaagaatgtgaactgttccgttccaccgacaaagtgcggatggcatggggagtcacccacctgctggacaatgtgccctacaaagaaggcagcctgctgcgcaatatgatcatcaaccacctgggcagaagccagtattaccggtgcttccgcaaggaacgcccttttgcgccacaagaccaacagaccattcgcatgctgttccgccagagaggcatcagcgaagagccgtcattcgactactacacaaatgaatttaactggtaatatccgtcacactgtcacagccgcatgcaacacattgtacgacaatagtttaccactatgacagatggtgtaacggatggtgtgacggacttttatctgtcacaccgccgcctccggatctcatcatgcccttaccagctgatacacagtgcctttacgtgtatgccgtgaaggaataccctgtttcctcaaaattcgtccgaatgccgccaccctcttggcgttcaatggaatatccacttcctgatgcaatatcttcaatatttcggcaggcgccatccactcgccctcttcccccgcttccgccatgcggaaataacggaaaaggaactgctcttcaggagaatattgctgaaattcgcggttcgcctccgtcatgacatactcgtccgcatcattaaaccagtaacgctcaccgtgcgccagctcgtgcatggcctgtgcatacaactgatcgtagtctatgggacgcgaggtatcaatcacccccttcacctcaatgcagatgaagcggcggctgcccgaaggatcggtcagcaaatccttgtggttactggtggcaatgaacgaagcatagcggcgcatctccaccaccgatgtgccgtaaggccggcgcgcattcaccaccggcttttgcagaatgtgcttcaagaatccctgttgtgtggcgctcacctggtcgaactcgtcaatattgatcagcgcgaatcgattcaggcttagttcgacatctttcttgcgtgagaaatcgaggctgtccgtatagtaggagcattcggaaggcggcatgatgctgcggcaaaaggtggacttgcgcgttccctgcgctcccaccagcaggggcgaaacactgttggcatagcgcttgtccatcccccgccaatgagccaccatgttcagaaaccagcgatggaacaattcgggccaatgcggattgtcacaaggtacggtctgcgccaacggacggatgcggtcgcgtccgtcccactccggaaggttgaacaaaaaatcctccagcggattatacaccggcacacgattggaatacacatagcggctgatatccctgtcccacagggggataccttcggcctgtgcatccagggcgatgctgttcagcgcacgcttgtccaccggctgaaagcggaagcagaaggaatgccgctcgcggaactccgcctctccggtctgcacgttaaagcgaaattcataacgtcttttcataaactcggcaatgaggaccgacaattgctgctcacggctcaaagcgcatttgcttccgaaatcctgacgccggctgtacacattccgcaccacctgacgcaccagttccaacggtttgcgtacaaaatgacggaaacgcgccctgctgaccaccgcttcctccggaatgcccgaccggaaacagttcaacgccagttgcgaaagaagggtatcccagctataggaggacttttcatcggccggatcgggcttatccaaatcaatgtaagcctgcctcaaggccgcctcgaacagcatggagagcgcatctgccgtttcataactccccaaggcacgttccaaaggacgctggccggagacagcaggttcggtatgcaaggccatttcatcgggcatccccataggctgtgacaggtagaactgcacggagtccggccggtaaagcacatcggggtcataggaaaggcgtgaatattgttccaggaaaggttccttgggacggatatcgaatgacaactggggctggtagcacttcaccgccatgatgtaggcatgagcatgaaacgcttccgcctccgcacgggtaaggggcagcgtattgtcgggtcgggtgaaagccaccaggattttcaccgaatgtccgctggcgcccataaaggcgcaccgcgtctgcggcaacttccatgcctcccgtttcacctgctccacttccgccctgcccgccaaggggcctacggtcagttccaccaatccgttataagccttcatgcactgtccgccctccgtcttgcggaactcggcggcaggcatcatcttgggcagtttgtccgccgcctcgcaatggtcgccggggaggacatggcgcaactggcttctgaacatggtgacgggacaggttttcacttcctctttcattctctctacccatgcatccagtgtaagagtgctctgggttacatggtttccgccgtcgcgtacctgggtaatctttatcatttatcgtgtatttattcgttttttccaatctataaagatacggataaaatcgggaaacaaagcaatatacaggaaggtttctttcaaaaaaaaggacgcgaagggtacagaaatttccgatagggaggtgaagcggaaagatattgaaggaatgcattcgcgacaggtataatccagaccattatatgctatgatacaatgtattgcaccatttggaacaatgagtttttctaatagaaaccattaattctagcgcatggtacaacctgtctttacatataggaataaattgttccactgataggaataatttgttccattagcatgaaactatttgttccactggacggaacaaactattccactgggtgaaactacccacatcatgcatgtaaaaagaggctgtagcatatgtgcaagattgacaaaagtctgtcaccgtatccgtcacgctatccgtcaccatcgcaacacgttgtaattcaagcgcataaactgctgtgtgacagatgtgacggatgtgacagtttagatttctcataataccaaatttaaggtttatgcaaatacaacggatattttctcccgaaacaagaatatgctataaaaacatatgaaaagccggacaaacatctctgtcgcccggcttttttattatcaaaacaatcaaagaagcatcaatttgccatttcagaaataaacttgatgcggaccaaccggatttcatcctccgtatagtcatcacccaattcatccatcgcgtcatctattttgtctgttgtagactccttgaagtaatcataaatatcgttcaaatggtcttcatccataatttcctccaggaagtaatcaatattcagcttggttcctgaataaacaatagcctccacttcatccaataattcaccgaactccaacccctttgacactgcaatgtcgtccaaggctaccttccggtcaatagcctgaatgatggataccttcagtttggatttattggccaccgtacggacacgcaaatcctccggacgctctatttcattttcctcacaatgcttctttatcaatacacagaactcctggccataacgttttgcctttccggcacctacgcccggaatattctgcaattcttccaaagtcaccggataaatggtagccatcgcctccaaagaaggatcctggaaaataacatacggcggcacatccagtttcttggacagcttcttacgcaaatccttcaacatagagtaaagcacggggtctactgcacaagaggcacctccccgaaccggagtttcttcttcctcctcctcaaaatcattgtcttcaacaatcttgaaggatttcggttttttcaagaatttatgtccttcgggggtaaccttcaacagaccgtaattctctacgtctttacttaaataacccgctatcaaagcctgacggatgacagcattccacattttttcttcttctcccatgcctgaaccgaatacttccagttcttcatgtttatgagcaagtacttctgacgtttccttacccaaaagaatatcaattatataatctgctttaaagttttctttcactgctatgattgcttcaatcacagcgcataatgaatcctgagcctccacttgctttttaggatttaaacagttatcacaatttccacaattctcctctgtatattcttccccaaaataatgtaacaatgatttacgacggcatatagaagactctgcgtatgcagctgtttccaacagcaactgtttgccgatttcctgctctgccacgggctttccctgcataaacttctccagcttctgcaagtccttgttggaatagaacgtaatacactgaccttcccctccgtcacgaccggctctccccgtttcctgataataaccttccagacttttcggaatatcataatgtatcacaaagcgcacatcgggcttatcaattcccattccaaaagcgatggtagctacaatcacatctatatcctctttcaggaacccgtcttgattggctgtgcgtgtagcagaatccattccggcatgataagcacgcgcattgattccgttagcttgaagcacttcggccaattcttccaccttcttacggctcaaacagtagataatacctgatttaccaggattagccttgataaacttgataatatccctgtcaatattatttgtcttcgagcgcacttcataatacaggttcgggcgattgaaagaggacttgaactcctgcgcatcctgcatacccagatttttttgaatatccatacgcactttcggagttgcagtagcagtaagggcaatcaccggcgcctttcctatttcattaataataggacggatgcgacggtactccggacggaagtcatgcccccattccgaaatacagtgtgcttcatccaccgcataaaatgagatcttcactcctttcaggaaatctacattctcctcctttgtcaaggattcgggagctacgtagagcaatttggttttgccgctcaggatatccgatttaacctggtctatagccgatttgttcaatgacgaatttataaagtgtgctactccgtcttcctcactgaaattacgcatggcatccacctgattcttcatcaatgcaattaaaggagatataacgattgctgttccatccatgataagggatggcaactgatagcataacgatttaccaccgcccgtaggcatcaaaacaaatgtatcatttccggcaagcagattacggataatcgcttcctgattacctttgaaagtatcaaatccaaaatacttttttaatgcgtccgttaaatttatattctccgtcattgtatcaatagtttttcacggttttcccgatttcttgttttacatcttttgttgtctaacaaagttataaacaagttctcaaattacacgaatatttcgggtaatatttttcagaagaattgcattttttctttctctctccctttatatcttgatactaagctgtttgcattcgcgaaatatttgcctttcccatctgctgttttgcaaaatcaagtgtcacttcgtactttttcgctttctgagagggaatttcaaacataacgtccatcatgatcgtttccacaatggaacgtaatccgcgtgctcctaacttatactcaatagctttgtctacaatatactcgaatacttcgggttgaaactccagcttgaccccatccatttcaaataatttaacatactgtttgataatggaattcttcggttccgtcaagatattgcgcaaagcggttctatccaacggattcagataagtcaagatgggcagacggcctatgatttcaggaatcagcccgaatgatttcaaatcctgaggggcaatatattgcatcaagttgccgcgatctatcttcaccacgtcctttgccgcgctataacctaccacatgcgtattcaaacgttgcgcaattttgcgttcaataccatcaaatgccccaccacaaataaacagaatgtttttcgtattgaccggaatcattttctggtcggggtgtttacgtcctccctgaggtggtacattcacgatagatccttccagcagtttcaacagaccttgttgtacaccttcaccacttacatcacgagtaatggaggggttatctcctttacgggcaatcttgtcaatctcatcaataaatacgatgcctctttcagcttccgccacattataatccgctacttgaagcagacgggttaaaagactctcaatatcttcacccacatatccggcctctgtcagcacggtggcgtcaacaatggtaaacggcacatgcaataatttggcaatagtgcgtgccagcaaggtttttcccgttcccgtactacctaccataatgatattggacttttcaatctctatatcatccttatccactttttggagcagacgcttgtaatgattgtaaacggcaacggaaagatagcgtttggcgtcatcctgaccaataatgtattggtcaagaaattccttgatttcctttggcttcggaagttccttcaagttcaactcacccggtgcaccttttttttgatgcatggcttcctgcataatttcatatgcctgctccgagcaactgtcacaaatgcagccgttcattccggttatcagaaatccgacttcattttccgaacgtccgcagaaactacatttccttctactgtttctaggtgttttattatcttccaatgtttattcctttaaatatccaagtttcctaatgcgtctttaagaaagaagcctgcatgaaatgatagcggaaacctgggttgtttttagtactgttattcttatcgaatggaaataaatacattatagagcagccggtttgcgtgacagcacctcatcaatcataccatattccttagcttcctgagctgtcatccagtagtcacggtcagagtctgcccatactttgtcaaaatccgtatgagagtggtctgcaataatggtatacagttctttcttcaacttttggatttcacgggccgtgatctcaatatccgaagcttgtccttgcgcgcctcccatcggctgatgaatcatcacacgtgaatgagtcaacgcagaacgtttaccttctgttcccgcaaccaacagcacggctgccatcgaagcggccatacctgtacagatcgtggcaacatcactattaatgaactgcatggtatcataaatacctaatccggcgtaaacagatcctccgggagaattgatataaatagatatatctttaccagactctactgagtccaaatataaaagctgcgcctggagtgtattggctgtataatcatcaatctgtgtacccagaaaaataattctgtccatcatcagtcgggaaaacacatccaactgagtcacattcaactgacgctcctccaaaatgtaaggattcagatatccttgcgacttgatgacatcatccagcaccatactgttcatccccaaatgcttggtagcaaattttctaaaatcatccataatctaatggtttagttattagtaacaaaaaagggttttcaacctctatttttcaaacaaacaaaagtacaaaaaaatacggttaacgtatccaatactcttatctataacgaaaatttatggtcaaaaaccccttttttagaaagttttagcaatcacttacttcgacttactaagttattattcaaacattttgttgaattcttccatagaaaccgttttgtggtttaaagtagccttagctttcaatgcggcagaaagtttgctttcagctgcacggtttaccaaaccttctacagattcctgcttcttcaacatttcttttgcatagttctctagaacttcttcagggatattcaacattccgtattgagcaaactgagtgcgagttgcttccttggccatattcatcacatcggcttgttccactttaatctcattattcttgagcaattgctctttaatcagatgccaagtcagttcttcaatactcttgtcatagttttcagcgacaaaagcttcacccttctcttcattattcagcaacatgatacgcttcagtaatgcatcggggaattccaacttaccaatcttattaaccaaatattcacgaacatcgatcaagaatttataatcgctatctgattcgaactgctttgcaattccttctttgatcttagcgcggaattcttcctcactgcttacagtgccttcgccaaatacattgtcgaacaattcctggttcaactcagcgggaaccatacgggtgatctcttccacctggaagctgaagttacctttcacaccggcaacttcctctttctttatcttcaataaagaagaaagttcagcttcattattatcaaatgctacagcaggattaaataccagcacatcatttactttagcaccgttaaatatagtcttttgctcatcattcttcatataagccggcatcattaccgcaccttctacctgaataccgccttctttagtatttccattttcatccaattcagccaacagacctttaatcatgtctttgtcttcatactgctctaccttatcatattttgcagcacgctgagtatacattttaacctgctgttctatcagttcgtctgaaacttcgatagtatagtaatccactgtatccgcagctgagatttcagctgtaaattcaggagccaaagcgatgtcgaacacaaattcaaaatcttcttgcgtatcgaaatcgataggtttcatcttttcttcattaggcaacggcatacccaacatattcactttgttgtcgcggatatattcgtttaccttttcctgcatcattttatcaacctcttctacaaggacagacttgccaaattgttttttaatcaaactcataggcaccatacccggacggaatcccggaatattagctttctgacggtaagtcttcagtgtcttttctactcttgcctgataatcagctttttccagttttaaagtaagcaatgcactcactttgtcaacgttttgcaatgaaatattcattctgaactttatttatttaattattacttctttctgtttttcaccaaagaggttgcaaaattagtgtttaatctttcaataaccaaatacacagactaaaaaatactaattgacagcagaaagtatccatttaaaatgactgactaagaaaccgattcaaaaaaaagaaaaaaaagttgtttttcttcttgcaaattcaaaatttatgcgttcctttgtgcccgactggtgatactaattatagctagtgatttttattacaaggttttacttttgtacgaatagcacttacgtaaactctctgtcgttcgaatcccctacttcattaataatcaccactcagagagtattttttattttaattatttttattttttcactatgaacatgtatgttggaaaccttaactaccgtgttaaggaaggagatttggaacaagcaatggcggcttatggagttgttacttctgtaaaagttatcaaagaccgcgaaacaggtaaatctaaaggatttgcatttgttgaaatggaaaatgacgcagaagcagcccaggccatgaatgaactgaacggttcggaattcatgggacgccaattggtaatcaaggaagcaagacctagagactaagtacttatctgatacaatcaaaaaaaagctctgagcaaattcagagctttttttatatcccacatctccggttttatacattttttccctgcctgtccttttccgccaattgaaaatccttacggcgaagcacaaaattagtgcctagatatttctcacggacaacaggattttccgctagttcttcaggggttccctgaaacagaatttttccttcaaacaacagatacgcacggtcggtcaagcgcaacgtttccaatgcattatggtcggtaattaaaataccgatatttttatctttcaatttccatacaatatgctggatatcctctacggcaataggatctactcctgcaaacggttcatccaacataatgaacttagggtcgatagccagacaacgcgcaatctccgtacgacgacgctcgcctcctgaaagctggtctcccaaattcttacgtactttctgcaaacggaactcggcaatcaagctttccagtttgtccttttgatattccggagtagtattagtcaactccagcacagaggcaatattatcctccacgctcatcttacgaaaaactgaagcctcctgtgctaaatatccaatgccattctgagcacgcttatatacaggataactggtaatatccaagtcatttaggaatatatgcccctcattcggcacgataagtcccgtagtcatataaaacgaagtagtcttaccggcaccattcggtcccaacaaccctacaatctctccctgcttcacatcaaaagaaacatgacttactaccgtacgcttgccgtatttcttcaccagattttctgtacgaagtatcatacggttgtcatcggtcactgtattttgttgttctatttcctgctctgacatatccatgtattttgcgacaaaaatactaaaaaagtttaggaaacgcataacagaacagaaaatcagaacttcttttgcatttatatagacaaaaaaggctacttttgcaggaaattgtgaaaactatgatgataagacccataacaaccgtagggaaatatatcatgctgatggggcgtacttttgctcgtccggaacgtatgcatatgtttttcaagcaatatctcaatgagatggtacagttgggagtaaattccatcggtattgtactgcttatttcttttttcattggtgccgtaattaccattcaaatcaaattaaacatcgaaagcccgtggatgccccgttttgtggtaggctacaccacccgcgaaatcatgttgctggaattctcctcctccatcatgtgcttgatcctgtcaggaaaggtaggttctaatattgcctccgaaataggaaccatgcgtgtaacccaacagattgatgcattggaaatcatgggggtcaattccgccggataccttattcttcctaaaattatagctttgatgacaatgattccttttttggttattttcagcatatcctcggggattattggtgccttttgcacctgttggttcggaggagtcatgaatgccgaggatctggcctatggtctgcaatatagttttcaggaatggtttgtatggtgcagttttattaaatctatctttttcgctttcatcatttccagtgtatctgcttatttcggttacacggtagaaggaggttctattgcagtaggtaaagccagtacagattctgtagtaatgagcagtgtactcattctattttccgatttagtattaacacaacttttaatgggatgatacaagttaaatcattatataaatcattcgagggaaaagacgtattggtggatatcaatgctacttttaacaatggtaagaccaatctgattatcggtcagagcggttccgggaagacggtattaatgaagtgtatcgtcggtttgctgactcccgaaaaaggcgagattctgtatgacggacgcaacttcctcaacatgaataaaaaagaaaaaaagacattgcgccgcgaaatgggaatgattttccaaagtgccgccttgttcgactctcttaccgtactagagaatgtaatgtttccattggatatgttctcaaacgatacgtatcgtgaccgcgtaaaacgcgcccaattctgcctggaccgtgtgaacctgattgaggcacaaagcaaatatccgggagaaatcagtggtggtatgcaaaagcgtgtagcaattgcacgtgccatagctttaaatccccagtatttgttttgtgatgaacctaattccggcctggaccctaaaacctccctggtaattgatgaactgattcatgacataactacagagtataatatgaccactattatcaatactcacgatatgaattccgttatgggaatcggcgacagtattctctatatttatcaaggacataaggaatgggaaggaacaaaagatgatgtgttcactgctaccaatgaacggctgaataattttatctttgcatctgatctgctccgcaaggtgagagaagtggaagaacatagaaaataatgataaaatgattagtggttaataaccagcggatatcacggtgaaacccattaacccactaatcattaaccactattcttatttctgtctgataaagatatttatcggcgttcctgacaaattccatttctcacgtatcttgttttcaaggaaacgcttataaggctctttcacgtattgcggcaaattagcaaagaacacaaaagaaggaacctgtgtgtttggcaactgcgtacaatatttaatcttgatatacttacctttatttgaaggaggcggataagcctcgatcaacggaagcatttcttcattcagacgagctgtcggaatacgggtagtacgtgcctgatatacttcttttgcagtttccagcaccttgaaaatacgttgttttgtcaaagcggaagcaaagatgataggaaaatcaacaaacggtgccagacgggaacgaatggcttcctcataagttttcatcactttggcattcttgttctctaccaagtcccatttgttcaccactaccaccaaacctttctgattacgttgaatgagagagaagatattcaaatcctgtccttcaatgccgcgggtggcatccagcataagaatacacacatccgaattctcaatagaacggatagagcgaatgacagaataatattccaaatcctcgcttaccttattcttcttacggatacccgcagtatctaccagataaaagtcaaaaccaaacttttcataacgggtataaatagaatcgcgggtagtacctgcaatctctgttacaatattacggtcctccccgataaaggcattgatgatagaagattttccggcattcggacgtcctactactgcaaaacgagggatatcctcatccagcagttcttcaccctctttactgaatttacctaccaccagatccaacaattcccctgtaccgcttccgcttaatgcagaaatacaatagggatcacccagccccaatttataaaattcggcagcattatattgcagttcattattatcagtcttgttagctaccataataacaggtttctttgtacgccgcaaaatagaggctacagccatatccaaatcggtaaccccgttcactacatccacaacaaacaagattacatccgcttcatctatggcaagacttacctgtttacggatctcttcctcaaaaacatcatccgagtttactacccatccaccggtatcaacgacagaaaactcatgtcccacccattccgacttgccatactgacggtcgcgggtagttcctgcctgctcgtttacaattgcctgacgagttttggtcagacgattaaaaagtgtagactttcccacattggggcgtcctacgattgctactaaatttcccattttctttcttgtttacggctatcacagtcgattttaatccatttgatacccaaagttctttaattctttgtccgagcttctccaatccttatcaactttcacaaaggtttccagataaatagacttttggaaaaaatgttccaacgttttacgagcctctgtagccaccttcttcaatgccctgccctgcttacctataataatacctttttgcgattcacgttccacataaatcacagcattgatatggatactcttagcatcttccttaaattgctccactaccacttctacagaataaggaatctccttatcataataaagcaaaatcttctcgcggataatctcggtgacaaagaaacgcgccggtttgtctgtccactgatccttaccgaaataggggggtgaatcgggcagcaattccttgatacgcttcattaccgtatccacattgaatttagaagtagcggaaatcggaataatttcagcttgaggaagctgttcgtgccacgcttccaccaacttgaccaagtcttcctgattggtcaaatctattttattaattaacaataagacaggaaccttgacattacggactttttctataaagtccgcatttttatccgttttctccaccacatctgtcacatacagcaatatatccgcgtccaccaatgccgactctgagaagttcaacatagattcctgtaacttgtagtttggcttcactactcccggagtgtccgagaatacaatctgcatatcgtccgtattcaagattcccatgatacgatgacgagttgtctgcgacttgaacgttgcaatagaaatacgttcccccaccagcaaattcatcagtgtcgacttgcctacgttggggtttcctactatgtttacaaatcctgccttatgcataattctttcattttattggttacagacaaaaaaacgcatcggaatacggatgcgttcatttgtatttgtagtttaatgattattatctcttactaccatcgtaaccccatttcacataaacggctccataggtaaaacctgcgccgaaagctgtaaatatcaggttatctcctttcttcagctgcttttcgtaatcccaaagacacaacggaagtgtagcaccactggtattaccatatcgctgaatattaatcattaccttttccaagggaacttccaagcgagaggctaccgcatcaataatacgcagattagcctgatgaggaattacccagtcgatattatctttattcaaaccattcttttcggcaatagtcgctgtaatatccgacatattggaaacagcatatttaaatactgttcttccttcctgataaagataatgcatcttatgatcaacagtgaaataagaaggaggacatacagaaccaccggctttcatgtgaagaaaaggaagtcccttaccatctgtacgaagaatagaatccataataccataatcttctgtagtagcttccaccatacatgctgctgcaccatcaccaaagatagggcaagttgcacgatcctggtagtttaccatagatgacatcttatctgcaccgacaataataatctttttatgtcttcccgatgcgataagtgaagcagcagtttccattaaatacaaaaagccgcagcaggcagcctgcaaatcaaatgcaaatgcatttttcaatcccagcttatcacacaggatagaagcagtggaagggaaatgatagtcaggagtagtagttgctacgattactgcatcaatgtcatccggattagaagctgttttctgcatcagttgtttggcagccttacgcgccatatacgatgtacctaatccttcttcattcagaatacgtctttctttaactccgattcgagtcataatccattcatcattggtatctaccattcttgaaatctcttcgttagtcaagacataatctggtacatatccaccgactcctgttattactgcatttattttttccatcattccaatttaattagtttatacccttacaaaaaagtagccgacagagccgaagctcgccggctttattttataaaacgtacaaacgtgtttaaagctactgattagacagcagcttctttttcgattgctaacttacctctataataaccgcaagctccacatacagtgtggtaaacatgccattcgccgcagttaggacagatagctaaagtaggagcaactgctttatcatgagttcttctctttgcagttctcgtttttgattgtcttcttttaggatgtgccatttttctaaactttaattattatctaatattttctttaattcattccatctcggatctatttcctggggcccttcgctgatatctccttcgggtaactccaccgctatgtcatcatcatcttcatcatccgccgaaatgcgcaaatgcttactcagcttgccaaccatgcctttgttgcatttcccaggcgcatgtacatgcttcatgggaatattcaaggctataaactcatacaaaaaccatgcgatgttaatatacccatcttcttcaggtactacaactatatcgccctcttccgcaaatgaagaacctaactttactttcagtttatctgaagttgaaacaggtaattccatttcatccaagcaacggtcacacggtacaatgacaaagccttcagtttgaaaatccaacagaaaaacaccggatgtctttttcacattcagttctactgccagtttccctttctgtacttccggtccatccagatctacaaagaattgattatccagcgtaaactcatacttagcagagtccgctttcatattcttcaattcaatcttatatttatcaaactttcccaaagcaatactatataaatcgggcgacaaagatacgaataatattccaatatgtataatataagtgcgtatttttcaaatataaattagacatatattatttttagcgcataatttagcgtttttttgaagtgtgtttgcctttcatatctcatatcagtgattttcattgtacacttcttccctttatactccactatcctttttcggctcatgcagcttgcataaaggctctattatcatctcccggttctctatcagggcaagccttcagacctgcctgttctatttccagtccctattccaaggcataagtacccggtgagggtttccggacctgcccctgccggagaaaagacatggcggagccttccggacagttccgtgggaaaggtatccacacccacgggaaagataaggtttttaactaattcccccaagttttcaaactgagccgaaaaaacggtagaggccacatttcatgcgtgcgtatacaaaaaaaaagcctccggaacttcttcaagtccggaggcttcaatcaaaacggcggctacctactctcccactgtgacgcagtaccatc

SEQ ID NO: 3911 - DNA, 46694 bp, Unknown
  gut microbiota DNA sequence
cagattgttacgttgacccgaaaacgtataccgttaatgaattcaattatttttgtccgactgttttaaaagtaaagaggataaaagattgtgattcaatcatttatcctctttttagttgcggaggcctgactcgaacagacgacctttgggttatgagcccaacgagctaccaactgctccactccgcgatgttgtgttttgattacgggtgcaaaggtacggctttttttctaatctccaaattatttctgcatctttttctcaaataaaataatctttttatctaatgtgttgatatatagagtgtatgtaatatgttaattaacatttactttaagattatactttatttgtttgtgtggtacaaagaaaaaatgtaattttgctcacatatatatgtaatgtgcaattgaacttatatggcagtatcaaagactagggctaaattggtagacgtcgcccgtcagctttttgcgaagaatggggtggatgatacgacaatgaatgatatagcggtggcttccaagaaaggaagacgcacgctctatacgtatttcaagagcaaagaagacatttatatggcagtggtggagtcggagttagagatgctgtcgggcgctatggagaaagtggctgaacaggatatcgctcctgatacgaaaatactgcggctgatagaaacacatctggactctatcaagatggtggtgttcaggaacggaactttgcgtgccggttttttccgtgatatatggagagtggaggcagtgcggaagaattttgaccgaacggaaacaaagctgttcaggcaggtgttgacggaaggaaaggaaaagggaatctttgatatagacaatgtgaatatcgtggcggatattgtgcactattgcgtgaagggaattgaagcgccttatatacgtggtcagataggtgaggagctggacgatgagacaggatgggcatacgtggcaaaaattgtgtatggcgcattgggacgcaaagaacagaataaggaataaaattaactttataattataaaatcaaaaattatgggattattaacaggaaagactgcgattgtgacaggtgccgctcgtggtattggtaaggcgattgcattgaagtttgctgccgaaggagcaaatatcgcttttacagacttggtaattgatgaaaacggtcagaatacagaaaaagaaattgctgcgttgggtgtaaaggtgaaaggttatgcttctaatgctgcgaattttgaggatactgagaaagtggttaatcagattaaggatgattttggttctgttgatattctggtaaacaatgcagggatcacgaaagatggcttgatgatgcgtatgagtgaggcacagtgggatacggtaatcgctgtgaacttgaagtctgcctttaactttatccacgcatgtactccgatcatgatgcgtcagaagagtgggagcattattaacatggcttctgtagtgggtgttcacggaaatgccggtcaatgtaactattctgcttcaaaagccggtatgatcggtttggctaaatccatcgctcaggaattgggttctcgcggtatccgtgccaatgccatcgctccgggattcatcattacggatatgacagcccaattgtctgacgaagtaaaagctgagtgggctaagaagattcctttgcgtcgtggaggtactcctgaagatgtggcggatgtggctactttcttggcttctgatatgtcttcgtatgtatcaggacaggttatccaggttgacggcggtatgaacatgtaatatgatagttgtttacgaggataatcatattattgtagtcaataagacttcttctgaaatcgttcagggagacaagaccggtgatactcctttgtcggagatggtgaaacaatacctgaaagagaaatataataagccgggtaatgttttcattggggtgacccaccgcttggatcgtcccgtcagcggattggtggtgtttgccaaaacgagcaaggcattgcccagactgaatgagatgttccgtaatggtgaggtgaaaaagacctattgggcgatagtgaaagagtgccccaaggaaacggagggtgagctggtacactatctggtacgtaacgagaaacagaataagtcttatgcatacgataaggaagtaaaaaattccaagaaagctgtactgcattataagcttatcggccattctcagaattattatttattggaggtggatctgaaaaccggaaggcatcatcagattcgttgccagttggccaagatgggatgtcccattaaaggtgatttgaaatatggctttccacgttccaatccggatggcagtatttgcctgcatgctcggacggtacagttcgttcaccctgtgtcgaaggaaatgatccagttgactgcaccggtacccgaaggtaatttgtggaacggctttgagatggattaaagatagaaaacaaaaagggaatgcttcacagcattcccttttcttacttttaggcatctttcatttacttcaaaacttctccgctttcgctgaaaagtacagtgctttcagttccctcttcatcagttaaaacaaccttgtaagttttagttccatcttcgttcgcttctacggcagcttctttgatagtagattctgcatagttctttgtgatagcttcctgcacggcagccggaaggtctttcacttcaataggggtaaaatcatttatcatagttacggtcacagagtccaccataaagttgtcggcgaatgctgctgatgttcctaatcccattaccaatgctgctgcaacaaataactttttcataattgtaggtttttactgttaatactatgttgtttagttttctctgataacagaaaaacaatatctgtgccagaaaacgggattattctttaagatgttgatatttagtaaattgtcttcgattgggatgaaaggaagatgggaataagtgtggaatatggggaatatcttgtggaattattccacatggccgatgggggaatggggtatatactgtaaggttgtgccctactggaacagcaggggtaacagccttacggtacagtagattcttgttggtaaagttattgaatatcgtacagcttcaatttgttatataaagtcttccggtctatgcctaataagatggcggctttacttttattatttcctgtttgcttcaatgcctcaaggatacgtttcttttctgccgcttcatcatgcaggctgaatgtctgcggaccggcggaccttataggttcctgcagctcataacctaattcggcaagggtgatgaagttgctctgtgccaatagggtggcacgttttactatatttttcaattgccggaggtttccgggccatgaatacgtttgtaaagcttggctggcagcggtatcaaaccctatcagctggcggtccagttccctgtttgcctgatccaaaaagaaattggcgaatagcaggatatcttcttgccgctcttttaatgccggcatacgaagggtgaattcattgatgcggtggtaaagatcttcgcggaagtttcctttttcaatggcctgttgcaggttctcattggtagcgctgaccagtcgcacgtctacctctatttctttattggaaccgaccggacggatacgtctttcctgcaaggcacggagcaactgtatctgtacttcataacttaagttgcctatttcatccaaaaacaaagtacctccgttggcttctacgaatgctcctgttttgtcgtttaacgcccctgtgaaggagcctttgacatgaccgaaaaattcggaagctgccagctctttggggatagaaccgcagtctatggcaatgaatggcttgtcggcccgtttgcttagctgatgaatacggtgcgccacatactctttacctgttccgcttgcaccgtttatcagcacggacatgggggtgggggctaccagacctacataattgtagagttggcgcgctgcctcgctttccccctccagaaaattagagggaggaacggttgcactgtggggaacggctttgttcttagatgctttgggcgcgactgtgttcttttctattcctaccggtgtgggtaaagctttgttttgcaatgcctcattaattttcttcagcaactcatccggttgtatcggctttgaaatgtaatcactggctccatgttttatagcctgtacagcgctttggatgtcagcatagcctgtcatgatgatgagtgggatgttatatttctgttctttcatccatgaaagcaagaagataccatcttgatcaggcaggcgcagatcagacaaaacaagatcgtatggttgtgcatccagttgtttgcgtgcgcgcgcattactgcttgctgtatcaaccgaaaatccttttttacccagccaagttttcaacatggtggcaaaagtcaagtcatcttctactatcagaatggaatgtggcatctttatgtggtttttattcgtgcaaaaataagcttttttcacggtgtaccgaaacacggactctatttctaataccttttaacttaacagggcttaattcttcatgcttcattcggtatttcgatctgcttttttgcttcgtcaattactttttctatttcttctattataaagtttgttttctctattgcttcttcaccgatttcggttgtccctcgtctttgttccatccatgtcagtgcaggaatgcaacgggtagctcccagcatggtgaacagtggcaacagtttatgagctattgccgtgatgtcttccatattctttttcgccaatgcttcttccatacactctcggttcttttttgtttcgctgatgaaggtacggagtatttctgcggctgcttccggatcatcttccgagaaggcggtcagggcggagaaatccaacgtttcttgttggggatgattttctttggccggtgctatatggggagtcggatttcctgtggcgggtacatcctttcctgtgacctggaagatggctgtaaacaattcgtttatggtgaaaggtttgtgcaggcaaccggcaaagccatgtgaacagaaataattttcgtccatatcgctacgggcggtcagggcgatcaccggcagggtttgcacccatgatgtgtccagcgtgcggatggctttcaataagtcgaatccgttcatggcaggcatttgtatgtccgtgagtaagacgtcgaagcgcttttctttcaattggttgaggagctcttcgggatgatggcagcaggtcacagtcactccggggcgttccagcatggcggtggtaagctgtaactgtatgcggtcgtcgtcaattaaaatcaggtgaatcggctcactgtcttcgcgtggagtgtctgtttgccggatcccggttgcgtcaggggaagcaggagtatgttctgctcccggtccggaaagattttcatccgaatgggaaggaccctcaggcaaaggcagatatacatggaagcagctgcctttgtcttgttcgctttctatcttgatatccccttcgagcagaagcaccagtttacgggtgatggccagtcccaagccgaatccttcttgtccttgtgcattatggagccgggtgaattcctgaaagatacgttgttgctcttcttggctgataccgcatcctgtgtcactgatactgaaatgcaattggccgttttccaatgctgcccgcagggtgatgcctccttctttagtgaatttcagtgcattggatagcagattctccgctatttggcggatacggaacgggtctcctatgtatacgcggttcaatgattcgttgcaatgatagttcagttccagctgtttggagtctgccatcggtttgaagctaatataaatggtgtcgaacagttgatgggggttgaacgatacctggttgacgtccattttatgtgcatccagccggtggtaatccagcagggatttgaccaggctgagcaggtgattggctgaactctgcatattgttcagatagaaacgctggcgttcttcggtagtgatccgctccagcaggtcggtatagcccaagatggaacccacgggagctttgatatcgtgggtgatggtcagcattagtttttcacgcgccgccaataagtcttcggcgcgacgtttggctttttccagttctcggcggtagtggttgctgcgagtgatgtctctccatatcaggaccagaaagaaaatagccagaaccacagcgacaatggcgattcccgccactgtgcggatagagctttggcgaatatattcctcttgtatatgtttgttttgggccaaagcttgctcttcctcctctatagtacttaatagctgattgactttctgacttagtttcaagccgctgaggcgcagggactgggtgcggcgattgaccatttccatacgttcttgttgggtatcggttactcggctctgtatgtttttcaacatggtgaccacagtatctgccggactgtatgcctcggtcagcgtatcggtatattcttcctgaatcacattgttgacctgtgtggaatctgcttttccgggcgagaacacttctcccaaacgcttgaagaagctcttgggctttttacgaataatataagaattggtgtgtgtgattactttttttcgtacatggggaaggctgagcaaggaatcttgctgggcgatcagttcgtctatatgctgtttgtaaagtatatctgtcccaccgtcctgaattgctttcagcaggttgcgcatattccgttctttatccatgaaaagcattcctacggtatccagtcgcgccagttgtatgctgtctgtcagcaacgtgcgtagggagtcaagtgccgtggtggcttgtttcatggctcgttggtatcggtagtattgttctatttgtcccgtactgagtgattgtccgatgacttccgcctgatagagctggctgataatttggttggtgacatggcgccgttggctcagtatggcttcatcatcaccggttccggacagtgacttcatttcttgatagatatatccgatagatataaagagcagtgcagtcagcagaatatagccgaatgcaactttcagcttggtggaacggttgggcaggctcatggtggttttatttttatttcgtatcacggttaaagcgcaggtaatagagtattccggctgtagtcagtccgaaaggaaatgccatccatattcctatgattccccaatccatgatgaaaccgaaaaaatagccggccggcagggagataaggaaataggcgatgaatgcgatatacatcatgggtttcacatctgcgattccacgaagggcattggcgaaatttatctgtaatccatcaccaaactggtagatgatgaacggaatgataagttgtgctaccattacgctgaccgccggactgtcgctgaaccatcctcccagttcgttacgcagcaggaagatgggcagggcgcctatcagtgcgatgagcagcatgatatggaatccggcgtatgcagagcgcctgacgttcatccggtcattctgtccgcggaagttgctaacccgcacggcaacggctgctcccatgccataatacatcataaagcagatttgggaaatggcgagcatcacttggtgggccgccagagcagtagtcccgatccatcccaccataatggcactgagactgaacgaagcagtttccattcccatctgcatggcaatgggccatcccattttgttcaggtgcaggaagtctgcccggttgagcgtattgtgcagaaatccttctttataaatatgataacgtcgggtacagaaaaaaatgacggcgaacacgaccaccatcatgatacgggaggccaatgtggaaattcccgctcccagcaatcccatttcgggcattcccagtttaccgtaaatcagaatgtagttgccgataatgttcattacatttcctgtcaataagatccacatggaaacgcgggtatcggttatgccgtcggcaaattgcttgaaaccgttgaaaagcagtacaaacaacaaggatatcagcaaaacgatgaagtagggacgcattaaaggcagcagttcttcgggttgccccagtcggtggatattcagataaagtatccacatgatgagtgtgagcaatacggccagcagtgtgttggcaaacaggctgttcttcagcattcgtcccactacatgggtttctccccgtccgaacagactccctacgataggagtcagcccgtatgagaatccggtagcgaaaataatggccaaagtaaacatattgttgacaaaactggcggcggctaattcattcgtgctgtgatggcctatcatcaatgtatcggcaaaacccaaaatgatgacacctatctggccgataacgatagggatacctaaagtgaaaagtgctttgtaatgttgcatggttaataaattgctaatgtgccaatatgctaatttgccaactggctgtgctgtgttccgcatggcgcagccagttggcaaattagcacattatcaggtcggcaaattacttttatagtagagtgtggaacaattttcccgcacaaatgttttttgtgcagcttcttttatctggccggcagtgaccgagcgatatttgtttacttcattgttaatatcttccgctttgccggtcagttcaaaataagccagattggtagccacattcaggtaattcaggttattgaatatctgttcgctttcatagcggttctttactttttccagctcgtcttcatccacactttcttccgtcaatgccttcagttcctgccatacggcagcttcggcagcttccagcgtgacgcctggggcgggtttgccggtgatatggaacaatccctcgtcaatgctgcccgatatataggcgtcgatactgttgaatacctgtttctcttgtaccagatgctgcaccagacggcaggaacgtccgctgctcagcaaatcgcttagcatatcaaaagcatagtagtcgggatggcgtcgttcacagatatggaatgccataaagagcgcgtctacaggcacgttctgctctactgtcagtcggcgttcctccgtttgccggggttctgccggcagtgagcggggggctacgttgcggcgcgggatagggccgaaccacttttcagccaatgtcactgtctcttcaaaagtaatatgtcccgttacagccagaatggcgttgtccggtgcataatatttaaagaaaaaggctttcacttcttcaagggtggcattggctatgtggctgatttctttgccgatggtaggccactggtacggatgcaccttataagctagggcgcgtagcagatgtgaggcgtctccgtatggctggttcaggttccgctgtttgaactcttcgattaccacttgccgttgcacttccagactgcgcgggttaaagtcgagggataacatacggtcactctccaaccagaatccggtttccacattctgacgagggagggtgatgtaataattggttatgtcattatttgtccatgcgttgttttcgcctccggcattttgtaccggagtgtcatagtcgggcacatggacggagcctccgaacatcaggtgctcaaacagatgggcgaatccggtatgatcaggatcttcatcgcgtgcgcccacatcgtacagtaggttcaatgccaccatctgagtcgtattgtcctcattgtgtatcacacgcagcccgttggataaggtgtatcggttaatgttaatcatctgagttgcaaattactgaatacttgccttgagaatccggatattctctatagggcggtctgcgcggttcgtttttgctatttcaatattgtccactacttccataccttcggttacttcaccgaatacggtataagaaccgtccaggtggggagcgccgcctatggtgctgtatgctttgatctgttcgggggtgaagcggaatttctcttctttgtccgccagctcacgggcttgggcttccaaggtgtcctgtaattccagtaacccggcattgtctcctgccttgcgcatcttgtatatttccttcatgtgctggcgtgccagactgtcgaacagagcctcttcacgctgttcgtttattttgttctccatgcccagcaattgcggttcggtgaacttgcgtccggtaacaatatagaactggcaacccgatgaagccttttcggggttcacatcatcaccctggcgtgctgccgccaatactcctttcttgtggaagaatttcggattgaactcagcgggaatggtgtaacccacatcaccgctgcccagcatggcagtatccgatgcgtttttgctgtccggatcgccagcttggatcatgaattgtttgataacccggtggaacaatgtactgtcatatactccttcttttaccagtttgataaagttatcacgatgtttcggcgtttcattatacagggccactgtgatatttcccatggtggtttccagttttaccaaggtacgcttttcattttccatatgatgatttgtttgtcttttcgagccggcgttgcatgcagtcaatgcaatgaaggccaggcatattagtaaaattttgtttgaagtcatgagctattttttatttatcggacaaagataggaaataaaattgagagtaagagcggaaaagcgaagaaaggaaggataaaaaaagggagagagcggaggaatacttcagacgcagacgcggcagaaccaggtctttttttctcacaaacgtgcgtgttcttataatttgtagagaagaaaaataaatggggcagagtgaggggaagagaagcaccggaaaaagaaaagacgaaagaaaatagataaaaagactggcggcaaaaccggaagatgataagacttgaaaaaagaaaattaaaaaagtttctgaataacatggtttgcataagtcttgaaattcgcattgaatagtagtatggcatccatcgtttcagagggaagtctttgatgaaggatgccggatttatatcatattgtaatatgcgcgcacgtgtgtgagaaaaaggaactgcgtctacgttggaagtagcttccgtcttcttggaaatctgtcggcttgtccgtattgttcatgttatgggaacagacgggagagttgaaagatttaaattttgcgggggtaagattatagatctttcctagtggcaacaggtagtccgtaagttcttttttaataaattatgggaaacaaaagataaaagctgcgttctttcaaccattatgccgataaaattgtttaaatttgcaggaatacttgtacagacactcgatgaagaaaaaatatgttcgttggacattgtggacgatagcatctccgttcattctgttcatcattttatgtatattgatttatttgccacctattcagaattttctggtggacaaagctgctgtatatgcctcggaagctactggtatgaatatctccgtgggacgtatctctttgtcttttccgttgaatctggtggtgaccaatgtagatgctgcttccccgcataatgatacgttgctcagtgtacgccgcctgcaagtgaatgtgcagttgctgccactgctgaaaaagcaggtggaagtggatggcatatccctgcaaggagccacagtgaattctaatgacttgatacatggcatgaagttgaacggtactttgggggaattgttcatttccagtcatggagtggcactggaccccgaaactgccatcgttaacaaagtcttgttgaaagatacggatttatctctttgcctgaatgacaccgctgcggccgatacggctgcaagcgacaccgcctattggaaaataatattgcaggatattgatttacagaatgtatcctttgcgctggatatgcctttggacagcttgtcattggcggcttcgctggataatgccatactgcgcgacgggctgatagacttgcataaatcggtctattcgctgcaaacgtttcggatagagaacggacgtgtgcgttacgataacgggaagccgctggctgccgacagcctgtcctccggactggacccctcccatattgcactgacggatatcggtgtgaaactggattccctatattacgaaggtagaaatatgaaagccataatcagccagtttgtgctgaaagagcgttcgggagtggaaatcgtttctgccacagggcggatggtttccaatgacaaggtgctgcgtgtgccttcattgaaactggaaacccgggattcttatctggaactgaacgctgcgatggattggaatgctttggattttaaggatgaaggcttggtgtccgcacggctgatggctgatataggaaagccggatgtggtgagattcatgggaagtatggatgaaaagtttatccggcagtatccttctgaacccttgcgcatccgtacagggatcgacggtgatttgaacaagctgaaactgactacgctgactgccgagctacccggtgcattgggattgttcgcccggggggagctaacccatctgacagacagtctgctgcgcgggggggatatcactttggaagctgaaaccaaggatttgaagtttgtttccacgttggctgaaggaatagaaattccatacggaacgcgcttggaaggcaaatttacgatggcgggcactaaaatgggcacggacctgctgctgatgcagcccgaagcccaggcggtggttgcggccgatactattcctataacggtttataatgacagcatctccgtagcggatgatttcaagatggaacgggcagcccgtttgtttgccaaatacgacttgtcgcgtgacaggtatgaggcagacttggctgtcaatcattttgacctgcaccagtttatgcctgccgattctttgtacaccttgtccacccgtctgaaagtggagggggaaggttttgactttttctctccccgtacttatttcaatgcggagggcggcatagaccgtttccattatggcagttatcatttgacaggaatttcattggctgccggactggagaaatcgaaggtgcatgcttcactggcagtgaaaaactggaccatggatattaaggcgcatttggatggcatcttgaaacctcatgatgttttgggcgacttgaaaatggatgtggctcatttggattggcaggcgcttcatctgatggatacccgttttcagacctcccagcacttgggtgtccgtttcagcagtgacctcagaaaaaggtatgccgtagaggccgaaatgacgaatgccacgattgtcactgccaaacgcacttcccattccaaggacctgtttgccggattcagcacttccagagattccacttttgcttatctgcgtgcgggggatcttgatttgagtctggaaggagcagggcacatggaatacatttccggcagggcggatttgctgatgaagaaactggcggaacaatgggaaagcaaacatattgaacaggaggagcttcgggaatttcttccgggactatgtctgaaaatatcttccggtcccgataatccgatagccaattatctgtcaatgatggggttgtcatacagtcgtctgtttatggatgtggattcatctccggcagagggattgaacggggaggcttatttatatggattgcgtacagacagcctgactttggataccatttatctggatgtacagcaggacctgaatggcataaatatgttgagcggagtggtgaacggacccaaaccgggacaggaggcgtttgatgtgacgctggagggaaatgtgggaaacaacagcgcccagttgttggttcaatacctgaatgcccgtaaagaacagggagtatatatgggagtgatggccgacctgcgccgccacggcatacgcatgaaggtttttccggagcatcccacgttggtataccgtccttttaccgtgaataaaaataactatatttatttggctgacaacgggcggattcatgcaaatctggatttgcatgacgagcaggggaccggactcagtttctataccaatcgggaagataccatagccaaacaggatatgacggtggagctttcacgcatcaatctgaaagaattccggcgtatccttccctatatgcctgatatggaaggatggatcggagcagaagcgcattatatagattccggtccgtatatgatggtgagcagtgatttgcgtatagatgaattcaaatatgaaggcagtgcgttgggaaattgggaactgggtggtgtgtatctgcccggtgaggcaaaggatcatcatctggatgcctatatacgccatgatggtgaggagatagctcatttgggaggtatctatctgcccgcggaggaaggaacgggaagcctgagcgcggatatagccttcgaacattttccgctaaatgtcgccaatccgtttgtgcccgaccgcatggtggaactggacggggatattgatggaacattgtccatgaaaggtgatccggccaaacccttgctgaatggggaactggcattggattccgtgactttcttcatgccggagatgtctgcaatgttccgttttgataatgaaccggtgcaggtggtgaacagtaagatgatgttcaaggagttcgatatattcaccaaaggcaagactccttttaccattaacggcgaggtggacttctcggatttggaacggacggcagtgaaccttaaaatgcatgccgagaattatgagttgctgaatgccccccgtaccaagcgggctatggtttacggcaagatgtatgtggattttaacgcaacgctgcgcggtcctgtggaggaactggtgatgcgggggaacatgaacatattggggaagaccaatgtgacctatgtcctgaaagactctcccttgacggtgaacgatcgtttgggggatatggtgacttttgtcaatttcaacgacacaacttcggtagaggagtcctctgtccagcaaatctctttgggagggatggatgtggccatgaccatgcatatagaccaggcggtgcaggcacgtgtggatctggtgccggacggctccaactatatgttgctggaaggaggcggagacttgtcattccagtacactcctcagggggatatgttgctgaccgggcgttattccctgatgagcggggagatgaaataccagattccgattattccgctgaagacttttaatattcaaaatggcagttatgtggagtggacgggaaatatcatgaatccgcaactgaacattaccgcgaccgaaagggtccgtgcttcggtgggcgaggatggaaagacttcgcgtatcgtcgggtttgatgtagggatcgctttgagccagagtctggagaatctggggctggcgtttaccctttcggctcccgaggatgcgtctgtgcaagaccagctgaatgccatgtcggtggaggaacggggaaaactggctgtcaccatgctggtgaccggaatgtatatggctgaaggaaactctacgggaggatttaatgtgaataatgccttgaactcattcctgcagagcgaaatctcgaatattgccggaaaagcacttgatatcaatgtgggcatggaaacggtggatgatgccgatagcggcgggaaacgcacggattataatttccagttcgccaaacgtttctggaataaccgcttccgtatagtggtaggcggtaaagtgtctaccggaagtacggtacagcaggatgaaacctttattgataatgtatccatagaataccgcttggacaacagcggtacccggtatgtcaagctcttccacgacaagaactatgagagtgtgctggaaggtgagatcatagagaccggtgtgggtattgtgcttcgcaagaagatgagtcacctgggcgaactgtttattttcaagtctaagaagaaaaaatgattgttggagatatggagagaaaacataacataaacctgcttctattatcggtattgttgctgatgacagctgcctgctctactaccaggaatttgccggaagacgaaacgctatatgtcggtgtgaaaaatatggagattctgaatgaagacaagacccctgccggtgtccagactttggaagaggtggaggctgctttgtcttatcctcccaataatgccattttgggaagcaactccttgcgttttcccattcctttcggtttgtggatatacaatgattttgtgaaataccaggataaaaagggggtggggcattggatcttcaacaagctggggtctactccggtgtatttgtctacggtgaatccggaaacccgtgtgaaggtggccaccaatctgttgcatgattatggctttttcaatggtgctgtgacttattctgtagactcgttgaagaatcctcggaaagccaagttaagttataagattgatatggcgaacccttattatctggactctgtcatgtatctgaaatatcctcctcgcgccgatagtctgatcagggctgcttatgaccagagggtattgcataaaggagataatttcagtgtgttgaaactggaggaggagcgccagcggctgagtacccttttccgtaacaatggttattattatttccgtcccgaattcattactttccgtgcggataccttgcgcaaaccgggaatggtcagtttgcaggttgtcccgaaagccggagtgcctgccgatgcgaaaagaccttattatatagggaatacttctatttatcttaccggatataaaggggaggaacctactgattccatcgtctttccgggaatgactttacactatagcggtaagaaacccggtatccgtcccggagtattggctaagcgcttcttttaccagaaagggcagctttattctcaggcccgtcagaatttcacgcaggaagccttggcgcgtttgggcattttcaaatttgccgagttccgctatgccccgcaagatacattgccggggtgtgatacgctgaatgtgcggatgaatgctacattcgatttgccgtatgacggagaactggaattcaatgtgactaccaaaagtacggatcagactggtcccggagcgattttcagcctctcgcggaagaatttcatgcgtacagccgccacgctttctttccagttgaaagggtcatacgaatggcagaccaattctacggcggatgggaacagttctaaattgaattcatacgagctgggaacttctttctcattggagtatcctcgcctggtgttgccgtggatgagtaaaaaaatgatgcgctcacgatttccgcagcatacctcattcaagttgtatgccagtcagttgaaccgtgcccgcttctttaaaatgctttcttttggtggaacggtgtcatacgatttccagccttcgcgggtatggaaacatacggtgactcctttcagactggcatttaatacgttgcagcatactactacacgttttgatacgatagtggacaagaaccggagtttgaaaatcagtttgggaaatcagtttatcccggctatgagttatacgtttacgtatgataacgccccgttgaagaaacgcaataatttatggtgggaaacttcctttacttcggcaggtaatctgacttcgttggtgtatgctgcttttgggaagggattcaaagaaacagataagaagttattaaacagtccttatgcgcaattcctgaaaatgacatccgaagtgcgttgtttgtttaaagtcggagagaaacagcatatagccactcgtttgatggggggaattttgtatgcatatgggaaccagactgtagcgccttacagcgagcagttctatattgggggagctaacagtatccgtgcgtttacagtgcgctctatcggccccggttcttatcgtcccgaagataaacagtatggttatctggatgaaactggagatgtgaagttggaagcgaatgtggaataccgtttccctatcctgggtgatttgtacggggcagcttttctggacgcgggaaatgtgtggctgctgcgtgaacaaaagaatgaggaaggtgagaatatacgtcccggcggtttgcttactcttcgtaattttgctaaaagtatagctttgggtactggggtgggattgcgttatgaccttactttcctggtgatccgcctggatctgggtattgctcttcatgatccgtatgataccggcaagaaaggatattataatattcctaagtttaaggatggactgggattgcactttgccatcggctatcctttctagaaatagggcttgatttgcgtcaaaaggagggaaatgattgatttatgctcgaatttgaatggaatgtagcttttttcctccgtattattttgtagctttgtaccatcaaatattcaattttaaataaataaactatgaaaccaactttatttttattggcggctggtatgggcagccgttacggaggattgaagcaattggatggtctgggtcctaacggcgaaactattatggattattctatttatgacgctatcaacgccggctttggaaaactggtctttgttatccgtaaagattttgaacaagattttcgtgaaaagattatttctaaatatgaaggtcatattccttgcgaattggtattccaggctttagacaatctgccggagggttttacttgtcctgcggagcgtacaaaaccttggggaactaaccatgctgtcatgatgggagctgatgtgatacaggaaccgtttgcggtgatcaattgcgatgacttctatggccgtgactcgttccaggtaatgggcaagttcctttctgcactgcccgaaggtgctaaaaacacgtatgctatggtgggcttccgtgtaggaaatacattgagcgagagtggaacggtatcccgcggcatctgtggaaccaatgcggatcatttgttgacttccgtggtagaacgtaccaaaattcagcgcatagacggagaagtgaagtatattgatgacaatggcgaatggacagctacccctgacacaactccggtgagcatgaacttctggggctttactcctgattactttgcttacagcaaggaattctttaaagcattcttgagcgatcctaaaaatatggaaaacttgaagagcgaattctttattccgctgatggtggacaagctgattaatgacggtactgctaccgttgaggtattggatactaccagcaaatggtttggagtaacttatcctgaagaccgtcagagtgtggttgacaagatacaggcattggtggatgccggtgaatatcctgcaaaattattttaagatgagaggtagtgtagtcacacttatataatttactttcgggggctgtccgttttttttcggacagcccccgttggattactattttttatcttctgttttcattattgcatcttgtattcgctgggagataacccggtatggtgcttgaagtatttgccaaaaaaggaagggttcgggaagttcataaaataagctacttcctgaatagacatgacggagtatttcaacagcgctttggcttccagtatcacatattcgtcaatccactctccggcagtttttccgcttactttctttactacggtggagaaatgtttgggactcaggaataattgctccgcataaaaatctacgcgtctttctttacggtgatgttcggtcagcaagttgatgaactggttgaacaatacctcttcccttttcagtgatttcggattctcggaaaggaattccggttgttttctatgaaggatggaacctatcttatataaataggcccccattagtctgcgtacgatttctgtcctgaagttatcgttccggcttacggtttcttctatcagttcatagaatgatttcagttcctgtacctcttcttccatcaaatgaaatttgggattctctttcaatgagatgaaaaatggcatgaaactgttcaggttgatatacatctcttttaagaaatcagatgatattaaaaacatttgtgacaaatgaatgcccggtgataacatggactgtagaatatcgccgggagcgcaaataatcagatcgttttgctcaatgtcgtattcccgtaaattgatattgactttggcagagcctttttcacggatagagataatgattccatccagccgtaatgggtatttaaagatggggttcatattctcggggatgtaatgttcgcttctatccattacgaaatcattgttaatcccttttagactgggattcatctgtcggatacgggctatggatatatttcctatttcatgttccatatttcttaattttgcctcaaatgtataaatcaaaagtcaataatccactctttttttctcataatattattttttaattgaaattgacggatgtgaattcggaggcgtgtgatggcaggaattcttaattctatttaaaagggggatgctggcaaactatttgtacataataacgtgtatatttaacaacagaattataaagaacaaaactatgtcaatgtattggatcttatttattggaatcgcggtaatcagctatattgtacagaatagtctgcaaagcaagtttaagaaatactcgaagatgcctttggccagcggtatgacaggaaaggatgtggctgaaaaaatgttgcatgataacggtatctatgacgtgcgtgtaaccagcactccgggtatgctgaccgatcattataatccggcaaacaaaacggtgaaccttagtgaaggggtatatggaagcaacagtgtggctgctgcggcagttgccgcccatgaatgcggacacgctgtgcaacatgcgcgtgcatacgctccgctaaagatgcgctcggctttggtgcctgtggtgcagttctcatcttctattatgacttgggtgttactggcaggtattttgatggtgaatactttcccgcagttattgttggcaggaatttgtctttttgccatgaccactcttttcagctttattacgttgcctgttgagatcaatgccagccagcgtgcgttggtatggttgagcaaggccggaattacaaattcatataaccatcatgcggcagaggatgcgctgcgttcagctgcttatacgtatgtggttgcggcacttagttcgttggctacactgatttactatataatgatttatatgggacgtcgtgactaagaccttataagggaaatatatttttattatagaaggctgcctgcgggcagccttttctagttatattttgattagtttcgaaataatttttgttttaatctctttttcttttcgttttaatttgtatttttgccctgtcagcaaaatgagataatacctatgaaaaaacatttgggagccatcaaatacttggtcatttagaataatttgatgatgagaaacacaataaagttaaaatatatatggtgtactttgtttttacttcttcattggggttttgtcaaagcacagcctatttgtgttgcacgccaatatacagtgagagacggattgattcaaagtaatccggcgcagattcttcaaagtcataatggttttatatgggtcagtacttggaatggggtaagccggtttgatggacgcgatttcgaaacttttcagtttgattctcttttgaaccagcacatgcagcggctggagaatacggccgacggcaatttatggatgattgcatacgatcgtcatagcctgtatttatatgatattcgtgaaaataagctgatcaatgttctgaaacagtatgaacaacattttaatactccgttgcaaatagaaaatttgtatcctttatccaaagggattacttgggttactttaaataatggaggatgtttcagaatttcagataaagagtgtactgtttcttcagggattcagtatattacagctattgatgatgtggaactggggaaagtcagtagggtctttgaagataaacagggagaggaatgggtatttagtgacaagggagttagcatatttggcaagcggaccattagttcatatcccttttctatgttcgaaacaatggataatcttgtttttcttgcatcacagaatggcaggctagcctattatgatgtaaataccatgcaattcaacattgttccttttcaagagaagattcagcatataaacggaattaaagtgttgaaagataatcagctggctgttttgtctgataaaggtttgtacctatgccgtttccctgaactggcgatggagaaatatgatttctctcttccggggcgtgatgatgcggctgtgagaaaagtctatcaggattctaaaggatttctatggatatttaccggattgccgggaattatccggcttgatccggaaaccggagtgaaacaatatttgaatactccttccggatacatggcttcttctccggaaaatgaactctttatttatgaagatcctaacggagtggtttggactattccttataaaggtatattcagttattatgacgaaaagagccgggagctaaaagtctattttacaccgggaaggaatcatataccttattctcctattattaaaacaacttatgttgacaaacaaaataatttgtggatcaaatcccagcgctcatttataaaaatgttctttccgcccagtccctatacttatagggagttggacaattattttgatacaaaatcatttctgtttgatagcgacgaacatttatggattgcaacaaagaaagggattatacgtattatggattcacagaaaaacttgttgggttatttgtcgcccgatggggaactgactcaaacggaaacagtttttgcagaaggtggaatctatgtcatgctgaaggatcaggcgcagacaatatggcttggcagtaaggaaaacggattgttcagacttgttcctcggaatcgtccttatcattatgaagtatatcattatatgaataatccgtcggatccttattccatcagtgacaataaaatatcatgcatcgatgaggatcataacggacgtatttggattggtacttacggtggcggattgaatttggttgaggaaaaggaagatggggcgatacgttttattcatgcggagaataaattgtccggttttcctattaatcgtaccaacagtattcgttgtatggtggagggacccggtcatactatgctggtgggtactatagaaggtttgatcactttttcttctgatttttcggattacgaaaatattcgtttttatcttaaccttcctcgtccgcaggcggctgacggattgtgtagtgctgatgtgatgtctgttttacgagcgacggatgaaactatctattgttattgttatggaggtggcctttgtaagttggtttcgtcaaatttattatctgatgaacttcggttccggtcgttcggcaaagagacatctccgttggctagagccttgattgaagataaaaatcataatatatggatcggctcggaaacggatatcactctgtttgatgtgcacgatcagacttttgagtcttttggagaaacttttttcaatcgctcttttaattatagtgaatgtcttccggttacagacaggcaaggggatatcttaatgggtacagaaggcggtatgcttgtcttttctccggatagtatcgttaagcagacttatgaagctcctattgtagtgacaggtataaaatattcggaggataatttgtctcatgtattgagtgatgcggattatttagagatccctacccggcggaggaattttaccatctcatttgctgcgttggattatactaattccttggatatcgagtatgcttataagttggatgataatcaatggtattatataggtaagaagaactcggttagttttgtaagtcttccggcaggaaaatatcaatttcagataaaggcgaccaatggggatggtatttggatgaacactgtgaaaacggttactttacaggtattacccaccttttgggaaaccggttgggctaaggctttttatctagttgttgtcttggtgatatctttagctatcggatatgtttttttctatatttactatttgaagcataaggtaaatatggaacaaagattggcggaaataaaagtacgttcttttattgatatctcacatgaactacgtactcctttaacccttatatccggtccggtatctgaagtgttgtcccaggagcctttgacttcccggacccggcatcatcttcaattggttcagaaaaatatcaatcgtatgttattgctcattaatcaagtattggatttcagaaagatacagaataaaaaaatgggcttgactattgaataccgggatatcattatcatgcttcataatataatggataatttccggttgttggcaacagaaaaaaatataaatttttctcttcagacaacgttgccttctgtttttttgtggatagatagtgataagttcgagaaaattatctttaacttgctttccaatgcctttaagtatacaccggataacaagtcgattaccttgattgtgatggaaagcggacagtttgtttcgattgccgtaaaagatgaaggtattggcatctctaaagataaagtgccatccatatttgaacgtttcactacagtgtccaaggaaaatgatatgcagccttcatcgggtatagggctttcgctggtgaatgagttggttaaaatgctgcatggggaaattcaggtcgaaagtgaagtaaagaaaggaagtgtattcaaactggttttgcataaaggaaaagaaatatatgctcaggataaaaatgttgaatatatattgaacgacacttcggaagaacaggaaacggtcttggcggaaccggaacaaaatgataaaacatctttgccggacatgcctccggcaacaaaagaaactttagtaaaagtgatggtagtggaggataatgcggagttgcgtcaatttatatgtgaaatattgtcgggcacttaccgtgttgttggagttgccgacggggtgatggcattggaaaagatagaagaggaaattccggattttattattacggatattatgatgccgcgtatggatggtattgaattgataaggcacatcaaggagaatgtcaatacctgtgatatccctcttattatcctttctgcaaaatcgtctgttgaggatcgtattcaatgtttacaattagggattgatgattatatacctaaacctttcagcagcgattatttaaaatcgagaattgagaacttgatcaggcaaagaaaagtgcttcagtcggcttttttgtcaaagtatggtgctcaaccgaagaaagaacctttagaagccgtcgcttatcctgtgtcgcaaattgttcctttggacgagttgtttatgcagaagctggtaggatttatggaagagaattacagtaatccggggctgcgggtgaatgatctggcagagttcatgaatatgagccgctctgtattcaatcggaaagtgaatggtatcatggggatttctccgatagaatatataaagaattataggttgaataaagcgaaaagttttatacaaagtggtatgtctttctctgaggtcgcttttgccgtcggcttctctgatcccggttactttggcaaggcgtttaaaaaagcatttaatcagactttgactgagtataaaaataataactaagttccgttttgtgctgtttatgaaggtaaatagcaagaaaataccttattgacgtaagattttacctttggctctcaagggtaaaatctatctttgtgctcattgacacagtatgaaaatgttccggaaaacttttatgagtataatttttaaaacatgataggatgagtacaaaattttatgtaatagctgtttggacgctgttaagttttgtggtaaaagtaaatgcacaagacaaagtggaatgttgggaccggtttgagttgagttttaaacaggtgaccaaagggaatccttttgatacacgtctttccgctactttcgtttgtggaaaggaaaagaaaacggtggaagggttttatgatggtgagaatacttataggatacggtttatgcctgctgtcgccggggaatggaggtatgttacatcttccagtataggggctatgaatggtcggaaaggtacattcacagtgatacctgccggaaaagataatcatggcatggtattggtggacggagaacataattttaaatatgcggacggtacccgttattatccgatgggtacgacggcctatgcatggacacatatgaaggaaacgactcaggaggctactttgaaatcgtttggtgaagccggttttaataaggtaaggatgtgtgtgtttcctaaaaactattctttagtgaaagacgagcctgcgctttatccttttgaaataaagaagacgataaaagataaggaaggaaatgaaaggaaagaatgggactttgacagatttgacccggctttttttcagcatttggagaaacggatagaccaactgaaccgtttggggattgaggcggatttgatccttttccatccttatgataagggaagatggggctttgatgctatgtcgaatgaggtgaatgtacgttatattaaatatattactgctcgtttggcttcttttagaaatgtatggtggtctatggcaaacgagtgggattatgtaaaagcgaaaactgtggatgattggaagctgttgacaaaaactgtggttgagaatgatccttatcgccatttatgttctattcatggagcgacggctacttattttgattattggatgcctgaatttacccatgtcagcattcaggatgaggcaccggtgctgagttctaccgcttctgctactttaagaaaaatttatcgcaaaccggttatatgtgatgaggttgggtatgaagggaatctaccttatcgttggggaaggttaagtccgcagcagatgacttgctttattttgaatggtttgttgggtggaatttatgtcactcacggtgaatgttatcagcaggggaacgaacctatcttttgggcgcaagggggatctttaaaaggtgaaagctggaaacgtgtgaaatttttaagaacgattattgaagctgctccccatccgttggagatggcagatatcagtcgtgacttggttacttctactgctggaccagattattatctggtcaatatgggaaaagatgtgaaaggtttctggacttttaatctgccggtaaaaaatgcggattataacaaattgcaaaagaataaacagtttaaagtggagattattgatgtgtgggccatgactgtcacggaatatcctgtgatatttgaaacaacggaggaattggattatcgtgtttttgatatacatcatcggggagtaagaattccggatgctccttatattgttcttagaataacagaagtgaaatgatgggataagccttctgacgggagatgattgattttttttatcataaaaaaggctaatagttttcgattctttttgttttagcttaaatttgcggtataattaactccctagatacactaaaatgttaaatacagtagaagaaggattggaagatattcgccaaggcaaagtattgatcgttgttgatgacgaagatcgtgaaaacgaaggcgattttatcgtttcaggagaaaagattactcctgaaattgtaaattttatgattactcatggcagagggttgttatgtgctcctctgccacgttcacgttgtgaagaactttgtctggctccgatggcagaagaaaacacttcattgctaggtacaccgtttactatgtcggtagatttaagagggtatggctgtactacgggagtttctgctttcgaccgttcgtcaacaataaaagctttggtggcaggaaatctgaatccttccgagtttgctcgtcccgggcacgttttccctctgtatggtgcggaaaatggggtcttggagcgtaatggacataccgaagccacactggatatgacaagaatggcaggtttgaaacccggaggagctcttgttgaaattttgaatgaagatggtacaatggcgcgtcttccccaactaggtgagattgcagcaaaattcggtttgaaaattgtttccattaaggatattcaggaatatcgtaaaaaacataacctctaaatctaataaatatggcactcaatcaaagaagagtaaagatattgcatctgattcgtgaagacgggcatgcaaaagttcaggaccttagtaaaattttcaatgtgacggatgtaacgatccgtcaggatttggaagccttggaacaaatggggtatatccaaagagagcatggaggtgcgtttctgaaaggagtagggtcgtttgccaagaccgggcaattgttcaatcagactcatttggaggaaaagaaagaaatcgctcagaaagctattcagtttattcaggagggggacagtataattcttgattccggttctacaactacagagatcgcaaagcttttaatgaattataaggacctgacagtcattaccaatgctttgaatatagctttgattttaggtgagaatcatggtattaatctgattgttaccggaggtgaattcaaggctcctacactttctttgacaggaaaaatggcggccgattcatttaaagatatacgcgctaataaattgtttctggctacggccggtatttcttcggatatgaagctgacttatcctagtctaagtgatttggtcgtgaaatctgctatgatagagtctgccagtaaagtgtatctggtggctgattgttcaaaaataggtgtcagtgcttttgctagtttaggctcggtttcattagcaaatgctattattacagatagtactataaccgaagaggattttgaaagattaaaagaattagaggtcgaagttatctgattcttactgaaacaaaggtaatatgggtgattgagaatgttggaaaatacattcttgatcaccttttttatcaactttgattttacttccttatttctccttattgtttgcttctttttttataacagttctgttgggtacaaaatagacaatcggagagtcttgtttatatagagatataactttgttagcagaataaattaattgtcctgatttatagattatttaggcgtttattgttaatataatcaaatttattttcattttatttcgttttgtattgaatgtttccagttaaattccgttatttgcgaaaggataagaaagtaaatgataataatatgcaagttgaaacgttagaattacaatcggaaaagaatcggaaacggttggttgagattgtgtataaagcaaaagcaggacacattggaggtgatctgtcgtgtcttaacgtgcttacagcactttattttgatataatgcgtgtttggccggataaaccaaaggaaacgaaaagagatcgttttgtaatgagcaaagggcattgcgtagaagcgttatatgttacgctggaagcaaaaggtttcatctctcgtgaggtaaccgacacattaggagaattcggatctatcttgtccggccatcctactatagaggtaccgggtattgaagtaaatacaggagctttagggcatggcttgtctgtaggtgtcggaatggcgatggctgccaaaatggataaagctgattataaaacgtatgtattgatgggagatggtgaacaaggggaaggttctatatatgaagctgctatggcaggaaaccagtataaattggataatctggtagccattattgaccgtaatcgtttgcagatcagcggtacaaccgaggaggtcatgtcattggagagtatgcgcgaccgctggactgccttcggttgggatgtattggaaatgaacggagatgagatggaagatatcatccggactttccgttctattgattatacgaataaaaagcctcatttgcttatctcccatactacaaaaggaaaaggagtgtcttatatggaaggcattgcaaaatggcatcatggcgtgcctacagccgaacaatatgaagaggctgttcgcgaggtatccgaaagaattgaaaaactagaaaaagaaaacaatggcaaataatatgatagcgtgcagaaagagctttacagatacgttgctggagttggcgcgtcaggataaagatattgtggcggttacaacagacgccagaggatctgttactttgggggattttgcaaaagaattacctgcacagtttgtagaatgtggaatagccgaacaggatgcggtaggaatatcagcaggtttggcacatagcggaaaaaaagtgtttgtatgtggcccggcttgcttttacgtggcacgtagcttggagcaggtgaaggtcgatttggcttatagtcagaataatgtgaagatactcggagtaagtggtggagttgcttatggtgctttgggggctactcatcatagcctgcatgatattgccgtattaagaacttttccgggaatgaatatcgttcttccttgtgatgcccgtcagacacgcaagttggtcaaactattggtagattatcctgaaccggtgtatgtacgtgtaggaagagctgctgttcccgatgtgtatgagaatgatgattttgattttgttctgggaaaagctaatatgctgctgaacggtacggacctgaccatcattgctgccggagaaacggtttatcatgcttatcaagctggtttgatgttacaggagaaaggcattaaggcacgtgtgttggatatgtcttccatcaagcccgttgatgcggaagccatcaggaaagcggcagaagaaaccggaagaattatcactgtggaagagcatagtcagtttggtggtttgggagctattgtggttgagacgctttccgaaaatccgattccggtacgcattatcggcatccccgatgagaacgtggttcatggaaactcccatgaaatctttgcccattacggattggataaagagggcatctgcaagactgcccttgaattcgtgaaaaaataaacatatcctttttaaatctaatagtatgattagcagaataattaccatagatcaaagtacttcggcaacaaaagccatgctgttctctgaagattgcgaattgttgcatcgggtaaatatagaacatcagcaattctacccgcagataggatgggtagagcatgatgccgaagaaatctataaaaataccatagaagcgatacattgtctgcttgaacaagaagaagtgaatggaaaggatatttcttattctcttgccatcaccaatcagcgcgaaacggtggttgtttggaaccgacataccggcaagtccgtttatcatgccgtggtatggcaatgccagcggggagcggctatttgcaaagaactgaaagataagggatacagcgaactggtacaacgaaagaccggattgcttatcgatccttatttttctgccagtggtgctaagtggatattggataacgtggaaaatgcacgtgaactggcagaaaaaggcgatttgttgatgggaactattgattcctggctgatttggaaactgaccgaaggcaggaagcatctgactgattatacgaatgcgtcgcgtaccatgctttttaatattcatactttggactgggatgaagagttgttgaaactcttcactattccccggagtatgatgccggaagcgttgccctgtgatgctgtttttggagaaacaacgatagagggtttgttcaaatctccgatacaaatagcaggtgttttaggtgattcccatggagcattaaccggtcagatgtgttttgaggcaggtatgggcaaggtgacttatggaacgggatcatctgttatggttaacattggagaagaggctgtcgctgctcctgaagggctggttacatccgtcggattctcggctttgggtaaagtgtattatgcttttgagggcaatatccattgcaccggagccactatcaaatggatggtggagaaattgggattggtggactcgttcaatcaaattgaaaccttggcgacttcggttaaaaacaatgatggagtctatctggttcccgcctttaccggattgggagctccctggtggaaaccggatgctaaagctgccatctggggaatgacactgaatgctggaaaagcgcatgtgctgcgtgcaggattggaatccattgcttatcaagtgaaggatttgatagacatgatgacccggcaggcaggaatcgagctgaaagcgttgcgtgttgacggaggccccacgaagaatcagttcctgatgcagtttcaggctgatatgctgcatgccgtcattaaccgttcggagatagaggaagcttctgcattgggggctgttgtcatgaatggctttgcccgtaagaagtgggccagtttccaagaagccgctgccatgcgtaccattgacaattgcatcgctccctgtatggaggaaaaagaacttcaatctttgtatagtggctggcgtgaggctgttaagaaagtaataggacagaataactaactgaatatatcgtaacttttaataccattagaaatgaaaaacaagaaaaaaatgtgttttggtgtcatcattggaacacgcgcttattttaactcggaattagcaaaagatgtccgtaaacaattgttggaaacactgacgaaagagggctatgactatgtcattctccccgaagatgctacgcctacaggcagtagcagtattgaaacaagagaagatggcttgaaatgtgcaaagttgttccgtgagaaccgtgaccgcattgatggaatcattgtttcattacctaacttcggttttgaaatcggtatcatcaatgctatcagtgtagccgatctgaatgtgcctgttttggttcaggcatgtgatgatgagaatgacaaggtggatttggatagccgtcgtgacgcgttctgtggtaagatttccgtatgcaataacttgtatcagtatggcattccttttactgatactacactacatacttattctatttattctgatttgctggcagccgatattaataagttcgctgcgatctgccgggtggtgaatggtcttcgtcatgctcgcatcggtgccatcggcactcgtcctgccggtttccagaccgtccgcgccagcgagaaactgttgcaggcatcgggcattacagtcgttccggtagatctttctgaaatcttgtctgccgcccgtaagattgaagatgctgatgaaacgttacaagcaaaactgaaagaaatcagacaatatgctgctgttcccgaacaatacaatgataaactgattttgcaggctaaatttggtgtggctgtagaacaatggatggaagccaatgaaattgatgctgtagctatccagtgttgggactctttggagcaaaactatggttgtgcagcttgtgtgactatgagtatgttgagtgaaaaattaatccctgctgcttgtgaagtggatattgccggtgcagtgtctatgtatgcgttgacattggcttccggtcgcccgtcggcattgcttgactggaacaataactttgccgaggatcgtgacaagtgtgtgtgtacacattgtggtaacttccctaaatcatttgtaatgaatgatttgaagttaggaacattaggagtgttgggcagaacattaggtaaggtacatactttcggtgccgtttacggtaaagtaaaacagggtgatttcaccttcttccgcatctcgacagatgatacgaagggttgtatcaagtcttatttgggcaaaggtgacctgaccgatgacccatacggaatggatggttgtatagcagtaaccaaggtggataatctgcagccgcttatgaaatatatttgtaagaatggattcgaacatcatgtggctatgtgccgtggcaatgtgaaagatattttggcggaagctattgaaacttatctgaactggaatatctatattcacgaataatatcgatgaaatatgatattggtagataattactttttggcaatcctctgctgtgttatttgctgtgcctgctggggctcttgggcaaatacgcagaagatggttgccgccaagcaatggagctttgaactgttttattgggatttgaccgtcggtctgttccttacagctttattgggggcggtgactttgggaagtatgggaagtgaaggccgtaccttttttcaggatttggcagtcatggactggtctagcattcaatatgcattcttgggcggtgttgtgtggaactttggcaatatatttcttaccgcagccattgctgtagccggaatgtcagtaggttttcctatcggtggaggcttggcctggattggaggtattgtattcaattatttattaatctctttggccggtcagacctatcagggaaatcagcttttactatggagtggtgtgttagtcatcattgtagctatactgatctgcggaaaagcgtacggaaagttatcgtccggcaaggcttccactccgaagaaggggattctgctggccattatggcaggtatcgctatcatgtttttttacggattggtagtgaaatctcttgacccgcagtatgtggcgggaggaaccggaacgctgactccttatacaggtgtgttcttctttgcggtaggtattctggccagcacacctatattcaatacctttgccatgaagcatccggtagaaggcaaggcggtgaccatgaaagattactttgccggcgatgccaagacccatctcacaggtatgctgggaggctttatctggatgggcggcatggtgattagttttatgggagcaggtgctgccaatccggctatctcttatgcccttagcaacgcagcgcctgtggtggctatgatctggggagtttttgtctggaaggaatttaaggaagctccgaaggggaccaataaactgattgcggctatgttctccttatttattatcggattaataagcattactttgtcaaattaaaaattagatgaagagaaattataaaatagggcttgtaatgaagtcgttacaagccgattttttcaaagtgatgaaagaaggggccattcagtatgcggcccctcttccgtttttggatttggtttgtgtgggaacggctacacagacagaggtaaaggaacaggttgacttgatgtattccttgattcatcagcaagtcgatgctatcgtattggttcctatagattcaaaagccttagttcagcctgtagtagaggctgtcaggaaaggagttccggtaatcaatattgatatccggttggatactcagctattggagcaggcaggagtagaagtggcttttgtgggaccggataattttgcagctgcgtatgaagtgggtaaattattggataagaagttgcggaatgaagataaagttgctattattgaaggattggcggcagccgataatgcgcagcagcgtaaaagaggttttatcaaggcgatagaagaaaaagggttaagattggtggcgtccgaaccggccgactgggaaacggagaaagccgccgaagtttttcaggctatgtggatgcggtatcctgatttgaaagctgtatattgcagcaatgatgcgatggcgttgggggttcttcagcagatgcaagaaaaaaattgctatctgcctgtagtgggctttgataatgatgcggtaatgaaagaatttctttctacgggaaaactggttgcaacagctgatattttcagctcacagatggctgtccggggcattgagttcgctttggatgtattggagggaaaaatagagaatagaggggttcattctacagcttacgaaattattaaacaatgagttcgtagggaaacggcccatactgagatatgcacttaaggcaccggctgtttaacttcttaatattgccggcaatgagcaatattaagaagtattctttttacgaatgaaatatttagtgtaattttgtggctcaaaataaattaaatagaatcattatggcagcaaaaccaggtatacctaaaggaacgagagatttttcgccggtggaaatggcgaaacgtaactatatattcaatacgatccgtgatgtgtttcatcttttcggctatcagcagattgaaactccttctatggagaatttgtctaccttgatgggaaaatacggtgacgaaggggataagttattgtttaagatacagaactcaggtgattatttcaacggcattaccgatgaggaattgctgagccgcaatgcggtaaagctggcgagcaagttctgtgaaaaaggattgcgctacgatctcaccgtaccttttgcccgctatgtggtgatgcatcgtgatgaaataagttttcctttcaaacgttatcaaatccaaccggtttggcgtgcggatcgtccccaaaaagggcgttaccgtgagttttaccaatgtgacgccgatgtggtaggcagcaattctttattgaatgaagtggagctggtacagatgatagaccgtgtatttggtaaattcggagtacgtgtttcaattaaaatcaataaccgtaagatattgaccggtattgccgagattatcggggaggctgataaaattgtagatatcaccgtagccattgacaaactggataaaatcggattggaaaatgtaaatgcggaattggcttctaaagggattcctcaagaggctattgataaattgcagccgattattttattgagtggaagcaatgaagagaaattggaaactttgaagactgtccttgctaccagtgaagcgggattgaagggagtggaagaaagtgaattcatattaaaaaccgtgtctgcactgggtgtgaagagtgaagtggaattggatttgactttggctcgcggcttgaattattatacaggagcaatttttgaagtgaaggccttggatgtgcagattggcagcatcagtggtggtggccgttatgataatctgaccggtgtctttggtatggacggtatgtctggtgtaggtatctcttttggagccgaccgtatttttgatgtgttgaatcagttggatttgtatccgaaagaagcggtgaacggaaccgagctgttgtttgtaaacttcggcgataaagaggctgcttattgtctgcctatcctggcaaaagtccgtgaagcaggggtgcgcgctgaaatttatccggatgcttctaaaatgaagaagcagatgggatatgccaatgacaagcagattccttttgtcgctattgttggtgaaaatgaaatgaacgaagggaaactgactttgaagaatatgactacaggcgagcagtcactggttacaccggatgagttgctggcggtggtgaaagcttgatgtttactaattatctgcaatcatatcataaaagcatcattgatggatgattgcatcacatgggaatgtccgataacgtttgctttatacgttatttgttttgaaatataaatgctggattacctatgtggataatcagattgttttttcttccgtcactacatcttactgattctaaaagagatgtagtgacggaaatttttgtatccccccgaaatggtttgttctcttttttccgcgtagaggcgacaaagcggaatgcctgttcttgtcgttgttggttgtatttcttgttttaaggatgaaaactgatggagctgacttgaaatatgattttcttttgcgagagtctgatattattcactatatttgtggaatgctagccttataaatttaatcagatgatagaggaaaatcagttgatatcccatttgtatcaaaatagggataatggtcaatggatgatacaaaccaatgatgaacatcaaaagggggttgctgatatggcggcatccttcgccgggcagttcggacttccttcttgggggcgtgcgctcggcctacttcatgacaaaggaaaggaacgggcggcattccagcaatacatacgcaagatgaatggtttgcctacgagtgacaagaagcgctatgatgatcatacccatgcttttgtgggtggaatattggcaaaagaacttatgggaaaggatgtttcccatcttcttgtaaaccaaattatttctcatcacacagggttacatgatttcggggatgtggaaaacatattgaaagagaggctattgtccaaagaaataaacgagggtgacattagcataaacaaacctttattattccaagaatttattgattcacctttttctaaatcaaaggttgaatggaaacactttcatcacctttcccgtatgcttttttcctgtcttgtagatgccgaccggctcgatacagaacggtttatggatgtagagtcatggcggaagcggggaaattcggctacgcttgccgatttgcttccacagctggaggcatatatgcaaaaactgcaatcgaatgcagccgatacgaaagtgaaccgcatccgccagcaagtgaaagaacaatgcagtagaacttcttcaagcgaaaaaggattttatagtcttacagttccgacgggaggcggtaaaacactttcttctttgttatgggccatgaagcatgctgtaagccattcaatgaatcgtatcatcatcgccatcccatataccagtatcattgtgcaaacggcagggcttttgaaggaaatctttggtgaagaaaatgtattggagcatcatagtaatttcgaccccgatgatattaaggacgaggaaaatagggaaaaagcaaaattggctacagagaattgggactatcccattattgtcactaccaatgtacagctttttgaatctatgtttagcaataaaacatctgattgccgcaaactgcacaacatggcaaattcaattcttgttttggatgaggttcagatgttgccaaccggcttcttgcggccgatagtcgatgcgctgaaagcgtatcaggaaatgttcggggtttcggtattgtttaccacggcaagccagccggtactgagtggtctgatagaaggaacaaatcctaaagctgattttaagggaatagaacatatcaaggaaattattccggaagaatttgctttgcatgaccagcttcgccgtgtgaagttgtcaatcgatgatacaggaaaaacatacgatgagatagctgcaaaggtgtctgaatataataaggtgttgtgcatagtgaacactcgtaaagatgccaaagagctgtatgaccgtttgcccaatgacggagtgaaattgcatttgtctagaatgatgtgccctgcccacttacacgaaactattggtaaaataaaaattttattgaaggatgagtcgcagccgattgtcagggtcattgcaacccagcttgtggaggccggtgtggatatagactttccggttgtgttccgtcaagaagcaggactcgattctgtattgcaagcagcgggacggtgcaatcgggaaggacgaagtgccatgggacatacatttgtgttcagtctggcggcagagaagcgaaagctcttcggttcaatggctgactccaacaatgctcggttgaatttgccggaagatagtgattggtttgctccttctaccatgaaagcctatttttgtcaattgtatagcagaaaacaaacatttgatgaaaaggatataaagcactggctctacaaacctactgagttatgttttgaaactgcatcaaaagaatttcacctgattgatgatacgagtataaatgttatcataaattgggaaaacagcatggaacttatagagcagttgaaagaatcggggtgtacctactcgttggtgaagcaattggcgaaatttactgtaggcatccgttcctatgattttaagcaactgaaaggctatgggcttgtcgaagaaatattggaaggaatatatgtattggcagacaggtctcagtataataaagccacaggtctcagccttgataaccattggctggaggaagtattaatgatataaagaaacggatatgacaaagaaagaaacattgaaattgtttgaagaacgtaaagtccgcaccgtgtgggatgatgaaaaggaaaaatggtatttttcgatagttgatgtggtgtcagttttaacagacagtgttgatgcaactgcttattggcgtaagttaaagcaaagacttaaagaagagggaaatgaaaccgtgacaaattgtcacggtttgaaaatgaaagccacagacggtaagatgcgacttacagatgtggctgatacagaacaactactacgtatcattcagtctatcccatctcccaaggcagaaccgttcaagcaatggatggcacatgtagcatccgaacgtcttgatcagatgcaagaccctgagttgagtattgagcaagctatgatggactacaagcgacttggttactctgacaactggataaaccaacgcttgaagagcattgaaatccgtaaagatcttacagatcaatggaaactacataatgtagaggaaggtgttcaatatgctactcttacagacattatctatcagcaatggaccggaaagtcggcaaaggagtacaaacagttcaagggcttgaagaaagaaaatctccgggacaatatgaccaatgaagaattggttcttaatatgctggccgaactctctacgacaagtattactaaagctaaaaatcctcagacattgggtgaaaatatgcagtgtgcggctgacggtggtgatgtggctcgtgtggcacgcgaacagttggagcaaaaaaccggtcgtgaagtggtaactcccttgtcggcaaaaaggttttttgaaggtcagaagccggaagatttattggaaaacaaggaaaacgatgaatgatatggaatatacagataaagaatattgtctggaggtgtggggcgattgggcttgtttcactcgtccggaattgaaagtagagcgtgtgagttacgatgtcataacgccatcggcggcacgcgccatctttgaagcgatactgtttaaacgctatgccatgcgttggcaggtaacaaagattgaggtactcagacctattaaatgggctaccattagacggaatgaggtgggggcagttgccagtaaatcacctatcattattgaagataaacgtcagcagaagaacacgttgcttctgttggatgtgcgttaccgaatttatgctaagttagtatttattccggtaaaagaccgtccgaaagaggcttttgccaagcatcagccaagtgccgacgagaatcctatgaagtattatcagatgttcgaacgcagggcatcacaagggcaatgttttacgcagccctatctcggatgtcgtgagttttctgcaaactggaagtatattgaaagtactgataatcttgattatcccttagccgaagacagggatttcggcattatgctttatgatatggactttgaggaaaatccacaaaaaccgaatgctatgttttatagagcccaaatgaaaaagggagtgattgttgtaccggataaagatagtgaggaggtgttgagatgatactgaaagcattatatgattactatcatcgaagtggagatgatgtggccccttttggtttagaatacaaagagattggatttattattgttattgatagatgtggaaaatttctgcgctttgaagacaggcgcatagataagaagtcggcacagcggtttcttgttaagaaaagtgttagccggtcaagtgcccctgttgcaaactatttgtatgacaattgtaaatatgtatttggttattccgataagggggatatggaaaagatacgtaagtactttgaagtatttaaggcgaaagtaaaagatatatatgatgcttttccggataatgaggacataaaagctgtttatgcattttatcagcaagaccattcttttatagttggggctatgcagaaagattctttatgggatgatatagccaaaaatcttaataagaaatattctaccttttctttccttatagaaggggatacgaaaatagtggcttcgaaaagggaattgataaatttgtttgacgagaatcatggcgtggcaggaaatctttgtttgataacagggagatattcaaaagttgtagagattacaactgctacaaagatacttggaagccaagaaacagctaaactagttgcatttcaagttaattccgggtatgattcgtatgggaaatctaaaggatacaatgctccaatatcagaagaagctgaatttgcatatacaaccgcattgaatcatttgctgcgttcggattctcacaataagtttatggtgggctcacgtacttatcttttctgggcttcctccaatagcgaggcttcaaaagagtccgaaaatagtctattttctttgttggggcggattgaagaagaaaatgacgactcaaacaggcgcataaagttagtatatgatactttccagtctatctataacggaaaattatcggcaaacgatgatgacaaattcttcattttgggtttggctcctaattcggcaagaattgcggtagtatattggaatgagatgcctttgcgtgaatttgcaggtttgataagtaaacattttacggatatggagatggttgacactcgcaaagataagaagccgtacgtgggaatgcattccattcttggaaatgttactcttggaggaaagtcaagtgatgcgactcccaaccttcctgatgctgtggtgagaagcatatttcaagggttgccgtatccggcttctctctttcaagcatgtattcgtcgcatacgtgcagaacaatccgtcaatatagtgcgtgctgctatcatcaaggcatatctcaacagactaaacgaaaataacaaccataaaaaattagatattatgttagacaaagaaaatcaaaatcaagggtatctttgtggaaggctgtttgccgtgttggaaaacctacaatatgcagcaaataaacaagattccattcgttcaagttacatgaacgcggcttcatctacgccatctacagtattttcaacagttctcaaattatcaaacagtcattatgctaaattggctaaagagaagaaaggccttgctaatttctttgataatcaaaagaaagagataatagttttaattcaaaattttcctaatacattgagtttggaagatcaaggacgattcttcctcggctattatcatcagaaagctcacagagagaatcaagaaactgaagaataatttttaaaaatatacaattatgtcagaattaaagaatagaattgatttcgtttacatttttgatgtacaagatggtaatccaaatggtgacccggatgcaggtaatcttcctcggatagatgctgaaactggtataggccttgttacagatgtttgtttgaaacgcaaggtacgtaattatgtacaaatagcccaagcaggaaaagcaggtaacgatattcttgtcaaatccaaagaaatttctggagaagaggtctttattaatgaagaaatccgcaaaatgtacaaagaagatttaggaatagaactaaaaatcaaagaaaaagctcctgccgataagagttcagctggtaaaattgctatgtgcagacgcttctttgacgttaggacttttggagcagtactctcaaccggacctaacgcaggacaagtgagggggccgattcaaatgacttttgcccgttcgcaagatatgattgtttcagcagagcatgcattaaccgtatgtgtagctcgtgatgaagaaaagacctatgaatcacaagtgggaatacagggacgtaaagcgaccattccttatggcctctatgtctgtcacggcttcatctccgctaacttggcacaacagacaggattttctgaagaagaccttgaactattttgggaagctttaaagaacatgttcgatgtggatcgttcggcggcacgtggattgatgagtgctcaaaaactgatagtcttcaagcatgactccatattgggtaatgctcccgccaacaagttgtttgaattggtaaaagtggagaaagtctgcgatggagcaccacgctcattcatcgactattcagttactatagataaggagaatgctccatcaaatgtaactattgaggaactgatataattccatcgtatgtacaatgaagacgatatgctcatgttgtcggggattcagcactttaggttctgtccccggcaatgggctttgatacacattgagcagcaatgggatgataatcgtctcaccatcgaaggacagattctgcacaagcatgtagatgatccgttttatagacaaaagtgtggtgaccagataacattgcgtgcggtgaatatcgcttcgcgtgaacttggactctatggaatctctgatgccatagagttacttccttcctcatcttttgaaaatacgattttgcatcccaactatccggggcgatggcaaccggttgctgtggagtataagcatggcaaaccgaaaagaaacgaggtggatgaagtgcagttggcagcacaaatcatgtgcatagaagaaatgtatgctatccatataccatacggctctttcttttatggggagcttcgccatcgggttaatgtggatataacggaggagctgcgaaatatagtcagacaatgtgcccgggatatgcacgatatatttagtaaagcggttatcccgaaggctgaatatgggaaacattgtgacaagtgctcgctgaaagatatctgcatgccggaaatggtaaataattgtacttcggtagataattaccttactaaaaatctgtatctatgagaaaactattgaatactttgtatgtgacgacaccggaagcgtatcttagtaaggatgggctgaatgtcgttatatctgttcagcaggaggaggtgtttcgtattcctgtcataaatatagagggcatcgttacgttcggatatatgggcgcaagtcccggtgtgatgaaattgtgtagtgacaatggtatatcactcacatttctttctccacaaggcagatttatcagcagggttcaaggtgctacgaaagggaatgttctgttacgcaaaaagcagtaccaattgtcggacgatgcatcttggtcgttgcatgtggttaggttgatgattggtggtaagattcaaaactatcgcaatatattgaggagatatattcgtgattatggtgagaatgaagacattaatagggcggtgcaagtattggaacgtgccaagcgtgatgctttgaaggctcaagataagacggaattaattggttatgagggaatggcttcgaatgcctattttgaggtattgccaatcttgatacttaatcagaagactgatttcccatttcatggtcgcaatcgtcgtcctcccaaggatgcggtgaatgccatgttgtcttttgcatatacgttgatagccaatgatgttgcggccgctctcgaaactgttggccttgatccatacgtcgggtttctccatacactccgtccggggcgcacatcgttggccttagatatgatggaagagttacgtgcttaccttggcgaccgttttattttgtcgttgattaataaaagacagatttcagtaaaagacttcttgttccaaggtgataatggggttgttatgacagataaagggaaaaagacttttattactgcatggcaggcaaggaaaagggaagtgataattcatccttatcttaatgaaaaagttgaaatagggcttctgccttatgtgcaggctatgttaatggcaagatatatcaggcaggatattgacgattatccggtatttcttataaaatgatttttaattatgtacattcttgtgacttacgatgtggatactacaagcaaagagggggctcgccgtttacgatgtgtggccaaggcttgtctggattatggacagagggtgcagaactcagtctttgagtgtgtagtgacggaagcgcaatattctcttctaaaagggagagttagggatattattgatatgtctcttgatagtgttcgtttttatattcttagtaaaaatgagaataagagggtggaagtaataggtgttgaaacggcgtataaacttgaggaggctcttataatataatgcgaatgtggtgtgttacaaaaaaagtagtatcttcgcatgtgttaataatcagtagattaaattatttgtagggtatttctttgttatgaagttgaataataatgatgattcgcataacagtggattaaatttgctgatttataatatgttattagatatagagtcacaccctgcgtgggtgtgtggattgaaactgatggggcaaagatagaatgtcatggtaatcacgtcac

SEQ ID NO: 3912 - DNA, 30278 bp, Unknown
  gut microbiota DNA sequence
ggctgattttgtaatatttaataaatgtccctaaaaaatataccggaagcctataaagttcttccggtatatcacaggttaattatattagactcacaataaattcttagaagcgggcgccgactgtcagcaagagctgatgccgctcattgtccactttagttgccggaagatctatattatcgtcaaaagcataaaagtttgatttatacatatcatatttatatgccaaatccgcataaattacactgccacggtatccaagaccaaacgtaaaggtattcttagactccgtattattaaaatcagtacgcgtgctatataaagacaaggcactataagcatctttggaaaatgcagccgaagaataattataccctgcacggatgctaaactcaggtatgatccgcgtttccattcctatacggaaagtatggacacctttcagataattctcaacgctaggctgatctcccaattcataaccatccacatccttcagcttactggaagaataatcctgatattcatattccgcacctactgccaccgcacccgcaaaagtagtacccgcactgacattaaatttccacggagtagtaagattataatcataggtcaaataatcatactccggagttaccagaaaatcactcaatgtctggatatagggtttttcataagctaaaatatcagaagataaagtggcattatagctttctcttaaatcataccatgtaggcgtgtgaacggcaaatcccaaacggaaaggagaactttctataggacgtacaataacccccaacttcaaatccataccagttccttccagtctataataattatccaatgtataccccccattatccgcacccttatcatcattcaaattttccgtataagaagtataacggtcataattcacatcatagacccccaaggtagctcctaaatagaccctatcttcaatattgaatgaaacattaaaatcatattgactgatacctccagtttccttactaaagaagttattgttaaaaccattccacccccatggagcatgaatgtttttttcaggatcattaaaccagtcaaccacaccggttctcacccccattactcctaaaacaggtaactggttccaatatttggtataaggattcttcgcatccagtatgtcattaaactcgctttccgtcaatccatatcgttccatttcctgagccagctgaaagctttgtgacatattatccaacgcccctcccatagagaaaaggcggttgaagtttttacttttatggtaattgaatccgaaattcacaaaacgcaaagaagtattgttgcctatcttattgctataaacaaatccaatctggtcaaatgaagcgcgcgttttgtcttcattcattgacacgccactaaagttactctttgtcgaagtattattaaaaccaaaagaaacggacacgtcattactacgaaaaatgccgatacccgcagggttggaactcatgacagatatatcacctcccaaagctcccatggcaccacccataccaacaaatcgtgctgttccattcaagtcattccccagcaacttttccgcatcataagcattttgtgcgcttgccgttgccattgccagcaacgtacaagcggttactattactttatttttcatacatcaattctattaaatacaacagtctggtttaatctgctacttatctggtacgcgatctgccaccgccacttgaacgggaaacaccgcctccggaactacgggaagccccaccgccactagaaaaactactacgggaagaagaagttccactactacggtaagagttagacgaactattacgggaaggactgctgctacgggaatatgaactgctgcgagagttcgaaacgccactattgttacgataggcgccacggcttgcagcccctgttctctgataagcagatcctgctgcatttcccacacttctccgggtactgcttggtctggtataggaagatccccttccttctgtcggacgtgaatacgaattacccggacggactcctgcagcctgacttggtgaaagagttgctcctgtacgggttctgatagcgcttctattaggacgaaccgaatttacaccgtcagatcccgaaaccactcttcctgatgaagatccgttacgtgttgcggtacgatagctattagcactattacggacattttgtctggaatttcctacatacgaattacgactattcctatcataactattcacataattattccggcttgggcgtgaagagccatagctgttggtgtatcttccggcatgtatccccggattacgtctgcttgagccataccatccatgaccgcctccccagtagccgccgccccaaccgtgaccggaataatgcggataataatgatggtggtggtgatgatggtagccccaatagccaccccagtagccgccaccccaataaccgggatagtaccagctattgtagtaccacggcgaactccatccccaactgaatccccagctggcgccatatggataattccaacgccaatcccaccacaagcggttcgtgtaagtgggaaagacgtatgcatacaatccgtcatcatatacattccaatcccatgaaggcaaaccgtaaaccacatcccaatagagcggactgcttaccggaatggcgtaacggggattgcggaaacggacgatacgcatcgcgtattcataatcgtcttgagagccctcaaaaccattaacccattcccctctctcattcaaaggtttctcctcaatatacaaggtatcattctccatcgagaagttattatctcgtgaagtataacgacgattatactcatccacatcgcgcacttttcctttcacatccttcactaccactgtagaaccgggggctgcgtaaacggtagtcgtgttctgcttctgcggaaccaccactttcacctcttgcttaacctcctctttcttttcagcttttttcttagggatgaaataaaggtcgtcatcaacgctttgtgacattgcccaataaggcaagcacaccatcataagcgaagctaatacaatctttttcatactcatacctgttttatttgttattctatctactttttctagtgcaaagatagccagaggtttcagttcataacaaagaaaatccctattagttggtagggatttccctattttagtaacggacttcaactattttatctatttctgcacacacacggaaaacagaagaacgtccgttcacatacgttgatggtaaacaaatctggtggtaaaacaactttttatattaagttgcacccacttatgccctcatgccctcactaaaagtcataacctactcattattaaaccactacacacagtgagggcatgttaaaaagtgagagcattgccctcatgccctcactcctattttcttgcacatctcacttaaatcattcattcacaacataatacccatttatcggcttataaaccggttgtttgggaagtcccacatttttcagctttccttcctcgcacaagcggtgtaaatggcggctggccgtactttgtgtcatactgcaaagaagctggaaacttttccgctgcacaaaatcatgagttgtgaagaactccgtcagcaatgcgtcaatttcctcatcggtcagtttacttgaatgaaacgagaaccgggtacgctgcacctttaccttccccacctcatccatcaataatcggtcggggcggtaaacaatccccttaagccttacctttgtatttttacgtttcgtcttttcggttaccggctcggtgctcaccagattgggacggaaaaagccgatgccgtccagatgcacctgcctgccttccgccaattcctcgcccatggcgtgtgacagcgcatcgagcacggctattacatccgtttccgtcaatgtacaatatttctgtatacgggcacggagctgggccgtgcttactttcccattcagccggagacgcggatgcaacatattctcttccccttgttgctcagaggttttgggattctcgtaccaatcaaatagtattgccatactgttctttttttattgatgaaagttcaatatctattaatcacggatgtgattaagcttaactacctttgtgattaattttaatcacctttatgatcagacttaatcacaagggtagataactaattacaaacatacaaaaataagaaaagaaaaggtagaaaacaaataagagacaggggaatatgcactgagactaagaataaaaacacagaaaagaaaggaaaaagaaaaagacggcatttaatccggaaagcatttgcagaatccggaaagaaaccttatctttactaaaaatatgcacacatagacactcgcaatacgcagtcttctccacacgacagaacatcatcttttccatgggaggtacataaaaccaaaaaacattcaaacgaaagacaaatatgaaaattacactcatcagaaaagatgaagaacaggggacagaagccttgtcactatgcgatacggacgcattcttcgagaaagtaaagacagagaacaaagcagggcatatatcggaactgcgtgaaatactaccccggctggcaggatcgtccgcccgctacgtccacatcgacaaactgccgcgtgtctatcctgccgtagaatatacccgcaaacaaaagggtgagaaacgtatgaaacattacaacggactggtgcagctggaagtgaaccggctcgccgacctgtatgaggtggaatatgtgaaacgccaagtagagcaactgccacaaacctttgccgctttctgcggttcaagcggacggagcgtaaagatatggatacgcttcgcacgcactgacggcagcttgcccactgccacacaagaagtcctcctgtttcatgcccacgcctatcggctggcggtgacatgctaccagcccatgcttcctttcggcatcacactgaaggaaccggacctgatgcaaagctgtcgcatgaccgtggatgaacaaccttactataacccttcgtccgttcctttctgcatagagcaaccgcttgccctgcccgatgaggaaactttccggcaacggaaacaaaacagcgaaagcgcaccggaacgaatgacacccggctgcgaaagtatgcagatttttgcccagatgtaccagtcggcacggaaaagagcattggccgagatggaaaactggaaacgtgatgacgggctggaacctttactgccccatctggtagaacaatgcttcaaaacaggcatccccgaagaggaagccgtacagcgcacgctgatgcactattttcacgcaacggacacagaaaccatccgtacagcttttggcaacggataccgggaaatgaaaggtttcggtaaaaaaagcggtttcagtaaagagcaggaagccaccttccggctggaggaattcttgaaaagacggtatgaattccgcttcaacaccgtgctggacgaggtggaataccgtcaacgggactctgttcatttctatttcaagcctttagataaacgtacccgcaacagtatcgccctctgcgccttaaaagaagggctgcaagtgtgggaccgggatatagaccgctttctcacctccgatttcgttccgctttacaatcctgtagaagaatatttgtgtgaccttccccgctgggacggtactgaccgcatccgcgcacttgcccggctcgttccttgcgacaatccgcattgggaagagctcttttaccgttggtttctaggcatggtggcgcattggagggggatggaccgccagcatggaaacagcacttcacctttacttgtaggttcgcaaggattccggaaatccacttattgccgtatcttgctgccacccgaactccgtttcggctatgccgacagcctggacttcagcagcaaacaggaagcggagcgtgccttgggacgatttttccttatcaacctggacgaattcgaccagattaccgtaaatcaacaaggctttctgaaacatctgctacaaaaaccgacagccaatctgcgcaagccttacggaaccagcgtgcgcgaattacgccgctatgcctcattcatcggcaccagcaatcagaaggatttgctcaccgaccccacgggaagccgtcgctttatctgtatcgaagtgaccgatcccattgataccaatgtcaccatagactaccgccaactctatgcgcaagccatgcatttactttataagaacgaacgttattggctgaatgacgaagatgaggccgttttacgacaaagcaacagcgaatttgagcaaatatcacctttggagcatttattccattgtaacttttcttctgcaaccaacgaaaaggagggagaatggatgactgccatggatatttttaattatcttcaagagaacacacgcgacaaactgtctatcaataaaataaattggtttggacgtattctccgcaaactgaacattcctaaaaagaccagtaccagaggtaccctatatcatgtaacaaagttgaaataatttattttaccatagaagagtatgagggcaatgccctcatactcttctatgctaccatcacaaataacctgttcattataaacaaattacctcacaaatgagggcatgagggcataattgcatctaacattgcaatgagagcacaagtctgaaacaaaaagacggaaggtttgtttgtgaaagtaatgaaaagaaattatctttgtcatcatccttaaaccaacaatcgtatgaaaccagtgaaattattttatcaggaaagatgcccgttctgcaaaaaagcactgcgctatattgaagaactgaaagcagaatatcctgaattccaacctatagaaatagaaatgatagaagaaacccaacatcctgatatagccgaccaatacgactattattacgttcccacgttctatgtggacggggtgaaagtgcatgaagcgggcatcttcaaaaatgagatggaggcattgctccgtaaagtgatagaataaacgaaaagatatgaaatatttagaagtaacctttacaacacatccctgtaatgaaacagtgaatgatgtagtgtccgcattggccggagaaataggatttgaaagttttgtagaatgtgaagggggaatacaggcctatatccagcaaactctctttgacgaggaagcactgaaagaaatggttgtgaacttccctttacctgacacccggatagaatacaccataaaggaagccgaagacaaaaactggaatgaagaatgggagaaaaacttctttcaacccatcgtcataggtgaccgttgctgcattcacagcacgttccacaaagacactccgaaaactgagtatgaaattctgattgacccgcaaatggctttcggcacagggcatcatgaaacgaccagctctataatcagcgagctgttagaagccgacctgaaaggaaaatcagtcctggatatgggatgcggcacttctattcttgccatccttgcctccatgcgaggagccaatcctgtgacagccatcgacattgacgactggtgcgtcaacaattcaaaagacaacattgcactgaaccatatccataacattacagtggaactgggtgacgccaatctgctgaaagggcgcaaagcgtttgatgtgattattgccaacattaaccggaatattcttctggcagaccttccccattatgccgcctgtatgcatccgggttcggaaatatttatgagtggattctatatacaggatattccttttatccgcgaaaaagcggagagtctgggaatggagttcgtacatcatcgggaaaagaacaactgggcagctgtgaaattcatcatgaaataataccattttcaagtatggcaaagacgcgataaagacggaattgccaccaaccacgcaggatgtgcattgatttattcgaggacaaaagaacggattttctctcttttgtccttttgttcttcttccctgaaaattagaaccggaatcaagcggtgacaaacgcacgtaggacgctgcattttatccaaagtgaccaaacgaccatacggtattatatttattatacaatctcctttccaaaaggagtaagtgccaagcccgccagcttgaaatgttgcagtccgaatggaatgccgatgacagtgatgcaaagcaacaccccgaatgccagatgagagaggctgatccagattccacctacaagtatccagatgatattcatcaacacactgagacatccaccatcaccgggacaactgcgtatttcccgcccaaaaggacaaagagccagcatagacaacttcaaagtctggaaaccgaaaggaatgccgacgatagtaatcatcagcaacaggctggaaacaatatattccacgcagatcagaaatccgccgcaaatcagccaaataatattgagcagtaagttcataaagcaaatataaacaaagttttcggaacctcaggcacagttcccttatttctttatggtcattaattgcaattcttccaacgaaccgttgaaaatattcaaatccaccttctcacgaatacccggcaacgtacccacatccgtatgctgccagaatttccactcccccctgtattccaccgagtctacataataatgagctatccagtaaggataagaattgaagaccgaatcattcagataacgcgttttaaacttataagaagtataaagaataggcttcactttgtagtgctgttctattttgtcaagccacagtttaaggtcacgacggagctgattctcatcctttcccctcttctcaatatcgagcacaggaggaaggtcacctgaatccagcttgacggaattgataaaaaaatcggcctgacggacaggatctgtcttcggattgtaaaaatgataagccccacggataaacccatatgttttcgccgaatcaaaattggagctaaaagccttgtccccataatcgcctccttccgaagctttcataaagacaaaatgaataggaaattttccctgtcgggtctgggtcagcattttccagtctatgtttccttgataatgggaaacatcaatgccatgcacatgaaaacctgagggcatacatacaccgtatgctttaaaaccatagcaaggcttccaacggtaagagtaaggacggataaagaaataaaagaaagcagcaaggaataaaaaagcaataatccccgcaatgacataccgaagccatgacggcatctctctttgcggtttctttttcgccttccgctgtgtggtccggcggacaggtttcgcgactgccttttttttaacaggggcaggacgtgtgcttttcgctcttaccattttatcctatttagctgtttttaccttacctattcccacatactatgcaataaaacccatcgggagaatggttttacaatcagccccgatgggtttcctttatgctttatagaaataagaaaaaattattttccttgttccaactgcaatgtcttggttgcctggtcacaaacttctgtaggaccgaagtactggataggacccggatatacatagtctgtttcaatagcccaacgttcacgctgtgcggcgaacgccttgaaaggagcaccgtccaattttaccaacgctttctggataaccggtttcatttcaccgtgacgacgttccatgttcatcatcattgtgataggcacaccacctgcaatccattcttcggcaggagcagtagtgttacgtacagaagacatataaccggtcttgccgttggcaatcaacatagaagcggtgtaacccaacgagtagcaatagtcagcatcgaagtttgacggagcagcgcaacggccttcgtaaccgaagaagtgatgctgagcggcaaatttacctacatacttgccttcttctttccactgagccaatttaacggctaccatatcagacaacagcttttctgtttcaatcagtgatacctgtacgtttccgtgcgggtcacgatccaaagtaagctgacgtgcaacgccttcgggcagagaagcatagatttccgagttttccttagaaagcttggagatgatatattcacgttggtgagatttcttgatcaatgcgaactctgatgcgttagcagccaggaagtcgttcaattcagcgatcaatctcttcattgcggggatgaattcgatcaaaccttcaggtatcaacactgtaccgaagttattgccttgtgcggcacggttagccaccacctgagcaatgtaagtaaccacatcatccaatgacatgttcttctcttccacttcttctgaaacgatacatacgttaggttgaacctgcaaagcacattccaaagcgatatgagaagccgaacgtcccatcagcttgataaagtgccagtatttgcgggcagagttacagtcacgctgaatgttaccgattacttcagagtaagtcttacaagccgtatcaaaaccgaaagaagtttcaatcatctcgttcttcaagtcaccgtcgatagtcttcggacaaccgataacctgaacaccgcagttcttcgcagcatagtattctgccaatacacaagcgtttgtgtttgagtcatcaccaccgataattaccaatgccttgatgcccaattccttgatgatttccagacctttatcaaactgttctaccttttccagtttggtacgtcccgaaccgatgatatcgaaaccaccggtattgcggtattcgtcgataatatcggaagtcagttccatataattatggtctaccaaaccaccggggcccagaatgaaaccatacagtttgctgtccttgttcaatgctttgataccgtcgaacaaaccggaaataacattgtgtccgccgggagcctgtccaccagacaagatgacacctacgttgatggcaggcatattgacagcttcgccttcaacgaactgaatcaacggcatgccgtaagtgttagggaacaaggctttgatagcttcctggtcagcaactgactgtgtaggttcaccttcctttacttttacagcgcctttcaacgctttaggaagtttgggctgataagcagctctggcaatttgtaatgcacttttagtcatattctattattctatttaaaggtgtataatttcatttataattcatgtgcaaatttcgttcttttttcgcaaatatgaaaacgtatacaaataaaaatattacctttaccgcgaatttagaattatgtattaacttaaaacattacatttatggcaagtagaagaaatttaaagaaaaaaataaccaatatagcaagtgatttgtttttagtcagtttgatggaaggtgttaaccgtgaagtagtttgcaactctgtacacaatgtgatcaaactgattatacgcatcagtcacactgaaccgggtaacgtaaaaggtttctacaagaaactgaatgaggatttgaacaaagaaataaaagtggttgcagacgaactggctaaagctacaaaagcataagatttaaggaatgaaaaaagctatttgtggttttatctactacaaactattgggatggaagactaaagtatccgttcccgattatgacaaatatattatctgtgccgcaccgcataccaccaattgggatttgttcataggcaaactgtttatgggagctataggtcgcgaaaccggttttatgatgaaaaaagactggttcttctggcctctaggccctattttccgctggatgggagggattcccgtagaccgtagccgcaagacttcattggtggaccagatgattaagattgccaaatcgagtcaaaaattccatctggctatcactccggaaggaacacgcaaagccaatcccaattggaagaaagggttttactatattgcgcaaggggccggtctgcctattattctggtagctatcgactacgagaagaaatgcatcacagccgaaaaggtaatacatcccagcggtgatttggacaaggatatgcgtgaaatcaaattgtattataagaatttcaaaggcaaatatcctgaaaacttcagcatcggaaaagtagaataacccttccgttttgtagttcttcagatatgaaaacactgattatgcggattgtattttcacccgcataatcagtgttatttgtatctattctcttgctatactctcatccccatcctcaaaattattcttctctatcttcacattccgggtgtgaagcaagcggaaacgggacttgttatgatgaaaagccggataatccgtattctggcggatcacattgtttttaaagatcaatccatcaatggattttgcaaaaaggacagggcggtcaaaggtttcaaaataattatcttcaatcactactcctttttctccttttccaccatggaaatattttttctgatgctccaaatcgggaatctccggataaatagagataacagcttccgtaaactggaacatattagtcaatgcgttgataaaacgattgttacgaatcagcacattccggcaagctcccgtttcaaaccagccgttacaatcaccgcacagcaatatggctgttcctgatgtatgatcaaacaggttacgctctaccaccgttttcaggggagtgctgaacagcgtaccgcgtgcacggttgttacgaatgacattatccgcaaaataaacttccggacaccaggacaggttttcaatgccgaaaccttctttatccgtaatctccgcatccaaaggctcggcaaaagtgatacgatattcttttgcacctttcaccgtatctttgtcattgggcaggatttccttcacccggttctttccaccggtcagttccatggtggcggaacgtacaaattgtacttcatcgccattcacgccccactcgaatccgtatgcttgcggatgcatgtatcgggcaatcaccgtatggtcatcaaggcgttgcttgattttcaaataagtaccatgtacattaatcgcatcatccatcattccttcatacaacccgttgcgagaatcaatcttcccccggcaactggagaaatgggtagcatccgcctgcgtggtaaagtaacgcggatccttatcgccacgaagacaaacgctgaattcatccaacgtgatattttcacataactgggccagcagtcccataccttcggcataatgcactttcacattctgcaaacgggtgtctttatcattggacaagaatatacccggagcaggacgataataagtacgaagagccaccactgtccccggtttcaaccgggcgtctttccattgaggagcatggtagacacgtggagagatttccttcaatccttccataggacaccataagtcactggtgcggtataccagacgctttgtcttttcttcaaaagcaatccctccctggggagcactggaccagccttcaccgtatgcttcgaaaaaacctttctcattgatacggcatttcacccatgcggcaggttcaaaagtaattccctcctctccgctttccaatatcttgacctgagcaatatgaggagtctcaaaatctatgctgaaattacgcaaagtacaattctctgaacgaagcagagaaagtggaagcatacgcccatgaaagataaaatcagcaccctgtccgtccaccgtcagccccttccaatcctccaaagggaaacctaccgttttcggattgtcctgatcatgattggaaatataatactcacggacagccgccccttcaggatggaaatcgtaacgtccggattcaaaaagcagagtgaccttatcacccaaagcaacttgagacttgatgtcttgtaacgccttctgcaatttgggtgaaagattctcgtgtgtgtccggtaccagaccataatttcgcatttcgactaccttacttccggcaaaagcggaaacagccagccatacgaagcagaaattaaagataattcgtttcatttaggttcattatagattagttagaatgacaaaactaacaaaaattcctaacttcgcaaccataaataaagaagaaaacaacatgaaaaagatatttttgtccttcctgctggtaatggcaggaatatcacacactttggcacaagggttagatggtaatgtggaacaacgtctaaaagattttttcacccggtacgaaacatcttatgccaacataggtaagtgtaaattagaccgttatgaagtaaatcatgacaaaaaaaggctgaatgtatatgccagccccagcttcggctaccaaccgtttacccccgaaaagacagaagctatctaccggttacttagacaaagcctacccggtcctgtaaattattacgatataaccatctatgccgatggcaaatcaatcgaagacctgattcccaactatctgaggaagaaacaggacaaaagccgcttatggcaacggacagattataaaggtgaaccatgggtaaaaaatatttcccgcccctttactgccggcaaaggactggaaggcagacacatcgccctttggcaaagccacggaaaatattataaaaaggacaagggatgttgggaatggcaacgtccccgcctgttctgtaccacagaagacttgttcacccaatcattcgtcataccttatattatacccatgctggaaaatgcgggagccatagtttatacccctcgtgaacgtgactggcaacgcaatgaggtgattgtggataatgatacccatccccaaggttgcatctatcaggagataaaaagccggaaaggtaaatggaaaaccgcccccaccccggcattcgctcaaaaacgattggtttaccgggacggacaaaatccttttgaagaaggtacagcccgctttgcctccaccgagaaaaaaccggaaaaagcctttgcacaatggattccccatattcccgaaacaggaagatatgccgtctatgtgacttatcagactttacccggaagtgtgagtgacgctaaatatctggttttccataaagggggtgtcaccgaatttctggtcaaccaacaaatagggggaggaacctgggtttatctgggcacttttgaattcgacaaaggaaccaacgattacggtatggtgatactaagtaatgagagcagacaaaaaggagtggtatgcgccgatgccgtccgttttggcggaggaatgggaaacatatcgcgcggtggaaaaaccagcggcctgccccgttatctggaaggggcacgctatgccgcacaatggtcgggttttccttattcggtttacagtcccagcgaaggtaagaatgactataccgatgatataaacgcccgcagccggataataaactatctcagcggaaattctgtgtacaatccaaaggagaaaggattgggcgttccttttgaaatgaccttgggagtgcacagcgatgcaggtttttccaaagaagatgatttaataggcacgctgggtatctataccaccgattataatagcggtaaactgaacgccggtatctcccgttatgcttcccgcgacttggcggacatggtactgaccggtctgcaacaggatatctccgcccaattcggtatccggtggcaacgccgcagcctgtggaaccgcaattacagcgaaacccgtctgcctgccgttccctcgatgattctggaactcctctcccatcagaacttcgccgatttgaaactaggacacgatccgcgtttcaagtttaccgtaggacgttctgtttacaaatccatactaaaatacctgagtaccatgcatgggacggattacgtagtccaacctttaccggtaaataactttgccattcactccggaagtaggaaaaacaccttccaactaacttggcaagcggtagacgacccgttggaaccgactgccaaagctcaacaatacattgtctatacccgtctggggcatggtggatttgacaatggaacgttagtacgcggtactgaatataccttcgaagccgaaccgggactggtatatagtttcaaagtaaccgcagtcaacaagggcggagaaagttttccttccgaaatcctgtcagcctatcaggcaaagaaaagtaaaggaacaatcctgatagtcaacgaattcgaccgtttaagcggacctgctaccgtagaatctcctttcttgcaaggctttgacttgaatacggatccgggaataccttatataaatacacccgccttctgcggaacgcaacaaagcttcgaccgcagccgcataggacgggagactaaagacgggctgggatatagcggcagcgaactggaaggaatgttgatagccggaaatactttcgattatccgttcattcatggaaaagccatccaggcagccggaggatactcttttgtatcgtgtagtgatgaagccgttgaaaatggttttgtccggctggcagattaccccattacagacctgatattcggagccgacaggcgtcctttctcccacacattgcaacagttgctcacaacctattgtcaaggaggcggcaacctgatgctcagcggctcgtatataggaagcaacatgaacagtcccacagcactgaacttcaccgaaaacatattaaaatatagtttcggaggcagcatgataaattccacttcgggagaaatatatggagccaacacccgtttcagtattccccgcactatcaacgagcaaacatacgccgtacccgctcccgactgtctgaccccgatagcccctgcttactccgcttttgtatataatccgggcagttacagtgccggtatcgcctataaaggcaaatatcggacttttgtcctgggtttcccctttgaaagcattcagggagtgaaggaaagagcacgggtaatgagtgccatcctgggcttctttggcagcaagtgatatttttaaacgaaaataaaagggcaaataagaggttatttcataaaaacgcctaactttgtccgtataaaccattaaaataaaacgactatgtacactatacagactaatgcctccggcacacgcagcatggaaatctcagaagagaacctgcaaactattgagaaatatgctttattccagcatctgatagacagcaacggtatcgtggacgagtcggtactggacaaactgaagctgaatatccgctcactgataaccagcgaggaaggaaacaataaagagctgctcgacctttgtattgatgtaatttatcataataacatgaaagctttcggacttcatcaactcattctgctttatatccaatgggagaaagagaaaaataaagatgaagaagagatataataaacaatctctgtgttctctgtagcaaaacaaaaaaacagtatttatcattgaaagaatacaaacttacagactggttgccgacaaccaagaaagaagtagagatgcgcggatggaatgaactggacgtaatcttgttcagcggtgacgcctacgtagatcatccttcatttggtccggcagtaattggaagattattagaggcgcaaggtttgaaagtggccattgtgcctcaacccaactggcgtgatgacctgcgcgattttaagaagctgggacgtccacgcctctttttcggtgtgtccgccggatgtatggacagcatggtaaacaaatacactgccaacaagcgtttgcgcagcgaggatgcttatactcccgacggccgccacgacatgcgtcccgaatatcccagcatcgtttatacacagattttaaagaaaatctatcccgacgtacctgtcattctgggaggtatagaggcatctttgcgccgtgtcacccattatgattactggcaagactgcctgcgtaaatcaatcctgatagattccggagccgatttattgatctatggaatgggcgagaagccgattacggaactttgcaagagaatgaaagaaagcaaagacagtcaggacggagcccatctacccttacaaaaggatattccccacgatataccacaaacggcttaccttatccgtaagaaaggatcagttccgtccgagcactctgtaattgagtgtgtgaacgaaaagccagacatcatcctacactctcatgaagcatgcctgaaagataaaaagaaacaagccgagaacttccgcttcattgaagaggaaagcaacaagtacgaagcctcccgcatcttgcaagatacaggcaatgaaacagtagtagtcaatccgccttatcctccaatgagccaaggcgaactggatcattcttttgatttgccctatacgcgtatgcctcatcctaaatataaaggaaaacgcattcccgcattcgacatgattaaattctcagtcaatctgcaccgtggttgttttggcggatgcgccttttgtaccatttccgcccatcaagggaaatttattgtaagccgaagtaaagagagtatcttaagagaagtgagagccataactgaaatgcctgatttcaaaggctatctgagtgacttgggaggacctagcgccaacatgtatgccatgcatggtaaagatgagaaaatttgccggcgatgcaaacggccgtcatgtatccatcccaaagtatgtcccaatttgaacacggaccatcgccccttattggatatctatcattcggtagacgcacttcccggtatcaagaaaagctttatcggaagcggtgtacgctatgacctgttacaatatcaaagtaaagatccggcagtaaaccgcagtacggctgaatatacccgcgaactgatagcccatcatgtcagcgggcgcttgaaagtggctccggaacataccagcgaccaagtgctgcaaatcatgaggaaaccttcgttttcacaattttatgacttcaaaaagactttcgacaaaataaataaggagttgaatatgcggcagcagattataccttattttataagcagccatcccggatgtacggaagaagatatggcagaactggcagtgatcaccaagaaattggatttccatttggaacaagtacaggactttactcctactccgatgactgtagccactgaaacctggtacacaggttatcatccatatacgttgcaaccggtattttccgctaaaacaccaaaagaaaaactggctcaacggatgttctttttctggtataaacccgaagaacgacgtgctatcatcaatgaattgcgcaaaataggacgcgctgatctgatagataagctgtatggtaaatacaaagcctgagtgttaaattcaccacagattatacagatttgatctgtggtgaaactgttttttaacgtcttgtttacctttcatcgtgttttgacgaaacacaggaacaggtacatgtgttccaagttacagatatttattcccccctaaacttaattagaaaagcaccgcaaatattaattgataaaaagatgacctatcctattgaatatcatttattttttgctatctttgggcaaaaccaacttttaaatcaatactgcgtatggaaacgtatctattctggattgtgcccattgcctccctcttggcattggtacttgcatggtatttctacaaacaaatgatgcttgaaagcgaaggaactccgacgatggagaaaatcgcttcttatgtgcgccagggcgccatgtcctatctgaaacaacaatacaaggtggtagggctggtatttctgggattagttattctgttttctatcatggcatacggcttcaacttacaaaatccgtgggtacccattgcttttcttaccggcggtttcttctccggattgtccggctttttgggaatgaaaacggctacatacgcttctgcacgtaccgccaatgccgcccaacactccttgaacaaaggactgcgtgtagctttccgtagcggagctgttatggggttggtcgttgtcggcttgggactactcgatatttctttctggtacatattattggactattgcattcccacagatgccttgaacccttctgctaaattatgtgtcatcacaaccaccatgcttacctttggtatgggagccagcacacaagcacttttcgcccgtgtaggaggtggaatctataccaaggcagccgatgtaggtgccgacctggtaggtaaagtggaagccggtattccggaagatgacccccgcaatcccgcaaccattgccgataatgtgggagacaatgtaggtgacgtagccggaatgggcgccgacctgtacgaatcctattgcggctctattctggctaccgccgctttaggtgctgccgcttttattggctcggatgataccgtgatgcagtttaaagcggttatcgcacctatgctgattgcggcagtgggtatcgttctctctatcatcggtatttttgccgtccgtactaaagaaaatgcaggaatgaaggaattactcggatcattggccacaggaaccaatttaagttcggtactgattgtcgttgccactttccttatcctctgggcattaggtttggaaaattgggtaaacatttcctttgctgtggtagtgggattaatagtaggtatcgttatcggccgttccaccgaatattatacttctcaatcgtataaacccacacaacggttggccgaaagtggaaagaccggtccggccaccgttatcatttccggtatcggactaggtatggtttccaccaccatccctgtactggcagtagtaaccggtatcatcttgtcctactggctcgcttcaggatttgattttgccaatatttccatgggattgtatggcatcggtatcgctgccgtaggtatgctttcgacattaggaatcaccttggctaccgatgcttacggaccgattgcagacaatgctggcggtaacgctgaaatgagcggactgggcaaagaagtacgcaaacgtactgacgccctcgactcgttaggtaacacgactgccgctacaggcaaaggttttgccatcggctccgcagctctgaccggactggccctgctggcatcctatgtagaagaaatccgtatcggattaacccggttggggcaaaccattctggaattaccaaacggcattaccgtagatgttcataacgccagtttcactgactatatgctttattacgatgtaaccctgatgaaccccaaagtgctaagcggcatgtttttgggcagtatgatggcattcctgttctgcggtctgaccatgaacgccgtaggccgagcagccgctcacatggtagaggaggtgcgtcgccagttccgtgaaataaaagggattctgacaggagaggcagaacccgactatgcccgttgcgtacaaatatccaccaaaggagcacaacgtgaaatggtattcccctctctactggctatcattgcccctatcgctaccggactgatttttggtgttcccggtgttatcggtctgctgataggtggtttgtcctcgggcttcgttcttgccatttttatggccaatgcgggaggcgcatgggataatgcgaaaaaatttatagaagaaggtaatttcggaggtaaaggaagcgaagtacacaaagcaacggttaccggtgacacagtaggtgatccgtttaaagatacatccggacccagtttgaacattctgattaaactgatgagtatggtcgccattgtaatggccggactgacagttgcttggagtttgttctgatagaaaaacggaaagccgcttcggaggaggcggctttctaattttaaaaaagattctgataaactatttttaaaacttccccaacacttccatcattgccggacgacgtttgtattttatccggaactctgccaccaagcttttcacaacagcctgtccaccgtttagtttacgtatgcaggataatacccgtgctataaattcataatgctcccgtcccagattccgttcagcataatcattcaataaagaagtatatatagcaatcaatttctcagaatgagtgtccttcaaataatgggcatatttcatcaatgcttccaactgattgtatcggactgacgacagcaaagagaacaagctgtcattatccttttctttcacataaatttcagccttatcatttccgacaaaagaaaaatagtcacttaactcggcttctttcatcatcctatccagaaaacttttccattgttctttcggtaccagagttttaagtttgctgtaatatatcaatttatcactacccaccacaaacaacagacgacatgtatcaattacctcagaaaccctatgagttatttcataaatatccaatttcattttcagccattcacccacagtgccagaatgcatttctctttccgctatttctattccgtcattcagcaaacaaatggcttcatcatattggcaacgggcaatcaatttatcaacctccattcttcgtatttcagtcagataaagatattgacgaatcgtatcatccgccttttgttcttcattctgttctaacaacagattgaccttacgaaggactaacttatagatatcacaggttccctttcttacttcaagaagttcatcaatcaattccaacgctttttctgccggttgaatcgaaagattgatctgcatcatcaattcgtctacatcataaagatcatattcacgaaaaatagatatttcagcaatctcacgcaagccctgaagtatctccatcttttgtgcctgagtggttttaggatgttcaatcactttcaggagcaaatctcctgcctgttcacaatagtcagaagaagaaataccatcatcatacaaaagttcatcatcatagttttcaccgatgaaacgaagtacttgaagagctatggcaatagaattatccatagcttccaaattcaaaaagaaatccgctttctccaaaaaagtgtccatctgattgaaaatagttttccagtcacgatcgtaattatcataacgattgtgataacgagaccttttatggtaaccagatcctttaaaaactttttgaatttcaattctgtaatcttttccctttgatgacaaagatagctccttagctatgaaatgatttgaaagtgccgttttaaattccagattcgttgaagcatactcacagataaatttcgagagttcctgcggatcaatgaaagacaacagtcgctgtatgtctaccaaagacggacaaggctgcttacccacttcttttatttcctccaaaacaggggtttcctccgctttgattttcatcttcgagaaaatactattacccgccttttttctattgtcgcgaattgccaacaatgtcgctacgacatgtttgcagatttctccatcatacggacaatcacagtaccaagattctatctcgtttccatccatagatatctccacattataatcgtctgttccttctacagtcgcagtccattcaccgggtgagatttcttccaattcggaaacagcgtctgtttcataatactcttccccacgcatccatattttatagggaacaaagttctcaaaattatccaatgtaatcatgtacaatacttcggtattttttatcggttcgagtgtcccattgtcaaagaacgctcataacattctgcattctccaacaaacaggttttgttattgatagactgttccatcaaaacagccacagattacccggattcgcacaggttcaatcttaaagttttcagcttaaacacccgtgtgagcccaagtaacctgtggtaaaaagacttgtgatgcattcatacccacaaagtcaaattcattacagactgttcttagtcaaaacattacaattaaatttgttcaatatctccacacatctctccacattagacggacggataaccacatgtgccgtatctccctgagcaaaagcatacatatattcaataaagatattctctgctgccagatagtccaaaactttagccaaagaacctgccacattcgggcaactgatacataccacatcggtcagcatcacggcaaaattctcggcacgaagtacttccaccgctttttccacatccgaaacaatcaggcgaagtataccgaaatcagtagattccgccatgctgaacgcatgcatattgatatcatactttgccaatgtcttggttacgtcatttattcttccggttttgttttccagaaaaacagataattgcttgattgtcatatcgcatacttttttattttaaaatccgattgtctatcacacgtttactcttaccttcactacgggcaatgctattaggttccatcagcttcacttcggcactgatggaaaggacacttttcagtttgtcgctcaatgctttcttcatggcaagcatacttcccatatcatccgagaagaagtctttgcggacttccacttgtacctgcaaagagtcgaggttattcttcctatccaccaccagcatatactgaggttcaaactgaggcatatccaaaataacactttccacctgagacgggaaaacattgatgccacggataataagcatatcgtcactacggcctacaatacccgacatacggatattggttcttccacacggacattcaccctccatcagggaagtcaagtccttcgtacgataacgcaataacggcatcccctcctttgtcaaggtagtaaacaccaattctcccacttctccatccggaagacgttccagcgtttcaggattaatgatttcaggataaaaatgatcctcattgatatgcgaaccatgttgctcctgacattcgtaggaaacaccgggtcccataatctcacttaatccataaatattataccctttcaatcccagccgctcttctatctccttacgcatactttccgtccatggctcggctccgaaagctccgatacggagattgatatcattcttggtcaatcccatacgttccaccacttctgccagataaagagcgtatgaaggagtacaggcaattcccgttatacccaagtcgcgaatcagacggacatgcttttccgtatttcctgtagaagccgggataacagtcgcccccagattctccaccccataatgtgcgcccaacccgcctgtaaacaagccatagccataactgacagaaaaggtatcattacgggtaaccccgtatgctgaaagacaacgtgacatcacttcggaccatacagacaagtcacgacgcgtatatcccacaatggtaggattcccggttgttcccgaagaagcgtgcacacgtacaatttccgaagcaggagcagcctgaagaccatatggataattatcacgtaaatcctgcttggtagtaaaaggaagttttacgatatcttcgatagtctggatatcatccggagacaaatccatctcctgcatcttgttacgataaaaaggaacattatgataaaccaggttcaccaacttgttcagacgttttccctgcagagcgctcatctcgtcccgactcatgcactctttatttttattccaaatcataataaataatttttcaatgtgctaatctgccaatgtactggcacacaaacccactgtatggcaatcggcacattatcctattagcacattattttcaatgatcttcatgaaaagctctcatgcgttcctccatcaccggataaagttcatcgcgcatccgtgacgtacaggcgcggacaccttcctgctcgctgccggtagtagaaagcgagatgctgcttaccccataatacaataactcccggagcaattcaccccctgtcatatttccgtaaccaatggtaaagaagaaaccatctcccaccacctgggtagcatcatagtcatatacgatatggaaaccattgtcggtaaatattttcttcatgcgttccgcacgacgggcatattcgcgggtatcttccacaaaattgattttaccttcggtagacagacgaagcatttcagcgtatgcatactgagtggaagccgtacatcccgaagtaatcatataaagaatggaagcaatcagcgtaggaccgaacacccctgcatctttataccgttctgccaaggcagggaactggcggtcgaacagtttgtcgctgatacatgccaatgccatacgctgtccggcataactgaatatcttggaagaagaaagcatcaggatataattatccgtatatcttgccacagtgggcggataaggcggttcgaaaggatgccccatatcccgacggaaatccatgcagaaataagccagatcttccatgacaatcacatcataccgggttgccagttcaccgattatctgcaactcctcctcttccagacaaatccatgccggattattcggattagaatagataatcgctgctatatcgcctttactcaggaaactttccaatttctcacgcaaggcctgtccacgataatgatagatatcaaactcttcccactccacgccgataatgcgaagctgggatttctgaataggaaatccgggatcaatgaacaataccttgtctttccccggaatacgctgcgtacaggctatgaacgagccgaatgaacccgccaccgacccggtggtaggcacacaagcgcgcggagagatatccagattcaagaaagcttttacaaaacgggaagcctcctttttcaactcgggcactcctgcggcagccggatattgcgatccgactcccctgtccaaagcagctttctccgcttcaatccctatctgattggcggcaagaccgggagatccctgatccatgcggataaaaggaatccccgtttccttttccagatactgggctaccaacagcacatcaccgatagtagcctgtgcaagattggcgatgtgcagttccttcaccgccttctccactaattcttcactaaatatcttcatggcattaccagttctttaccgcattcaatcctatatcaaaagccttctgattcatttcaacaatcttctcaccttttgcagcaaacacacgccctatgctttcgcgcaactgttccggtgatacgatttcaatatacttcgcagccatgcccagcagaatcacattcgcgcatttaggcatactgttttcttttgccatatcctctatttccaacttcaccacatgcggaagactctccaaagccctcatcagatccacttcttcaggatagtcgggaatgttcttgaaaggattagcggaagtaatcacccaaccttcttcctgcaagtaaggcagataacgcaacgcctccatcggttccatggaaataatcagatccgcctcaccctgagcgatcagatccgaataaatcgtttcgtcggatagacgcagattagactgtacatcccctccgcgctggctcatgccgtgtacctcggcctgcttcaaattgatgccttctgccgtagcagcttctcctataatagtagcgatagtcaggataccctgtcctcctacgcccgaaagtatgatatcttttctcatgccttatctgcttttttctgtcttagtttacgattcaatgtctggatacactctctgcgcggaataatgacagacacccctttatattctatttcctcacgaatggtacgggtgatttcttccatattctttggtaatggaaccaccacacgcacatgttcgggttctacccctaatcccaggcagatcgcctcgaatttgttcgtaccggcagaatcctgtccaccggtcatggcggtagtcaggttatccgaaatcaccaccgtgatattggcacggtcattcaccgcatccagcagaccggtcataccggaatgagtgaaggtcgagtcaccgataacagcaatggccggaaatccccctgcatcggaagcacctttggccatggttatggaagcacccatatccacacaactgtcgatagcacggaacgggggcaacgcacctaatgtatagcaaccgatatcaccgaaaatgcgtgcatccggatattccgcagccaccttgttcaatgcatcatacacatcccgatgaccacatccctgacacaatgcaggcggacgcggcatcaccacctgaggcttgccaaacggacgtttgattccccatccgatcgcctcgcccacattatccggagtcaattcaccagtacgcggcaaagtttccgtcaagcgtccctttacctcatagtccgaggaaagtatcgcttttacctgctcttccacaaacggctgaccatcttccactaccagaacatatccgcagcggtctgccatcgtcctgatttcttcagccggcaacggatactgcgaaactttcaataccggaatatggcaactgtccgtatccgcctccttcacataattataaccgataccacaggctatcactccgaattcataatcatattcgggattcaacccttccagataattataaggagatttggaggaaacttcttccagcttctcctgctttttcactaaatccagatattgtttacgcgcattacccggcagcaatacccagtgggcacgttcatgatcaggattcaactgattttcctcacggatatcggctacttccacaccggcacgcgaatgtgccagacgggtaaccacacgcatcagcaccggcaacttcagtttttccgagagtgtatatgcgtaatccatcatatcgtatgcttcttgttgggaagacggttccagcatgggaatcatagcaaattttccataaaaacgtgaatcctgctcgttctgtgacgagtgcatggaagggtcatcggcagccagcaccaccagaccaccgttcacgccggttatggcagaattgacaaacgcatcggcagccacgttcatgcctacatgtttcatacataccaaagcacgttttcctgcgtatgacatacccaatgcagcctccatggccgttttttcattggtacaccaagtgctgtgcaattttctttcctttgccaaaggattattctggataaactctgtgatttcagtggacggtgtacccggataggcatatacacccgatatgccggcatgtatcgctccgagggcaattgcctcatcgcccaacaataatttcttttcagccattatctattattttgttaattgtttcatatcaatgtaaaggggtctgcatcatccaataccgggaatttcttcctgaaagcctgcaatgcctccatatcgatatcagccgataccgcactttccctgctccacggacattcggctatcgtttttccgtagggatcgatgatggcgctgccacccgaatattcacaggcaggatcagttcccatgcggttcactccggccacatagcactggttctcaatagcccgcgcccgaagcagcgcgctccaggcatccacacggggagtgggccagcttgccacataaagtatcatgtcgtaatcccccaggttgcgtgaccaaacagggaaacggaggtcataacatacttccaaaagaatacgtaccccacggaagttcaccaccacacgctctgtgccggcagtgaaacgcttgtgttcgcccccgaaggtgaacaaatgtttcttatcataatgctgcacggctccgtccggatggacaaagtaaaaacgattataatagtttccattctcacatactgctacactgcctgcaatagcacaattccgctcggctgccttacgcttcatccagtgcagggtttcactgtcggcgctctccgcaattccttcgggttgcgtacaaaaaccggtggaaaacatttcgggtaaaacaaacagatcagcatccagcagacagcttatcgcttcgtccgcccttgctatattggcctgtggattggcccattctatatttctctgtagaattgttattttcattgtttttcatattataagacccacaaaggtaacaaatataataagatagcaagcattttattactaactatttcctttcactcccttttttcttacatgttttcataaatatcccctatttattcctcataaaaaaagcagcccagcaaggacaagccttgctgggctgcactaaatgccttatttttgtctcaaacagtaacggtta

SEQ ID NO: 3913 - DNA, 59465 bp, Unknown
  gut microbiota DNA sequence
gatcatccttgcccggttcaccctgtgcgccgtcctggcctacagctttaacggtagtcttctcaccgttgcatacccaaaaaccatcttccgagatagtccattctgtacctgcagcacctgcttcaccgtccttaccgttggtaatggtgtagctgctaccgtcattgaaagcaacagtgaaaccgcctgtggcaggagttacagaagtaatccagttggcagcattgatttttgcttccaggtctttgatttgactttcgatgccatccacgcgtgaagtcagctcgtcaatgtcatcatcgtagtctttacaagacacaaatgttcctgttgacgaaaccattaaggctccgaacaggattgcacttaaaaactttttgttcataatagaaaaactttaaatttataaatttaaaaaactaaaattggttatacataccatttattataaaaggacttaattgttttcctcctgtttcagcggattcctctcgtgtgccacatactgccggggcgtcatgcccgtcacttttccgaacgccacatagaaagggcttttcgaaccgaagccgctgcgtacgggaacttcctctatggggcatcgtccgctgcggagcagctctttggcgtattccactcggtaagtgtttactagttctttcaggttgcagccgaaatagcggttcaccacattacttaaataagtctggtttgtctccagcatcgcactcagtgtcttcagcgaaagagaggaatcgaggaatacttgacgcacttccatcaggtataatatacctttatatataagagcatctatccggcggacgtccgtccgcaacgcaaactccttctcccatcggcgagaggcggcacgatagagcaaagtcttttggcgcaccgaagtgtagcgggtctttttacgtcgcagaaacaggtattccattcaattcttttttcgtttttttatttgcttattttgtcgatctcttagtaagagatcgacaaaatagatgtaatatgcataaaatcaaataattaaatcaatgagaagtgggctgttgagagaaagattaaataagaaaaaaggcttttttttgctttagatcgtatttttttaatgaaaagtgtattagttatcaaaactttccttatttttgcacgagaattatatatctcttactaagagatcgataaaaacctatcttgtattttgtagtctaaacaggtaaaaatcaattatttatctcttcgttttattatatacttgggcgcaggatgtaactcatgtgtcagaaatgagtaccgctttgtactttattatatggcgtatgattttttctatcggcatccagaattcatggagaagttggaataatgctggacggaatgaagatgaatgtgtcaaaaccaaaatgacagctttgaaaagttgcagatagtaattataacgcgtaaaagggtcgtatcaaactctgtattgagtaatgatacgatcctttctttagtcttttaggatgctcaaatttcagattataagttcatgttttcaaaaacaaagttttgataccgcggagtgaatttcagtttcgggaaacagaacattgaacggtggtgatggaatgagcatatattactttcgggaaacgctttacctctctttgataatacttacacagccggcaccgataatcaggaacactccagccaataccagcatgtttacttccggagcgacactacccggactggtaaacatcttcagtacgatacctcctaaagaagctgcgacaatctgtggaacacaaatagttccattgaataatcccagataggttcccatatgtcctcctgttaatgcattggtcagaatggtaaagggaagggccagcatggctgcccatgcgcaacctatcaggatgaaggatgcaaataaagcatattgattatggataaagaaaatggagatgaatccaatgcctcccaataccagactgagtacgtaggcaaatttgcggttctgaatcatcgggatgatcgttgcccaaataacggaaccgatggcttggacagcaaataagatcccgacccaatctcccgctgtctggtattgtgcggattgtgtatccagtaccactctggaaacaccgtttgtcatggttgttatgaccggtgtgtcgaacacattcaaagcaactgttccattggtgtaagtccacatgaacatgaaggctgcccagcagaaaaattgtaccagtcctactgtccaaaaggctttgggagccttgaccagcaatttgaacatatttgtcttttcttttttgctttcatgggtgatgccatgatatgctgcatattcttcgggaggaaattcctttactttggccgaagtatagatcacgcatagaatcagtatcaatgcgccgatgtagaaagaatagatgacagagtcgggaataacacctttgggagcaatattactgatgccgatggcggcaaaaataaacgggaaaagatatcctgccagactgccggcattacagagaaaactctgaatggagtaagccagtcctttttgtttttcattcaccatatcgcccaccatcatcttgaagggctgcatggccatattgatagaggtatcaaggaacatcagtgatatcagaccgaataccatagctgcactgactgtcattccgaaactacctgcattggggagcaggcacatgacgcagacagcaaccagagctcctgcaaacagataggggatacgccgtccgaaacgcgtccaagtgcggtcactcagtgcgcctatgatgggttggacgatgattcctgccagcggaggtaatatccaaaaatagcttaaactgtgtgggtctgctcccaaagtggaaaagatacggctgatattcgcgctttgcaaagcgtaggctatctgcacgccaaagaatccgaaactaatattccatagtttccagaaacctaaatcgggaatttttttcatggtatgtgtgttattgattatcgttggggtagggagtcaccacagacagccctaggctgtctgtggtggatggttagaatctgccggtggtgtcaatcatctctaccagcttttcattgaacttcttgttctttatcagttcttccaaagtgagatgcatacgatatctccagtaatgtcttggattggcaggtacgttgatacgttccgcgttcacatcgggatagcggatttcttcgtctattgacagccagtcctgaaaggacaggatgcacagcaatgacggacattccagatggtggcgtactatttcctcgcaaacccatcccggggctgaaaccggaacttctccccagtgtcccattacatggttgtagtagcggcaggtctgttcataatcttcttcccaccatccccgcagagtagacatgtcatgagtggaaatagtacagaccgagcggtacggatattcccacacgtgaccgaactcgtgtttgggattcttgggcatacgttggatttccaggctgagtatttgcaactggtccattacccaaggcacacagtcgggaaccattcctaaatcctctccgcacaccagcatagaagtggcttgtgtcaggataggcagctttttcatcgcttcctgataccagaactggttatggcgttggtaataataatgattatacagacggttgaaagcatctttctccttccagtcgaggcgcccgaagatgaaatcattctgaacggcaattcttggatggtacatggaggggtgcttgcggtcgggaacaaataatacattgcttatcaaggcatatactccctcgcgtatatggatactttcttcatctttcttatcggagaaataagcctccactttgcgttgggtatcatattccgggcgcatttcataaatgtcatcgtgagcatgttgtacgaatgtttcttttacaaaggaagctttgtcaccaaacatcttgtttagcatctcttcgttgatgaacggtttggtcatgaagtccttttggaacggcagcccgtaactttgaatttcgtccacactcataggcaatgccggtacaaactgtcccagcaaaccatgtaccgaatgagatgggatttcccagatacggaagaaaccaagaatatggtctatgcggtaagctgtgaaatactctgccattttgcggaaacgcttctgccaccattggtagttgtcttgttccattacctcccaattataggtgggaaagccccagttctgtccgttcacggagaatgcgtcgggcggcgcgcctgcctgaccgttcatgttgaaataatacggctcaatccatgcctccacactgttgcggctgatgccgatagggatatcacctttaaagataatacctttttcgcgggcatagtttcctgcatcaagtaattggatatgtaaatggtactgtgtgtagtagtaaaaggcgatttcttcataacaagagctgtccggtgcgcataaggctgctatttcttctgccttgtactctgtatgctcaggccattggctgaaatccggagtgccatacagatctcttagatagctgaatgcggcgtatggcagcagccaatgttcattttcttcaaagaattttttgaattcggccgaagccagcactttccttccggtttgttggaacatcactttcaaataggcacgtttggcattgttcactgcttcataatctatttggggaagagcgttcaattcttgccggcgggcttcaaaaacagccagcgcttccttatccttcatcttacccagctggttcaggtcaatatacatcgggtggaatgcataaatggaaatactgttgtagggataagaatccatccaggtatgggtaatggtcgtatcgttgatagggaggatttgtacagcttgctggtgggtctttgccgcccagtctatcagtttcttcaaatctccgaaatctcctactccaaaacttttctcactgcggagagaaaatacagggatagctgttcccgccaccttacgggccgatgaagtgaaatgaacttcagtttccggtgtcaggtaaatttctcctttttttaattccggattattaagcatccggttgtcgtggttctcccattcctctacctgcttgctgtcggcgttgcaggctacgaacttataacttagcggaaactccaaagtagaaacattcagtgtgatggtccactcgttcggttgtatttcttccatcaggaccgtcttttgaatatcccaattgcctaaagccgggcaatctccactgatagccagcacttgacgcttatgatgcagacaagggcataaggcccggaaagtaatgcttccatcggcgcttgctgtgacttttatagttgtctcagactgataatcaccactgaaggcggaactgtataagtaagattcagccggaaggtctttccagaaatcatttaatatgtagtggcagtttttcttttttccggggcaaaacaaatgagccatggttccgctttcacggcggatgcactgtccgtcacgatatactccatagcggtaggaaacaggcacgcatgcagggaggtccggcatttcagcttcaccttcccaatgttccccgtttggagtgcgaaggatgataggttcactattgtttccgtccagtatcacccccagttcttctccccaggctgtacggtattcaattcgaaatgtgagtttcatgttattattcgagttaaatggtttaatgtcccaaaattaagactttctggcagaatatcgtctttcatccaattaatttataagaaaaatgaatgaggttatgtttgttaccggcggtgaactattacaatttctgcccatttcatcgaaaaaaagagtcggtatgagtatctgtttcttcgggcatttaaaggaggaaaaatataaatggggtcaggttggttttcattgataaaaaagccccgatccagagaaaagcaggatcggggctacctcaaattgtaagatgtgaggatggattttgattaaaaaataatgaatgaaaaattacgcgtctatattcgcatatgtcgcgtttttctctatgaactcgcggcgtggagctacatcgtctcccatcagcatggagaagatatagtctacgttggcggcattgtcaattgttacctgtttcagaatacgcgtttcagggttcattgttgtttcccacagttgttcgggattcatctcacccaaacctttgtatcgctgtgtatggattccgttttcttgtccgtcaccatatttttgaatgaatgcctggcgtgcttcttcggtgtagcagtattcactgatttttcctttgctgcatttatacaatggcggattggcaatgtacaaatgtccgttttctataatttccggcatatagcggtagaacaatgtcatgataagggtgtcgatgtgagaaccatcgacatcggcatcggtcatgatcaccactttgtgataacgcagcttgtcgatgttcgcttttttgctgtcatcatttccgtccacaccgaaacggacacccagggcggtgatgatattattgacctcatcgctttcaaaagccttgtgccacatcgctttttccacattcaggattttacccctcaaaggtagaattgcctggaaggcacggctacgtccttgcttggcagaaccacctgccgagtcaccctcgaccaggaatagttcacattcttccggattacggctcgaacagtcggccagtttgcccggcagtccgccaccgcccatcggactctttctttgaacagattcacgtgccttgcgtgcggcgatacgcgctgttgcagccaggatcactttgtcaacaatctgttttgcttctttcgggtgttcttccagataatatgtaagcgcttcgcctacagcttggttcacggcaccactcacttcgctgttgcccagtttggtcttggtctgtccttcgaactgcggctcggctactttcactgaaatgacggcaatcaagccttcgcggaagtcctctcccgaaatctcgacttttgctttttccagtgctttggtatcttccgcatatttcttcagtacacgggttaatgcgctgcggaaaccggcctcgtgtgtgccgccttctattgtattgatattgtttacatacgaatgcaggctttcacgatagcctgtattgtacatgatggcacattcaatgggggtattgtttttttcggtattcagataaatgacatcattaatcagcgcttcgttgttacggttcaggaaacgtacaaactctttcactccttcgtccgaatggaatatttctttcttgaagctgccatcttcttctttgatccggcggtcggtcagtgaaatggtgatacctttgttcaagtaggccaattcacgcatacgtgcctgtagaatgtcaaacttatattcggtaacagtgaagatggtatcatccggccagaaagtctgttttgttccggtaatatcagctgttcctacttcttttacagaatacaaaggatgtccgcagctgtattcctgctggtagattttgccaccgcggaatacctgtgtggtcatgtgagtagacaaggcattcacacaagaaacacctacaccgtgcagaccgcctgaaaccttgtaagaacctttgtcgaacttacctcccgcgtgcagcacggtcattactacttccaatgcagatttcttttctttttcgtgaaagtctaccgggataccacggccattatcctgtacggtaatggagttgtcttcattgatggtgacttctatatgatcacagtagccggccaatgcctcgtcgatagagttgtccacaacctcgtaaaccaagtggtgcaatcccttttcgctgatgtctccgatatacatggcgggacgtttacgtacagcctccaaaccttccaatacctggatgttactggccgagtaattgttttcgccgtttatcttttcttcttcactcatgtttgattcaattatcttaaatattagctttcaaagatacgaaaaattgctgagacaggcagcttttatggactaaaaaacgtaaaaaagaggggattggacaggtttggaataaggtctgtccgtgaacgccgggaaaagtaggggagtgatgtatttatttcgagggtaagtcttctgaagatcaatggggcttctttttccttcaaatccttcattgacgcttaacaggctttttatcagcatcttatcatgtatgattctcttctaaatccttcatgaatgcttcagattcttcagggctgttttccgcggagcgaggacttgcgtattttttcgatgttacgtttgcaatatgtattgcttgtgttttatgaaacacataaaaagacaaaaggccggattgaaaaatcctgcctattttatcttttagtttaagactttgcttaagcgagtttgctaatgtaagcagccaattttgacttcaagttagcggctttgttcttgtgtatgatattggtcttagcaagcttgtccaacatcttctgaacgcccggatacattgcaacagcttctgccttgtcagtagttgcacgaagttttttaacagtgttacgcattgtttttgcataatatctgttatgaagtcttctcttctcttcctgtctgattctctttaatgatgatttgtgatttgccatttcgactaatctttaattttgttcttttattatttttatttgtagcccgtgggggaatcgaacccccctttcaagaatgaaaatcttgcgtcctaaccgatagacgaacgggccgagccttgattctgccgagccttagcttggcttgctttcggagagtgtttttctcttttgcggttgcaaaggtaggaactctttttgaattgacaaaatattcggcatatttttttgtaaatacgtgcattttcatctaaaaaacctatttttgtatgttccaacgatgcgtatatttgtgtggaaaagcaaaaaacgtattgcggacaacgattacctagtatataaaagagagaaagagtatgcttcaaaagacggtgggaattgtacttcataccttaaaatacaatgatacttcgaatatcgttgatatttatacgcgcgagaatggccgtgcgtcttttcttgtgtctgttccccgttcacggaaatcggcggtgaagacggtattgttccagccgctttccatgatagagtttgaagcggattatcgtccgatgtccaatttgtatcgtataaaagaagcgaagtcgtggtatcctttccgcacgttgccatacgatccttataaatcttccattgccatgttcttggcggaatttctgtatcgtgctttgcgtgaagaagcggagaacgggccgttgtttgcttatttggagcattctatccggtggctggacgaatgcgacagaagtttctccaattttcatttggtttttctgatgcgtttttcacgtttcctcggtctgtatcctaatacggaggattatagggaaggatgcttttttgatatgctgaatgcctgcttcgtgtctgtccggccattacatggtgcttttttgaaaccggaggaggcttcacgtatcaaccttttaatgcgtatgaattatgaaacaatgcatctttttactatgagccgtctggagcgtaaccgctgtctggttattatgaatgattactatcgtttgcatctgccggattttccggtgctgaaatcgctggatgtgctgaaagagttgttctcgtgaaatcctttctatctggatgtgttcatgttcacgcctttttttatttatcgtttcactttagtgaggaagctttagcactctagtgatgaagtttcatcatcctagtgaaacaacttcatcactaaagtgaaacgatgaattagtccaggaagcaaatgagtattcttcctgtcttgaaagttaagatggaaagcaggtgcaatcttttgaccacgatattgtatgactcattcttgtcctttagcatgatggtcaaggacatcggtccggtgcgggtgttgcggcggctgaaggtgctgacagcgcactgaaggaactactgtcagccttatgcgctgtatatcagaattttattgtggctgaacacactgaaggatactttgaattccagggtattggtgaagtgagaatgataaacgggaagctggatagggtactgcatacgtttgcttctcactgattttataaaaaacgaaacttctgcccgtaaagatgaatcggggcagaagtttcgtttctcgaatatggattgccggagtattatcccagtaattctttcactttagccgagatggcacgtccttcggctttgcctgccaactttttggtggcgacacccatgactttacccatatcctgaggaccggcggcacccacttctgcaataatttctttcaaagcggcttccagttcttcgttactcatttgtttgggcagataggcttcaagcactgccacttgggccagttcggcttcagccaagtcggcgcgaccctgaccttggtaaatggcggctgaatctttcccttgttttaccagtttctgcatgattttcaatgcagcgtcatccgtcaaagtgtcgttggcgcccggtgctgtctttgcttcaaggaagaattttttcacattacgcaaagtttccagtttcactttgtccttggctttcatagcctctttgatatcgttgctgattacgtcaaataaatccatggttcttttctattttagttgttaaaatgtgatcgttattccgccgttttcggcatcgttattgaatgtttcctcttcttcggctattgctttagactggatactttccaatacagttttggtacgttggaaagtaggggtcgtttccaccatactgataatgtcatcattgtccagatcctccaggctgaagatgtaaatgttatggcgtttcttcttgttgctgttcttgaaggtgtctttgccgtagtaatctccacgacgttcatccttgcgctgttcctcttcttccagttcttccagtttcttttgttcctcgatggtgcgtttgttcatcatgttgtccatgcccggtacatccttgatgccgaagccggtggcaagtacggtgaacttcacctgttcttccagcgactcgtcgatatagagcccccatttggtttccacgtctttgccgaatttgctcatgaagtcatgaacctcattcatctcttccatcatcaactcgctcttggtgctgaaagagatgttgaacaggatcttcttcgagttgaagatatcgttgttgttcagcagcggggaatggagcgcatcattgatagcctggctcacgcggctttcccctttgccgtatcccgtactcataatggctaccccaccatcttttagtactgttttcacgtcattgaagtccaggttgatggtaccgcggatagtgataatctcggcaatactcttggctgctatggataaagtgtcatccgctttgccgaaagcgttcatcacgctgaagtccgaataaatatcacgcagacgttcattgttgatcaccagcagggcatctacatgctggctcattttctccacgccgtccagcgcctggtcaatcttccggtttccttcaaaaaggaacggaatggtgacaatacctacggtgaggatatccatatctttggctgtcttggcaatgatcggagccgcaccggttccggtacctcctcccattccggcagtgataaataccattttacagccgtcgttcaacattccttttacgtcttctatactttcttcggctgcttcacgtgcacgctccgggcggtttccggctcctaatccttcttttcccagttgcaacttcacgggaacgggggattcggccaacgcctggttatctgtgttgcacacaacaaatgttacatcgtgtataccttctttatacatgtgatttacggcattgccgccgccacctcccacaccgattactttaatgatagtcgggttttctgccgggaaatcgaatggcattatagtttcatcagacataatcttctatattatattaaggtgatgtaattcgttattattcttccagaatccttccaaacaagtcggtcagccgtttgatcggattgttggcttctttcaaactcttgatttctttttccaggtcgcgtatttggttcaaagcttctgccactcccagatcgcgtgctttggccagttgcgacaaggcatttttgtatttgcctgcctctttcagctcttttgcgtttcttatcaggctctcgcaagtggcttttcgcagcttctcctcttcctctgctttcttggctgccgctgctattctggctgcttcttctttctctcttttccttttgtcttccacattctcgccgctttcatcgaagagaggtacttggataggacgttccgggcggtaacagttctctttcccggctcctagcaaagcgatgattgtattgcatgtaccatcttttttcagttccatcatgccacctttcaggcttagctggctttctttggccattcttaccttttctactttggtacggttgctgaatgcttcctccatattctttagattggcggcaccgccggtaatgatagctcctgccagcagtttgtcttcatatcccgaaagaacaatctggttccatacattggccagtatctcattgacacgcgcttctacgatgtcttccagtaagtgtgactcaatactgcatttcccgtccagagagtaggtagggttgtcatctccgtcttccgacttgtcggcataggcattgccgtatttctttttcagttcttcggcatcttcctcttcaatctgctggctgcaaatgtctttggtgatgttgcttcctcccagtgggatgactgccaaatggcggagtatgttgtttttgtagacagatacggtagtcgtatctgcgccaaagtcgatgaacatgcagcccgagcgtttttcactgttggtcagtacggcattggccagagccaacggtgagatgatgtagtcggctatttcgattcctgcctgtttgaaacatttgtcaatgttctgcttcacgctgctgcgggcgatgatattaaggaaacgcccttctatatgatcgctgggaactcctacaggatcggccagcaggttgatgcctactttatattcctggggggccacttccagtatttcctggtctatgatggggacttcgcggttgctgtccatgatggagtcaatcagttcctgtgaaattttggtttcttcttccagatgacgtacctccgtattacggatggtgcgtagagattgtcctccgatacctacatagacctttccgatagaagcctttaatgtcgattccagtttcttgataatcgaagtaaggctttgtgcggttttgtccagattgtaaatcactcccttacggataaaatccgaagagttttcgctggcgagggccagcacttgtatgcttccgtccgcatgtttctttcctgcaatacctgtgatcttggaggatcccagttctattgctactataaaatctgttgctgccatatcttacttctcttttttagtacaaataatctgattattaaattccagactgatgcggctgtacttgttccagcctacttggttcagtcctttctcataaaaagtttttagtttctcgaacttttcctcataattcccgggcttgcctaagaatatgatatgttcgccaacccgtggaaccagttccagttctttggcttgtgtcacgttgatctgctctatctgggcatcccatagcggatgggcctgtagaaagactcctaaggtatatagttccttgacggcaaaatcacgatccacgtatcctgtaacaacagctacgtgtgccgaactgttgggtatcggcatgatttttcctttattgtcaatataatagttgtctccgttgtttgccatcactctgaggatggggaggcgctgtgtcacttcgatacctatcttgcatcccggtgtacggtaacattccacattttcaatcaagggatgttggctgagttcttcttccagcaggcgggtgttgatgtcacccatcttcttacccacaggggagagcttcttaccgttcagtaagcggagtatccctttctggctgatgaaaccatggtctatactgtccttgataatcaattccatacccttgcaaacctggtcggcaggcttggtgttgaaagcggtaacggctacaataaggtaggcggttatcagcaacagaaacaggagtatgagaattttctttatcattttttattcagtaatccgcagatttggggtacatagttatctatgtcgcccgcacccagggtgattaatacttctatatctttcttgctcagtacgtctagaatttcttctttcttgcacatgctcttctcgatgcccggacgcagatggtcgtaaatcagtttgctggtgacgccggggatgggttgctcgcgtgccggatagatatctaccaggatgacttcgtccaacaaggaaaggctgtcggcgaaatctttgtagaaatcacgggtacgtgtgtagaggtgcggctggaaaacagccgtcagcttcttgtcccgatagagggcacgcatggagagtatgctttgttttatctcggaaggatggtgcgcatagtcgctcaggaaaaccaccttgtcgttctttatcttgaaatcgaaacgacggtctactccgcggaaacttgccatacctctctttatttcttcatcagtcaatccgctcatctgcgccaggaccatggcggctactccattttctatgttgatgctgacggggacacctagctgtatgttcttgatgttgcctagcggagatacatagtcaaagaatatctcaccgtttccgatgcggatgttctctgcatggaagtctccttcttctttagaataggtgtatagccggactccgtcctgcagggcaggttgcagttcgatgcctttccgcataatcaatgcgccgcccggccggatgagtgaggtgtattggcggaaactgtccagataggcctctttggttccgtagatatccagatggtcgggatcggttgcggtaatcaccgatatgtagggcgagagccaatggaaagaacggtcgaactcgtcggcttcaataaccatgtattcactgctgtcagacaacagcaggttggtgccgtaattctttgagatgcctcctaaaaaggcgttgcatcctacatgggattggtgtaacagatgggctgtcatggtagaagtggtggtcttaccgtgagtgccggctacacaaagtccttttcctgcatgggtaagcattcccaatacctgcgaacgtttatgtatctcgaaaccgttttcccggaaataggtaaactctttatgtgtatcggggacagccggagtatagacaaccaatgtagttgccgggtcgcggaatgcatccgttatcagttccgtgctttcttcgtaatggatggctgctccttcttctatcagcttttctgtcagttcactgggcgtacggtcatatccgcctaccttcttgccttttgacaggaagtagcgtaccaatgcgctcatgccgatacctccggcaccgatgaaataaactgattttaatgtgttaacgtccattttcttttctgtatttatcagccagtttgaatacctcccgggcaataacgttggctgagtcggtaaaggctaatttagcaatatttgtacttaaacttttcaatgtttccggctgtttcacggtttcaaccgctttgtccagcagagcttctttggcagcggcgtccttgatatagagtgctgcgtttttattgaccagcgccagtgcgttcttggtctgatgatcttcggccacattaggcgacggaaccagaatgacgggtttctgcaacaaacagaactcggagatggaacctgctccggcacggctgattattaaatcggcagcactgtatgcggcggccatatcgctgataaaatcggttacgtggagcattggtaactcaccggcctgggctactgcggcacgtgcttcgccgatatatattttcccggtttgccagataaactgcgcgccggatgctttaatcttgtccaaaccttccatcacgcagttgttgatggtgcgtgctcccaagcttcctcctacaatcaggattgttttcttggatgggtccagcccgaaggagcggatagcctcttcacggctgatgtgatggttgcgcagtccttggcggacagggtttccggtcaggataatcttgtctttttcaaagaaacgttccatgccgtcgtatgccacgcatattttgcaggctttctttgccaatagtttgttggttactccggcataagagttctgctcttgtatcagtgtcggaatacccatcatcccggccattttcaaagtaggaccgctggcatatccgcctacacctactgctgcatgtggcttgaaatccttgatgattttacgtgccaatagctggcttttgaccaatttgaaaagaaccgaaacatttttcaataagttcttacggtcgaatccggcaacaggtaatccttttatagggtatccggcagcaggaacgcgttgcatctccattctgccttcagcgcctacgaacaggatttccgcttcgggatgttgttccttgatggcgttggcaatagagactgcggggaaaatgtgtcccccggttcctcctccgctgatgatgattcttaaattttcttccataattcctttttagtcgaattattcgcaaaagtataaataatacttttaaaatgaatggtttatattatatttcttcttccggctcccgcttcccggctgcgttcagcattgccttcaagtcatcgggcagcgagttctcctccggcgggagggaagtggtggcattgtcacccgacggaagtgtggtaatggcttcctgcatggcagctaccatttcctgatgccgttcggtcttggctgccagttcggcttctttctgtgcttgttgctcggcggctttctgttcttctttctcagccacgtagcggctgacacttaatatcataccgatgtaggcgcagttgatgagtgtagaggttcctcctttgctgataagcggcaggggttgtccggtgacggggaacagacctacggccaccatcatgttaagcatcgcctgagataccagcaacagggcgatgcccatcaccagaaaggcaggaaaacttttttcacttcttcgggctattttacccgcccgcatcaacagccagatgtagagaatcactacaaaggcgcctcccagcaaccccagctcttctatgattatagcaaagatgaagtccgagaatgcttgtgacaggaaatcccgctgcacactgttacccggcatctttcctatgatgttgctggaggcgatagcaatattggcgtgtgctatctgggcgtccttgtctatatcatatttggcggcgggaacggcttctttgtcctcaaagaagccttttatacggttctgccaggtttctacacggtgcatcatggggactttgttcagtttgtgtgtgggcataatcatcactatgcctacaaaaaaagccaccataactccggctattcccattaacttggccaattgcttccagggtacccggccgatcaccatcattaaaaagactactccgaaaagcagtgctgcggtagagccgttttcgggagcaatcagaatgaaaacaattccggtgatccacatgatatatttaaatgctttcggattggcattgtcttcttcctgaaacttggatagaataaatgcggtgacaataatcacggccatttttgccagttcggaaggctggaactggataccgaagaaagtcatccaacgggctgcaccattgacacggtctccggtaatcaatcccatacccattacaaatatcagcaataatgtcgataggggcagcaggaagacgggaaacacacggaaatatttgtagggaatgttatgtaccagtaccacaatgcacacacctaccatcaggatgacactgtgctgggtgataggtccccaatgatccccacttttgtaggtaagcgtgctggcggcactaaatacctcgacgatagagatcagacaaagaaacaggaaaataatccagattactttgtcgcccttgaacaagtcttttatcagatccattatctatataccttaatactatattacaggtttcttacacattccttgaactgctcgccacggtcttcgtaacttttgaaaaggtcgaagctggcgcagcatggacttaataatacggtttcgcctttcttggccatccggtaagcagcgtctacggcatccttcatgctttgtacatcggctacaggcaggccgaacttgtcaaagaaatcatgcaatttctcattgtgcaatcccatgtagatcaatccggtacatttttcttttaccaagtcggcaatttcgttatagtcgttgcctttgtctttcccgcctaatatcaggatggttttggttttcatgctttgcaaagcataccagcaggaattcacattggtagccttggagtcattgatataatccacccctcttacccggcagactttttcaaggcggtgttccactcccttgaaatcacccaaggcctcgcggatacactctttgcggatacccgccaggttggcagagataccggccgccatggagttgaacagattatgggttccggtcagcgccagttcctcctgttccatgttgaaagcgattggttctgtaaaataaaccttgtcctgttccacatatgcggcggttccttcctctttcctttcggcaaaagggtagtaatggccatgaatgccatatttgtgtaattcacgctggatgatggggtcatcgttccagaagatgaaggcatcgtccggggtctggttctggataatgcggaatttggcatccacatagttttgcatctggtggtcgtaacggtccagatgatccggcgtgatgttcatcaatacggcaatgttggcatggaacttgtacatgttgtccaattggaaactgcttaactcgatcacataataatcatagttgcattctgctacctgatatgccagactttggccgatatttccggctagtcccacattcatacctgctttcttgaagatatgataaatcagcgaagtagttgttgtttttccattacttcctgtaatgcaaatcattttggcattggtataacgtcccgcaaattctatttcggagatgataggggtgccttgtgactttaacttaagaatcatcggggcatcattcggaatacccggacttttgattacttcatccgcattcagaatgagagattcggtatgtttgccttcttcccattcgatgcctcgctcgttcagcatgtttttgtatgtgtccttaatcgtggacatgtctgaaacgaaggtgtcgaaaccttgtttctttgccagaacggctgctcccgcaccgctttctccggctcctagtatgacaattcttttagccataatcttcgtttatcttatcttatctttaatgtaataatcgtaattgcagcgagtacgatggtgacaatccagaagcgtaccgtgatttttgactcatggaatacgctgttgggtttcatgaacagataactgcaattggggtctaactgtgctaatgtagtgcggaaatggtcgtggataggggcacgtttgaatacgcgttgcaaatgtcctttcttttttccgcttttgaaatatctcacctgtagaatgaccgaaaggttttctaccaagaagattccacagagaataggtataagcaactctttatgaatgatgattgcaaataccgctatgataccaccaatggtcaagctgccggtatcgcccataaatacttgggcgggaaaagcattgtaccaaaggaaaccgatcagtgcgccgatgaaggagcagataaagattaccagttcttcactgccgggaatgtacatgatattaaggtatcctgcatattcgatgtggctggatacgtatgccaatatgcccaaggtaagaccgatgatagcagaatttccggctgccatcccgtccatcccgtcattcaggttggcaccgttagatacggcagtaactacgaagatggtaactaatacgaaaataatccaacctacagcctgggcattgtctcccagaaaacctacgaaatcagcataatccaaattgttgttcttgaagaaaggaatcgtagttttggtggacttctgatcttgttccttgtgcaccacttccacaatttctcctcctctttgtatttctacgttctcacggataaccacgctcggacttaaatataaggtgagtcccacaatgagtcccaaacctacttggccgatgatcttgaatttgccgtgcaacccttctttgtctttacggaagaccttgatatagtcgtccaaaaagcctaacgtacccagccaaatggtggtaatcaacattaatatcatgtaaatattatgcagcttccccaacaaaaggcaaggtatgagaattgcgacaataataattatacctcccatcgtcggcacaccaacttttttcacattaaaagggtctatagatgcgtcacgttgggtttcggttatttgtttacgtttgagcaggttgatgaaatattcaccgaagatagctgagatcaacaatgataaaatgattgccatcaatgaacggaatgaaacgtaaccgaacataccggctccgggaaaatcgaacttttctaaatattgaaataaataatataacatcttttggttggtttattcattagcaaaaatatctcttaatacttctttatcgtcgaaatggtgctttatacctttgatttcctgataattttcgtgtcctttcccggcaactaaaatgacatctttagcttgggccagcatacaagctgtacggatcgcttctttacggtcggctatgcttatcactttacgcatatcctctttagtcagccctgccagcatatcattgatgatttcctgcggctcttcaaaacggggattgtcagaggtgataatgactttatcgctttgctttaccgcttcttgtgccatcaaggggcgtttgcctttatcgcggttgccgccggcgcctactaccgtaattacatgacctttgccattcaggacctcgtgaatggcattcagcacattttccaaggcatccggagtatgggcatagtccacaatggcggtgtatcccttgggtgagcgcagtgagtcaaaacgcccggcaacggggcgaagagtactcaatgccagcaatacctcttctgtctttttcccaagcaggcaggctgctccatagactgccagcaggttggaagcattgaaacgtccgatgaactgtacattgacttccacattatttatatcaagcagcattccttcgaatccatcttccagcacttttcctttaaaatcactcaagctgcgcaacgaataggtgtgtacctttgctttggtattttgagtcatgaccaatccgtttttgtcatccagattggttaaggcaaaggctgttttaggcaaaccgtcaaagaatgcttttttggctttcagatagttctctacagttttatggtagtccagatggtcacgggtaaggttggtaaatataccgcctgcgaattttaaaccaccgatccgtttttgtgctacagaatgtgagcttacttccataaaggcatatttgcatccttcatctgccatgcgccccagcagtttgtttagtgtaatagggtcaggggtggtatggtcagttggaatggcttcctcatctatataattgcatacagtggaaatgagtcctgtcttatatccgaatttacggaacatattatataataaggtggcaatagtcgtttttccgttggtgcctgtaacaccgaccagttccaatttcgaggtggggtctccgtaaaacgtagttgccagtttcccgacaacgtcttccgtatcgttcactttgatgtaggtaacattctcaatcaatgtctcaggaagattctcacataccactgtacgggctcctttttctattgctttttgaatataagtgtgtccgtcagtctgcgttccttttacagcaacgaaaatatgaccaggctctatcaggcgcgagtccatgtttattcccgaaatttcttgggatgcatcacctatgatttcattgactgttattcctttaataatcttttccagtttcatattcttcctgttacactgttaatttaatcgtaattgtatggtttgtcctttgcgcaaagtgttgccggccgggatactttgtgacttcactttaccgatgccggtaatgcgggctttcaatcccatgctttcaagcagatagacagcatcctttgcgcccataccaataacacttggtacaagtttattgttaatgtcttttttgttgaataatacattgtccggattactagtcacatttccccataccggtttgccttcggttgattgttccgaaacttcggatgaatttacatttatccggttcagtacataatgtgccgcacttatatccccgtttttcacatccggaataaggatagaagttgagtcttttgcttctttcaaatcttgtgccagatgtttggcaaatacgcgttcggcaattttactgaacacgctgccggccatcagaccacccgaggcggggagtccaggtttctggatggctacaatgcaactgtatttaggcgcttctgaaggaaaatatccacagaaacttaccaaataacggcgtgtgccattcgtgtacccggcttttccttgtgaaacctgtgcagtaccggttttcccggatacatggaattgcttggatcctgctttctttcccagtccttcgctgacgactttttccaaaatcgtttgtatctcgctgatagccttgggggaagcgatggccgggttgagtatttcaggagcaatatcttccactacctgcccgtctttgactattgatttcacaaaacggggcttgaccattactccgttattggctatagcattataaaatgccagtgtattgatggggggaatttgggtttcatagccaatagacatccatgccagtgcagtacgtgaccaattgctcaagtctttgttggggatgcggatgttcggcttgccggcaccgggaatatcgagatctaacggagtggcaatgcctactcgatgcagtccgcgtacaaacttttccggattatcatgataatgatcatcgatcaaccgtgatacaccgatgtttgaggacaccatcaatgattttgttgtgttgatagtgccgtagcctccacgatgccagttatgatctttcatatagcggccgtgcatcatatagaccccgttaccggtttccaccaccgtttccggagtgatgactccgtcgtccagcgctaccagtatggatgcggttttgaaagtagagcctggctccatcatgtctgagatggcgttattgcgtatttctctgtaaatgccgtcattgcatttggtcatgttgacgatagctttgatgtctcccgtctgcacttccatcagaatggcaacgcctacagtagcgttgatttctttcaattcatccaccaatgctttttctgcgatgtcttgcatacctacatcaatggtcgtaatgatatcacagccatctacaggaggaatatctacaatgttcaggtatttgttcattaccttttgacggtgagtgataccgtttctgccttttaatatggaatcgtatgaaagttccagcccgttctttgcaccttgttctatatctggatacatatctcccaatgtacgcattgccagtgagccaaaaggctttttccgttgattgaatgcctgttcatggaatccgcctttgtatttgttcaggttaaatacgggcagacgttttgcttctttatattgtatataagaaatgcgtttggggtagagcaaccaactgcggctctctttttttcttccgtttttgatgtgctgtttgaaaaaggcggcacttttatcagggaatatttcatgtaaccctttgcagattgtgtcaaggtttgcataaagaactgagtctttgatatgttgtagcttcagccgtgtcttttcctcttcttcggtttcgcccttccttttatttatcatgaagtccatgtaaatcttatattcgggaaggctgcttgccatcagctggccgtcggatgagatgatgttgccacgggtaggacgtacggtgacgttttcttttacaaaacggtcggctacgtctttccagtattgacgctcggcaaacatgatgacgccggctttgcagataatggcaatgcctatcaacaccatgaccaggatgatgaaggagaagcggagcattatgtttttttggttgggcatcatgggcttagtctttctttattaaataaggacggttggtagccgtttgcaaggggctgtcttccgtcgaaatatattcttcaatacgtgactggcggctcttttccatcagttcggaagagcgtgtcaatgcatcgtatttgatatcgatcaaatcttttttcaacttgtcaatttcaatgagttcctgttggctgctataacggttgtctatgtatagtacagtcaggatcatgatgagaatcagcaaacgggtctgtcttttgaaaaagtcgttcgcaaggatatctcctcccaatatgctgcggatagacatatgcttgggcgaagcagattgtccgtctttgggttgttgtgtattttgtttcagttcttcttccatctcgttatctcttttctgcaattctcaacttggcgcttcgggagcgcggattgcgtgtcacttcttcgttgccggcaacaataactttgttgttgactagtttgaaaggtgtctgtacattaccaaagaaatcttgttcggccttgccttctatgtttccggttttcatgatattctttaccatgcggtcttctaaagagtgataggtgattactaccagtctgcctcccggtttcagtgccttggttgctgcataaagcatttctttcaatgcttccatttcctgatttacctctatgcgtaaagcttggaacacctttgcgagctctttcttttcacgttcccgcccgaaaagcggtttgatgacttcgaggaaatcaccgatggtgacaatttgttttacacctcgtgctttaacgatggctgatgccagtttgcggctgttcttcaattcaccatataaatagaaaatattagccaaacgttcttcgtcataggtgttcactacatcagcagctgtcatacctgcgcgtttgttcatccgcatgtctaatttgccctcgaagcggaatgagaatccacgttcggagtcgtcaaagtgatgtgaggaaacgcccagatcggccaaaatggcatccaccccttccacgccataataacgtaggaagttgggaaggtagcggaagttactacgcacaaaagtgaagcggctgtcgcttacaatattcttctcggcatcttcatcttggtcaaaactatatagatgcgcggtgctatccagccggcttagaatttccttggaatgtcctccgccgccgaaagtggcatctacataaatacctccgggttggatgttcattccgtctacgctctcgtttaataataccggtacatgatatatctgttttgcttcactcattctatttctacgttgttattagttcccataatttcttccaattcttttccaaagtcctccggtgtgatgaagggtttgtctgctatttctttagaccagatttctatagtgtcgtccaatccgataaaacgtacatcttgctgtattttagctaatttcaaatatcgttttggaatcagaaagcgcccgtttccatccaatgtgataacttctacatccgaaacgaactgacggaaaatcatttggtgtctggaattccagcgattgagtttgcaacgtagttcgttcatttgttcgttccacacattttcagggtaaagtaccaggcagtcttggtaggtgtctttgcgtaaaatcaggcactcctgggaggcagcttgtagctgcttcctgaatacggcaggcaggaacactctgccttttgcatccgtctttgcttcagaattcccaagaaatcgcatgtttacaccttattatattgttcaaggtgtaaaattacacaattccccacaattccccacaatattttaagaaaatatttcgagaagttttcaacaggctgttaatgtagctagtagcttggtaaacaggaggtttaaaattaataattttatgataaaaaataaaggaaagggcagcttctcggaggttgaaaaacgaaaccaaactattgcacattcgtttttgttttgcgcaaaaatgaaagaatttgtatagtttcatacacaaaaactcttaatttctttagagattaagagttttttctgtcataaattgccaatataaaaaaagataagttacttttgcatggaaaagaacgtttgcaaaatgactgacgactctatatttttaatcgacatagaaaagatattgaaaacgaaagccgggaaaaaatataaatatattccccgttttgtcgtttcgtacctgaagcatatcgtgcatcaggatgaactgaatgtctttttaaaagactccaaaaataaagtcggagttgactttctggaagcttgtatggagttcctggatgcaaaagtggagataaaaggtttggaaaacttgcctgaaaacggtaaatgcacttttgtcagcaatcacccgctggggggacaggatggagttgctttggggtatatattgggaaaacattacaatggtaatgtacgctatttggtcaatgatttgttgatgaatttgcatggtttggctcctttatgtattcctatcaataaaacaggctcgcaatccagggatttcccgaagatggtagaggcagggtttgcctcggataatcatatcattatgtttcctgcggggttatgttcccgtagacagggtggggaaatcaaggatttggaatggaaaaagacatttgtcactaaaagtattgaaacgcatcgtgatgtggtacctttgcactttgagggccggaactcagactttttttataatttggcaaatatatgtaaggcacttggcattaagtttaatattgctatgctttacttggcagatgaaatgttgaaaaatcgtcataaaacctttaccttgaccattggaaaacccattccttggcaaactttcgacaagacaaagaccccggctcagtgggcgcagtttgtaaaagatgtagtctacaagctataatagacaaaagagagaaaaaagatatggaagaaattattgcaccgattagcaaagagattctgaaggcggaactttccgaggataaacgcctgaggtttacgaataaaagtcataatgaaatttacgtcataacgtatcaggattcgcccaatgtgatgaaggagattggccggttgagagaaatagcctttcgtgctgcaggtggcggaacaggaaaggcgatggatatcgatgaatatgacgtgatggaaaatccatataagcaattagttgtatggaatcctgaagcggaggagattttgggaggttatcgttatcttttgggggatgaggtgcaatttgatgaacatgggaagcctgtgctggctactgctcacatgtttaatttctcggaagtttttttgaaagaatatttgccttacacggtggagttgggacgctcatttgttacattggaatatcagtcaacccgtgccggttccaagggattgtttgctttggataatttgtgggatggtttgggcgcattaaccgtgattaagcctaatgtgaaatatttttttggtaagatgactatgtatcctagttatcatcgtcaggggcgtgacatgatattatactttctgaataaacatttcggtgataaagataaattgataactccgatgaaaccgctggaaatagaaacagataagaaaatgttggaaaatcttttctgttatgattcctttaaagaagattacaagatcttgaatacggaagtgcgtaagctggggtataatattcctcctttggtcaatgcatatatgagtctgtctcctacaatgcgtatgtttggaacagcgattaattatggattcggagatgtggaggaaaccggaattctgattgcagtcaatgaaattctggaagacaaacgggtacgtcatatcgaatcgtttgtaaagcaacatcctgaggctatgaaaataacttcaggcgctcatcccatactgaccaaataatcggactaatagtagtatttggggaaacattgtcaggtgcagataaaatttacaggattcatcttgctcgcatctgacaatgtttttattatactgccggcagactgttgcctttgattttccggtagaggtcgagcgcatatacgtctgtcatgcccgatatgtaatccagcacggcttgaatttttccatataaagtaggtgcgttgacattgtactgtccggatatgcggttgataagtagttgtgaatacgctttttccggagagcgcactgcattaatcatcaggtcaatcaaggtactgataaccctgaatcctgccaattctatgtccagcacatcgctggaacgatatattctttgaaaggcaattgcagaacaattgtcataggcctctttcaatggactgcaaatgtgcattatcagggtgccttcaaattccccggtcaatatcttttcttcattttcagtgaatactcgtgtgcattcctttatcagtgcgcctatgaccgaagaacgtaaataagctatctgttcattgacgtctgttacaatccggcaaacttcttcaatgcgttttcttcttttctcatcaaagaactgcatatacagtcctttggtttcatcatgtgtcagaagttttaatttatgtgcgtcttctatgtccatcatctgataacaaatatcatctgcggcttctaccaggtagaccaacggatggcgtgcgtagcgtaaaggctcatccggtttgctgagccggataatccctaattctccggctattttctgataatcagcctcttcgcttaagaagaagccgaattttgatttctttcctgccaattgtgaggaaaaagggtattttacgatggacgctagtgtggaataggtcatcacgaaccctcctttccgtcttccttcaaactggtgggtgaggatgcggaatgcattggcatttccttcgaagtgggttaaatcatcccattccatcggtgaaagttcttttttcaatgccattccttgtccttccgagaagtaagttgaaatggctttttctcccgaatgaccgaaaggaggatttcccagatcgtgtgccagacatgcggctgaaacgatggaacctatttccgatatatgggagtcggccaaggctgggtgcttcttcagaagctggctggcgacatcgtttcctaaagaacgccccacacaagaaacctcaaggctgtgagtcaaccggttgtgtacaaatacgctacccggtaaaggaaatacttgagttttgttttgcaaacgacggaaaggtgctgagaagatgagacggtcataatcgcgttggaattcggtacggtcatctttacgggcctcgtgtagttcttccatgccgaagcgtttatttgatattaattgtttccagttcataattcaggctttatctgtttgcaaaagtaagaaacttccgtttaaaaaactgtaaacgcttagataaatccatctaaatgtgtaaattcgcaccttattaatcatgtggcaatgtgttgattcgtcaatatgccaatgggctgtatcatgtctggactgtgtttgttgtctgcaaattattagcacattgccatataagcatattgataaattattaaaattatgaaaatacaggtaatcaataaatcaaaacatgctttacccgagtatgctaccgggcaatcggcagggatggatatccgtgctaatcttgacgaaccgattgtgctgaaacccttgcaacgttgtttggttcctacgggactttatatcgcattgcctgaaggttttgaagcgcaaatccgtccacgtagcggactggctattaagaaaggcatcggagtcctgaattctccgggcacaattgatgccgattatcgtggtgaaatttgtattatcctggtcaatttgtcatctgaggattttatgatagaagatggggagcgcattgcacaaatggttgtagcccgtcacgaacatgccgaatggcaggaagtggaggtgttggacgaaacggaacgtggtgcaggtggctttggacataccggaaaaaagtaaaaggaaacaatgaatagaagattgaaatatgtgcccatgctatgtgtatgtctgataggcatgcttgtttcatgcggtacggtgaagagagcttccggcttgtccggaaataaagctgttgtggaggaaaaggatccgcttactccggagcagcgccgtaaatatgactatttctttttggaagcgcttcggatgaaggaaaaaggtgacttggatgcggctttcgaaatgtatagtcactgtttggacatttatccgcaaggagccgctactttgttcgaaatttcccgcttccatatgtttctcaatcagccggaaaaaggggaggaagctttgaagaaggcagtggatgccgatcctaagagtttttggtataagcaaactttggcagcctattatcaaggtaagggaaattacccgaaagccatttatgtttatgaggatatggcgagccagttcccctcacgtctggaaccgttgatggctttgattgatctctatacccgtaccaaggactatcagcaggtagttaatacattgaaccgccttgaagccttggatgggaagtctgaacaaatcagcatggagaaattccgtatgtatctggccatgaacaatgaccagcaggcatttacggagattgagaatttggcaaaagaatatccatatgacatgcgttatcttaccattttgggagatgtctatctgaataacggtaaggaagaagaagcatacgaaacttatcagaaagtattgaaggaagaaccgggctatgcgccggcgttgctttccatggcttcttattacgagaaaaaagggcaggatagtttgtatcaggtacagttggatactattttgctgaatgataatgtggatagcgatacaaagatgaacattatgcgccagcttattctgcgttccgagcaaacgaacaaggacagtacgaaaatagcaggcctgtttacttctatattgaaggaaaaacaagagaatgcagatattgctatgttggcggcccaatatcttctgacgaaaaagatggataaagaggcaacccctgttttgcaccaagtgcttgaaattgatccggaaaatacgccggcacgcttgcagctattgagttttgccattcgtgagcagaatatggatgaagtaatcaaattgtgtgctccagctttagaatatactccggatgtattggaattctattattatatgggattggcctatcatcagaaagagaaaacagacgaggcattggaggtttttaaaaaaggagtgaatcaagtaacagataaaagcaataaggatatcgtttctgatttctatgccattatgggggatctttatcatataaagaagatgaatgtggaggcatatgccgcatacgattccgctttggtttataaggaaaacaatataggggccttgaataattatgcctattacctgtctgtagagcgtaaaaacctggataaagcggaagaaatgagttaccgtaccgtaaaggccgaacctaccaatggtacgtatctggatacctatgcctggatactttttgagaaaggtaaatatgtagaagcaaaaatttacattgaccaggctatgcagaatgatggaagtaaaagttccgttgttgtagagcattgtggagatatttactatatgaatggagatcgtgaaaaggctttggaatattggcaacaagcggaaaaattatccaaggagcctcctcaagaaggtagtgaagaacgtagtgaaaaggaattgaacttattgagaaagaaaattgtacaaaagaaatactttgcagaatgatgaaacgtgtctgtttttatttgtttagcgctttgctgattatatttatttcttcatgttcatctacccggagtatgaagaaaggggtatctattggcaatttatccgagtcggaatatatggaagagctgattagccgttctccgggatgggatgcaattactgcgaaaatgtcattggccgttgacttgaacggtaaaggaccgactaaagtaaatggtacgttgcgcatgaaacgtgatgaagtaatccagctttctatcgctccatttttgggtattgaagtggcacgtgctgaaatatctccggacggagttttagtgatggatcgcatgaacaaacgttatgtacaagttccttttgatgaattgaagaatctggcaaaggctgatttggattttcatactttgcaggccttgtttatgaatgaaatttttcttccgggaaaaaaggtgctgactgtccgtgatatttcgtcctttgctgtgcgtcctgaaaacgaaaatgcattaatagaagttaagaacggcaaacatttcgcctaccgttttcgtaccaatacaaatgatgggctgctgaaagaaagtcatatcggcttgtccggtacccggtacgggataaattggcgttatgataagtttcgtccgttggagcagagacagtttccgggaactatgacggtttcttttgaaggggctgccaaaccggttacggctgtatttgaactttcccgcctttctaccaataaggattgggaagctcataccgaagtgcccggaaaatacgaaagaatagaattgcaagatttgctaaaacagcttattaaataatgaaacgtatcttcttactactcatagcctgctgctttttaagtactatttcagcgcaaagtactcggaaaataagggagcttgaagccaaacggaaggaacttcaccagcagattgccgagtctgaaactttgttgcaatctaccaaaaaggatgtgaaaagccagttggacaaccttgctttgctgacaggtcagattgaggagagaagaaaatatatcagtaccatagagagtgatgttcatacattgacaagtgagatcgcttctttacagaaacaactgaataaacttcagcgtgatttgaaagacaagaagcggaagtatgaaacttcggtgcaatacatgtatcgtaacaagtctgttcaagagaaattaatgtttattttttctgccgagaatttgagtcagacttaccgtcgtatgcgttatgtgcaggaatatgcaaactttcagcgccttcaaggaatggagatagaacgtaagcagaagcaaattgccgctaaaaaaagagaagtggaacaaactaagcatgccaaacagaatcttttaaaacagggtgaggttgaaaaggtcaaactggagattcaggaaaaggagcgccagactcttttggcgaatttgcaaaagaagcagaaaggtatacaaagtgagataaggaagaaaaaacgttcggctgagcaattgaatgcccagattgaccgtttgattgaaattgaaatagagaaagctagaaagcgtgcagaggaggaagctcgtaggaaagccgctgctgaggctgccgcaaaggcggcagcagctaagaaagcggagcgtgaaactacgggaggggcgtcccgttctaaatctacggaaaaaaatgagtctacaaagaaggtcgctccggtggagaagttcagtctgaataatgaggaccgccagctgtcgggcagttttgaacgtaaccggggtattttgccggttcccattaccggtccatacgtgattgtcagccattacggacagtatgccgtagatggtttgcgtaatgtgaaactggataataaagggattgatatcaagggcaaaccgggagcgcaggcacgtgccgttttcaatggagaagtttcggctattttccagtataatggtttgaacaatatactggtgcgtcatggtaattacatctctgtctattgcaacctttcttccgtatcggtttctaaaggcagcaaagtcaatacacgtaccgttcttggtactatccatacagatagttcgggtaatacggtcttgcattttcaacttcgtaaggaaacggctaaacttaatccggaattatggttgggaagatgaaaaagataagtcctctttctgtattttattactttgcggtttctcgcagcttgtttggaaactgaagaattttctgtagttcctgttcctgaaatttcttccataataattccttctacggaaagtatctggcctgttgctataaagaatgctgatctggctggagattggttatctttttgatatgtagtacaggataactttctgtataatagcttttaaagtataaatatgtatttgaggaacagttatttccgttctaaaacttgtctgttctttcaaagagaacgaaaaaacatttattattaaaaataaatctccaattagttttgagttcaagtctaattgcgtacatttgtcccctgcattaagtatcctcatagaagtacattaatacttttccaacttattctttagtgatgatggtagaatcgtttgtctctctgtaagattcctaatagcaaaacgcacttatttttttattaaaacatttattttaaaatgaacatttttattgcagggcttaactataatatgagtgaagccgaacttggagaattatttgcagagtatggtgaagttgtttctgttaagattataatggacagagagaccggtcgttctaagggatatggttttgttgaaatggctgatgatgaagctggagataaagcgattgcagctcttaatgaagtggacatggatggaaaaactctttctgtgtcagtagctcgtcctagagaagaacgtccgcgtcgtagctatggcaacaatggcggtggtggttatcgtggcggtaacaacagtcgtggtggtggctatggtggtagtcgcggagataatggctatggcggtggcagaaacagatattgatctgtatctctataaaatataagggaacctgtcttggacatttgaaatgctgaggcaggtttttaagtgcctgttcaggatatcttcaaaagactttggctgtcggttatttcttttatttatggcaagcagaagatgttccattgagggtaaaaacggttatttattaagcatggtcaataatttctacataaattccaggtacttctctcttttatagaaaggctataagtattatgcgtgttatattcaacttcattctggattattccaacaagaaagaagatgatttagtatggagagatacttgttttctagaaaatagattcctgtgtctgtgttgtcaatagttccagcgccttgattcccataacggaatttccttttggattcaatctcgggctccacactgcaactgaatatcgtagtgggtaaactgcggctataccgcctcccacaccacttttccccggaagacctaccaaataagaaaattctcctgcttcgtcatagaatccacatgtttgcatgatggcattgatacgtttcacttgagaggcggtcagcgtgattccttcgaatgtaaaagcctgtttatggttggcaaacggcaaaaaggctttggataaatcataacaactcatttctatggagcattgcaggaaatagaaatgaagtacacgttctatgtcattgtcgatgttatgataatatttcaacaggttggtgattgccgcattcagataaccgttttcacgttcggacagggcaacttcttcattataatgaatttggttatttccgctgattgagcggacgaaacgaagatattcttcttcggggtgtttcagatggttcagcaggatatctgtcattacaatggctccggcgttaataaagggattccgaggaattcctttttctacctccagttgtactagtgagttgaaagctgttcccgaaggttctttacctactcttttccatagattatctccttcaagactcaaacacatggcaagtgaaaaaactttcgaaatactttggatggagaagccggtggtggcttctccatgcatgaaagttttgttttgtatcgtatggatacacattccgaattgatctgggttgattttggcaagtgccggaatgtaatcagcctgtttgccaatagaggcgtagggctggatttcttgatagatgtcttttagaatctgttgataatccatgatttggacgtttttatttttctgtatagtcaccattggctttgatgagctcgatcaacttctcaacagcctgatcttcgggaatgtttttttctatgcattctttctttttatagaggctgatttttccacgaccggcacctacatagccatagtcggcatccgccatttcgccgggaccattgacaatacagcccataatgccgatcttcagacctttcaagtgcgaggtagctgttttgatacgggtgatggtagactccaaatcatataaggtacgaccacatcccggacatgaaatgtattccgttttgctggttcggattctgccggcttgcaggataccaaatgcagtggtatctaccactatatgactcaaggggccttggttgtacaagaagattccgtcacagagtccgtcaaaaattagtgcacccatatcagctgccgctttgatttgcaggtcttcagctttcgtttcctgatagtattggaagaatacgaccggattctctaacccttcattcatcagttcgtgtgtcatggcacgatattcgccgaggcggttgggatgattgctttgggcgatgattaccacttcgggatgtagtttaagggctgcgattacttcgtcattcatagccatatagggcagaaacaggaatttcagatcggaaaccgtgtgatgtaattctatcatctgctggtagttaaatgccggatagacatttttgtcttctggattccatgcattggcatctactagataggctatattgttatctcgtgattggggcacacttccaccgcaataaatatagtcaggtttgaactgaggattggtttcgaaagacccttccagacgttcggctattactacgggaagattatctcctccaatgtttcggacagccttagtcttccggcgccccggagataggtagttgaactgcggagcttcttttccaggaataaaaggatgtccttcccgagttagtatataatcaaccagtttgcgggctaccggaatttcgttttcaggagcctcgctcaatgaaacacgaatggtatctcccaagccatctgcaaggagtgcgcctattcctaatgcggattttattcttccgtcctcgccgtcccctgcttcggtaactcccaaatgaagcgggaaagccatgccttccttttccatttcctttaccagcagacggaccgtcctgaccattaccacggtattggatgctttgatggaaataaccacatcgttgaaatgttccgcaacacagatacgcagaaattccatgcacgattccaccataccttcaggggtgtcaccataatgagacatgatgcggtctgacagagaaccgtggtttaccccgatgcggatggcggtgtggttttccttgcagatatttagaaaaggaatgaagcgggcacgtatcttttctatttcttgcgcatattcttcgtcagtgtattccagtttccggaaagtacgtcccgggtctacgtaatttcccggattgatgcgtaccttttctgcatattgtgccgctacatcggctactttggggttaaaatgtacatcggccaccaatggagtatcatatccttgagagcgtaatccgatattgatattcttcaagttttcggcttcacggacaccttgtgtggtgaggcgaacgtattcaccgccggcatctataatgcgtttggcttgttctacacaggcttcggtatccatagtgacggtatttgtcatgctctgaatacggatggggttgttgccacccaagggagtggctccgatattcacttcggaagattcgcggcgggagtaattgaataaatccatagttagtgattagtggtgagtggttagtgattagtgggctgcgctgaaatattaaccacttaccactaatcactaaccactagttaatttgttttatattcaaacttgacttctttcagttcttcgttggctttcacgattttctttttcaagctggtcttgtagtctgcaaacttggtggctagttctgtatcactcaatgctagcatttgtacggccagaatagctgcattcatggctccattgattgctacggtagctacaggaattccgggaggcatttggatgatagaataaagtgcgtctacgccatcaagaacagaacctttaacggggacaccgataacaggcaatgtggtatttgcagcaatgacaccgggaagtgcggcagccatgccggcagcggcaatgatgactttaattccacggcctgcagcatttttcgcaaattcctccacagcttcgggagtgcggtgtgccgaaagggcgttcatttcgaaaggtacgtgcatctcgtccagtaatttggcagctttttccattacgggaagatcggaagtgctacccatgataatgcttacgataggtttcattgttttttgttattgtttggtttatatatttacttcaagcacgggttatacggatgaacgcggatagaaaaatccgtgaggtccgcgtaatccgcgcttgaacaattcctaatgggaatctatattattcgttgactaatgctttatatccttcagcatccagcaaatcgttaacgtcattagagtcattgggcttaatcttaatcagccaccctttaccatacgggtcttggtttactaattcgggattgtcggccaatgcttcattctgttccaaaacttctcctgaaacgggaaggaacaagtccgaaatcgtttttactacttcaatagtaccgaaaacttcatctttttctaaagtttctccttcagttgtgatatctacgaatacgatgtcacccagttgctcttgtgcataatcagtgatgcctacataagctatatcaccttctactcgtatccattcgtgttctttggtatactttacattgcttggaaattccataatgctttcaatttataaggttaatactaatttttttcaaataaacaaaattccaatgacaccacaaaacaatccgacaataaatccggctaaaacttctaataaggtatgctgttttacaatgatacgggctgtgccaagcatcccggatagcaaaatgaaaaaacagagccaccatacaggattgaaattgaatataaagctgtaggataataatccgcctaccatcatgccgctgcttgccacgtgtgtgctgattttccacttgaaattgatcagcgtgcaaaggatcatgcagatgagggcggctacgataatacctgacatatagcggggcaggtgtatcttatacatggtgatgagacaagtgacatagctgatgatagtcaacgcatatggtacgaaacgtttttcgcggtgtcccaattcatgaataccccaaccgtttattttttggaacaggtagatggcgagcatcggcatcagaatggtgaaacagtagactatgcccaatactatcagtttgtactggatgggcatgatacgaagataagtgaagaaaaaaagcaggaaaaatgccacaaaaggaatcataaaaggcgtgaatatgcctgatatgatacgtgaactgacttcaagcggactgtttttcttgcctactgctattgtttcggttgtttcgttagcttccatataatttatattaccttcttaatcgtgcgacgggtatgttaagctgttggcggtatttggctacagtacggcgggctatggggtagcctttcgtttttagtgtttcggccagttcatcatcagtgtacggtttttccttgtcttcggtgtctacacattctttcagaatacgcttgatttcgcggacagagagttcttcaccgtcttcggtagtgtaaccgtcgctgaaaaagaatttcaatgaatagataccatagtttgtttgtacatatttgctgttgcttacccgtgatatggtggaaatatccaatcccgagcgttcggctacatcttttaggatcatgggctttagcagggattcgtctccttccaaaaagaaggggcgctgaatatctataatggcttgcatggtggtgagcaacgtatgttgtcgctgttttacggcgttgataaaaccttgtgcggcatctactttttgttttaggaacatcagtgcgtcctttgaggctttgctctgattatctttgttgcgggtgtgttcatccagtagttcggtgaactggcggctcagacgcaactcaggaacattacgattgtttaaacttagagtaatggtgtcatcctcatacgtttctacaatgaagtcgggaatgatctgctgcatatttttgcccattgcttcacccagtgaactgcccggacgaggattcagtttggtgagatcgctcaccgcctcattatattgttcttcggtaatacctagtttttggataatcctttctttgtttttgcgggtaaactcatcacagcatttaccgatgatgtccagttctatttgttttaacggtgaatcggcttttctttgtatttgtagcagaagacattcttgtaaactgcgggcaccgatacctgccggatcaaagtcttggattatttccaagattttatttaattcctcctcagtggtatagatgcctcgatagatggcaagttcatccatgatagactccatatttttgcgtaacaggccgtcatcatccaatgaaccgatcaagtattctgctatatctcgttgttctggggtaagttcctgcatctgcaactggtctttcaatatttcataaaaagatacggcatccgagaaagggatttcttcggctactccttctttggaacgattatgttcctgtagtttataatcgggaatatcatcttcgttgctgtaatcgcctaatgaaaaatcttcgttcgagtctgtatttccgtcttcgttctcaacgtattctgtgttgtcatcttcattttcgggcatttctttcccttcctccagggccggattatccagtatttcggaatggatacgttcttccagctccacagtgggcagttccagcaatttcactaccagtatctgttgtggagataaggtttgtatttgttgctgggcttgtgtttgtacttgacgtgagccttgtgccataatatttttatttccttgtttattgcgacaaaaataggaaattgtattgtaataatcttcctttttggggggattattttaaggagatggctatctttacctgtcatctatataaaaaacataagattatgtttgcaaaagaaacttatacaacccgtcgtaacagtttgaaaaaacgtggggataggtttcttgctattttagataacggggagagtggcgactatgcggataatacttatcatttccgccaaggttctacttctctttatttttgggacttgccctatgccggattggcgatatggatatcatattgtatggatgggatccagcctgccttgtgtgagaaagcgtagagggtgggagtgacagaaactggttctgccgcggatttgaagaagtgtttggaaaaagcagttgctaaaagacaggtgattcattagaaaagtacttaggtcagccgtaaattattaaggctggccggatctttggaaccggaatttgaacttactatagaaccgggtatctatattaatagattgttggaaagcggagaaatgctttaaggattttatcgattatgataagttggagagttatcgtgagtttacagagttgcgtaatgaggaagattatttgataacggaggacgggacacgtttttggggtacgaaggtccttttactacagaacgatgatatataattatccacctatggttgcttttaaaccgtaatcagtcaagatttgtatgcactgctgttgtacttcctcggatggcgtttgcattttatatcctttagggttatagatactgcctagctttgcatgctttccctttcctatatcatggtaaggtaataggttaattatctcaggatgccgtggaagactggccaaaaattcggcagacagttttatgttcttttcatctgcattcactccttcaatcaatggaatacggatataataagggaagtcagcttctgctactctgcggatgttctccaaaattaattcattgggaacatcacagaatgtctggtgtacggtactgtccattgattttaagtcgataagcaatagttcacaattccgcatcacttcatccactgtttctttgcgggcaagcagggtggtatctaccgcccgatgaattccctgttgtccgcaacgtttcagtatatcaatcaagaattcgggatgaagcaacggttctccaccacaaaaagtaactccaccgcccgattgatccataaatggaatttccttttctatttcatgcatcaggtattcggcggtatattccgttcctgatatctcgatagccattgccggacattcttcggcacagcgtccgcataacacgcatttttgtttgtcggtgataataccctcgggagccagtgtcagtgccccgttgggacatactttcagacaagttccacagccgaggcatttcttggctgtgtatagtttgtcttttccgttacgaatgccttcgggattatggcaccatatgcacgagagcgggcatcctttcatgaaaagtgtgatgcggatgcccggtccgtcattgatggcatagcgtttgatgtcgaaaatcagactcatcttgtcagaaggtttcttgtgccgtgcgggctattacgtcatattgtaaatctgtattcatgtcattgaagtaatcactgtatccagctacgcgtaccaataggtcccggtattcttccggatgtttttgggcggcatgcagggtagcggtatctactatgttgaactgaatgtgatgtcctcctaaagcaaaatagctgcggatgaggcttgccagtttggctatgtcttcatcgtgtttaagaagtgaaggcaggaagcgctgattcaatagagtgcctccgcttttcacctggtccagttttcctaatgattttataacggcggatggcccgtgggtatctgctccgtgtgagggtgaggtaccgtcactgatggcacgtccggccagacggccgttgggggtggcattcatcattttgccgaagtaaacgtgacaggtggtagacaacatgttcagatggaaacattcgcctttggtgttcggctttccctcgatggcatcgtaaaggtcattaaaaatctggatggcgatgcggtctgcatattcgtcatcgttaccgaagaaaggggtacggttcagtatgaactgtctcatggcttcctgtccttcgaagttggtatcggtagcatggatgatttgctccatattgaatttacgttcttcgaatacatgttttttcagaacggagaggctgtcggtaatagtacccaaaccggtgcattgaatatagcttgtgttataacgcggtccgcagttataataatcttttcctttggcgatacagtcatcaatgaacaaagacaggaaagtggcgggagcgtatttggcgaacatacggtcaatgtagttgctgacgcgtactttcatatctacaaaataatggatttgtttaagaaatgcgtcataaagttcttcataactccggaaggtgcagggatctcctgttaccaagcctactttcttgcctgatacaggatctgttccgttgtgcaaggtgacttccaatatcttgggtacgttaaggtaaccggtcagtatgtaagcttcttttccgaaagcgcctacttctatgcatccgctacatccgccttcacgagcgtcctccggtgtttttccctgtcgcatcagttccatgacgtatgtgtcgggattgaatacagatgggtagccatagcccttacggattactttgcagccttcgcgcaggaaacgctccggggtgcatacactgatgtgcagggcgcttccgggttgtaacaggtgaagatcatctactgtttcgagcatgatataggatacttcgctgactccgttgctaccatcacgtttgatgccaccgatattcagattggtaaagtcattgtaggtaccgctttctttggcggtgatgccaactttgggtggggctgtctgattatttactttgataaagaaacatgacatcagttctttggcctctgcacgggtcagtattccttcttccaggtctttttcatagaaaggagcgaggtgctggtcaaaatgtcctggattcatggcgtcccatccgttcagctctgtaatggtgccgagatggacaaaccagtacatttgtatggcctcccaataagtacggggggcatgtgcaggaacccatcggcagatttccgctatttttttcagttcctctttgcgtttcggatcggtttcttgtccagccatcttttcggccagttcggcatggcgttcggcaaaaatgatagcggcatcacaggagatggacatggcggtcagttcttcttgtttgtcggttgcttctggatcattcataaaatccagatttttcaactcatgtgcaatacgttctttcaaatccagcatgccatgttgataaacctttccgtccagagaagtatggccgggggctcgttgttccatgaattcagtgaacattcctacttcgtaagcttctttccattctttgggaacgtgattgaagatgcgttcgcgttgggtgcgccctttccaataaggaattacctcgcgctcataggtgtctatatcttcctggctgatggtgtaacgctgcaattcgcgggtgttcaatacatgaaggtcttccacgctgtgacaggtcagttcagggaaagtcgatacggctttggggcgtggtccacgttcacctacaatcagttcgtcttcacctatgtatatagttttccgtttacagatttcaaggaagttcagtgctcttagaataggaattggatactttccttcgttttctttgtaaaattcggtttctatcagagcacgttctatggacaaagaaggttgtgtatcaaaagattcttgacgtaggcgtcggatacggtctgtcataccgttgattgttgttttcataagagttataataaggtctactggttcataaatagagatttccataagggcggattaatggatccgaccaattgatgtgcaagagaataagatatcaaatagaaagaaacgtatgccaaaagtaagatacgctgtcatttaatccatctttatggtggtgtaatgtacagtctgctggcttttggcataccctcctgaagaagaaatgttcttagtagtagaacatcaggcagttgaacagttttctatagcctttggagtgcattcacttatacttgtttaataatggccgaaattactgtttgttttgcacataaacaaaacttatatactgtttaataacaggttaataccggaaactgcttcctcctaaaaactctctcagtaaagaagtgggaggcaattctttatcttgtaccgaagcgaaatattccaagaatttgcgtaaacggtatgcttctgaatattccggtttgttattgggaacattccttagaataggaatggcataatccttcataatggctagttcaaacaacagggcagaattgaacatggcatctgcattttcctgatatgggaagatccatttttcttctccggcgcgtacgctgggccatcttctgattgtttcctctgcggaatagccacggtatttgtaatcgcggataatacggcgcaacaaacggttgtcggtagtcggaatataattatgattgtccagcagaatagtggttaatgccgatacatatattttatatttattctcggcgggaatatgaggggttaattcggggttaagtgcatgaatcccttcgagaatcaatatcatgttatcgtcaatcttaagtttgtcacctttaaattcccttcttcctgtggtgaagttgaaacgtggtaactctacttcctttccatgaagcagatcttgtaattgcttgttgaagaactccaaatccaatgcatacaatgattcgtaatcataatcacctttttcatcttttggtgtcttttctcggtcaacaaagtaattgtccagggagatggggtaaggtttcagcccgtttgccatcaactggatactgagccgtttgctgaaagtcgttttaccagaagaggatggaccggagataagaaccagttttactctttgaccgttttttcctctgtggtatatctcatcagcaatattggaaatttttttttcctgcaaggcttcagacacattaatcagatcggtggcataaccttcattacaggccacattgaaatctcctacagtacccacacctaaaatctgattccagcgtcgatgctctttgaatacttccagcattttttcttgttttactacttcctccaatatttccggattctgacggttggggactcgcagcaacaagccgtcatagtatttaacaatgtcgaatttgcggatatatccggtgctgggcaacagactgccgtagtagtagtcaatggtatcttctaaagtataataataggagtaaagttcccctgaagtttcaagcagtctaactttgtccatcattcctttccggcggaatagttctactacttcagttgtgtgacattcaaaacggtggaaagggatgttggcttccacaatctctttcattcgctgcttaatacgggaaacatcatctagcccggtttcgcgtcctatctgcaaggcgcaataatatcctttggatacgggatgttcaagcatgatttttccatcagggtataagtcctccaccgctttgcacaagatgaagcagagcgaacggacataggtacgcattcctgaaggattcagtatgttcaggaactctacatccttattattataggcccggtaattgagtccttctactttgttattgactttggcactgaccggcccgtatgggatatctagattaaaaccattataaatatccaaaagtgagcttccgattgggaagttctttgaaatattgttatttttgcaacagatttgtaacataatcgtaataattattactaacgtagtgaaacggcttgaaatttactgaataaaagggagattagccaattcctaccaaattaattaaagatggagtattctttttatgatttcttaaagctgctaggttcactggcgctattcctttatggaatgaaaatcatgagtgaggggctgcaaaagtttgctggtgacagactgcgtaaaatcctcacagcgatgaccaccaaccgggtaaccggagtgctaaccggtgttcttatcactgcgttaattcaatcctcttctgctactactgttatggtagtaagtttcgttaatgccggactccttacactttcacaatcaattggagtcattatgggggcaaatatcggtaccactgtcactgcatggattatatctgcgttagggtttaaagtagatattgctgctatggcacttccgttattggctgttggcgtacccttattattttcaggaaagagtaaccgtaaatccattggagaatttatattcggtttctcttttttgtttatgggcctctctctcttgaagacgaatgctcctgacttaagtagaaaccccgaaatgttgtcttttgttcagaactatactgatatgggatttggttctgttatcttatttgttgtcatcggtacagttcttaccatgattgtacaggcatcggctgcaacgatggctattactttgattatgtgtgccaatggttggattagttttgagctgggggctgcgttggtacttggcgagaatattggtaccactataaccgctaaccttgccgcactgactgccaatacgcaggccaggagggctgcgctggctcatttggtgttcaatgtttttggggttatttgggtgttatgccttttcaagcctgtaactatgggggtttcatggtttgtagaagatataatgagaacagcagatccggctgttgccgtatcttttaaactgtctgcttttcatactacttttaatatatgcaatgtgttgattcttatttggtttgtcaagttgatagagaaaactgtctgtaaaatcattcctcagagagagcaggatgaggaatatcgtttgcgctttattacaggtggtatgctttctacggcagagctttctatattgcaggcacgcaaggaaatcaatctctttgcagagcgtactcatcgtatgtttggcatggtgcgggatctgcttcacaccactaatgacaatgactttaacaaattgttcagtcgtattgagaaatatgagaatataagcgataacatggaggtggagatcgctaattatctgaatcaggtatccgacgggcgtttgagttctgaaagtaagttgcaaattcgtgctatgcttcgtgaagtgactgaaatagaaagtatcggggacagctgttataatttggcacgtactatcaatcgtaaacatcgcagtgatatggattttactccgaaacagtatgatcatattcatcagatgttccagttgactgatgatgctttgtctcagatgatttcgttggtggaagatgagcatcatgtggtagatgtgaataaatcgtttaatatagagaatgaaataaataactatcgtaatcagctaaagaaccaaaatgtgctggatgtgaataataaggagtatgattatcagatgggggtgcactatatggatattattggagaatgtgaaaaactgggcgattatgtagtaaatgtggtggaagccagtagcaatgtgaaggaaaagaaatcctgacctgaaagggctatggtgaacagaataggtgcagaggtgcaaggtttaacctatgatgggttaaatactttgtgcctctgtgttttttaataaagtgtaagaaagaagagagtctaaataaaagagaatctacatgtcaatatttgtttttttgaaactgataggctcactggtacttctgatatatggtatgaaaaccgtgagtaaggctttgcaaaaactgacaggtgggcatttgcgccatattttgggtgctatgaccacgaatcgcttcaccggattgttgacaggtgcatcgtacagccttccactgcaacaaatggtatttttggaagaagacgaatatcatttggttgatcctaacaaatcatttaatatagagaatgagagaaacaattaccgcaaccagttgaaggatcagaatgtattggatgtgaataataaggaatataattatcagacgggggatcattatatggatattatcagcgaatgcgaaaaattaggcgattatgtagtaaatgttgttgaggcacgtacagatataaaggaaaagaaaatttgatttgtagaaggacaagttaaaagaaaagcgtgagacacgaatgttccacgcttttttgtaaatcgtattaaaatgaggttatttttcgattccaaccagttctacttcgaaaatcaaagtagagaaaggtttaatctgaccggcttcacgtgcaccataagccaagtcttgagggatgtaaagttcccatttagaacctactggcatcattgtcagtgcttcagtccatcctttgattacttgattagcacggaaagtagtcggttctttacgatcatatgaactgtcgaactgagttccgtcaattaaagtacctttatagtttacttttactttagaagaatcggtaggaacagcgccgttaccttctttaattatcttatattgcaatccgcttgatgtagttttaacaccctctttctttgcattttcagctaggaatttttcaccggcagccttattttcagcgaactgggcttcagtagcttttgttttgattgcttctgctttagactgaacgtaggcgttggcttcttccatagtaacattcatgccttttttttgcaaagcagccatgaaacctgccaggaagttttctttacttaaactttgagtagagtcatttccgaaaatacgttggctcatcatatcgaacatacgtccaccaacttgttgaccaatctgaagacctgccatataagcaacatctttaggacttgtcttgctggtaccttctttaacacctctgatgaagtcggccatataggctgtgtcaacgcccagttgttggctcatatacatatccagaccttgcgtgttggtgatacccatcatgtaagaaagtgagtctacgtcattcttcatgtttgctttcggtgcttgggctgtacaagaagccaagctggctgcagcagcgattgctacaaaaaaactaatttttttcatttgccttaaatgctttaataattataatacttcgattaattctacttcaaaaatcaatgtgctgtgaggaggaatcatttctcctgcctgttgtgctccataggctaattctgaaggaatgaaaagtttccatttagcaccttcagtcatcagttggagtgcttccacccatcctttgattacttggttcacaccaaagatagccggttcgccgcgtttgatagaactgtcaaacaaagtcccatcaatcaaggtaccttcataatggcattttacacggtcggttgcactcggtttttttccgttaccttctgtgataacttcgtactgtaagccgctgggaagtgtcacgacccccggtctttttgcgttttcctccaaaaatgattttcccttttcaatattctctgcattcaatttggtttccagctcttcaaagtacttgtttacgatttcacgtgcttcgttgtggctgatagccgtttcttttctatctaatacgtctttgattgcttgagcaaagtcttcaacattaatactttgagcacccatgctcaataaattctggccaataccaaggccgatggcgtaactgaatttatccataactatttattttataagatgttttatacaaaacgcacaaaggtaggtgttttatttgaatgaatctgtttttaacaatttaatttttcttatttttgtgtgtttagttaaaagaggaggactagaaatgaagaatttagtagttttaacaggtgctggaataagtgcagaaagcggtatcagtacatttcgtgatgcaggtggtttatgggatcagtatccggtggaacaagtggctactccggaagggtatgcggcaaaccctaaattggtgattgatttttataatgagcgtcgtaaacagttgcttgctgtaaagcctaaccgggggcatgaactagtttctgagatggaaaagttctttaatgtgactgttatcactcaaaatattgataatttgcatgagcgtgccggaagttcgcatattattcatttacatggcgaactgaccaaggtgacatctagttggcaacctaataatccagcttatattaaagaattaaagccggaagaatatgagatacatttgggagacttggccggagacggttcccagtttcgtccgttcattgtatggtttggtgaatctgttcctatgattgaaactgcaattgaatatgctgaaacagctgatatctttttaattataggaacttcgcttaatgtatatcctgctgccggtttgttgaattatgtgcctgcccgcactcctgtttatttaatagatcctaagcaggtgcccattgcatcgggacgtaaagtgcatgtaattcagaaaggtgcgtccgaaggaatggaagagcttaaaaaaatattagtgggatagtttgcaagtaaacaatttccttgtatatttgttatgtatttaaagaatatttaaaacataaaacagagacaattatgaaaaagtacgtttgcacagtatgtggttgggtttatgacccggcagaaggagatcctgaaggtggaatcgctccgggaacagcatttgaagatattccagatgattgggtttgccctctttgcggagtaggtaaagatgatttcgaagttcaagaagattgatcctaccttataaccggatatcatataaagcggaggaatttcttttgtatgatatatcagatagcgcgactaattattatttagttgcgcttttttattttacattattattaatggcttgccttaaaaaaaagagcgtaacctataacaggttgcgctctttatggtataaaaaagaatgttcttatttcttttcttgcttttcaggacgaggcagtaatactttgtgagagagcttgaatttacctgtcttgggatcaatatcaagtaacttcacttctatttcatccccttcttttaaaccggcctcttctattgtttcaagacgtttccagtcaatttcagagatgtgtaacaatccgtctttaccaggcaagaattctacgaacacgccatatggcattactgaacggactttacctacatagacttcaccgacttcgggaacggcaacgatacccttgataatgcgcatagcatcgtcaatacatttcttgtttgttcccgcaatctcaatgcgacctactccatcagtttcttcaatcgtgatggttgctccggtttcttcctgcataccttggataatctttccgcccggaccgatgatagccccaatgaactctttaggaatagtcatcgtttcaatacgaggagcatgcggtttcaaatctttacgaggttcggctatacattcggttaacttgttaagaatatgttcgcgaccttcttttgcttgcagtaacgctttttccaagatttcgaatgacagaccatctaccttgatgtccatctgtgtagcagtgataccatcacgagtacctgtaaccttgaagtccatatcacccaagtgatcctcatctccaagaatatcagacaatacggcatatttttcttcacctgcattcttaatcaagcccatggcaatacctgaaactggttttttcatggcaacaccggcatccattaatgcaagcgttcctgcacagacagtagccattgaagaagaaccatttgattccatgatatcagatactacacgtactgtgtacgggtagcctgcaggaatttgtcctttcaaagcacgccatgccaagtgcccgtgaccgatttcacgacgacctacaccacgttgtgcttttgcttcaccggtagaataaggggggaagttgtagtgtaataagaatcgttctctgtgttgatccagaacatcgtctacgattttctcatctagcttggtgcctaatgtgacagaagttaaagactgagtttcaccacgggtgaaaatggcagaaccgtgagggccgggcagataacctacttcgcaccagatagggcgaatttcagttgtcttacgtccgtccagacgcttgccttcatcaagaatacaacgacgcatggcttccttttccacatcgtggtagtaacggtcgattaatgcacctttttcttccagttcttcttctgtatattgagttttgaattcatcgcggatggcatcaaaagcatcttgacgttcatgcttgtttctgtttcctgaagcagcgatggcgtatgctttatcataacaagcttcgcgtacagctttgcgtaaatcttcatcgttttcttcgtggcagtattcacgttttactgtagaaccgacttcttccatcagttccatctgcgctttacaatgaactttgattgcttcgtgagcagccttcatggcagccagcaagtcttgttcgctgacttcctgcatttcgccttctaccatcatgatgttgtcatatgtggctgcaaccatcagatccatatcagctttctcaagttgttcgaaagtggggttgataacgaactggccatcgatacgtgctacgcgtacttcagaaatcggtccgccgaaaggaatgtcggaaacggctaatgctgctgaagcggccaatcctgccaatgcatcaggcatatctattccatcagctgagaaaagaacaatgtttacgtaaacctctgcatggaaattatcggggaataaaggacgcaatgcgcggtctaccagtcggcaagtcaggatttcataatctgaagctttgccttctcttttggtaaagccaccgggaaaacgtccgaatgctgaatatttttctttgtactctacctgaaggggcataaaatctgtaccgggaactgcatcttttgctgcacaaacagtagctagcaacatggtgttacccatgcggagcattacagaaccgtctgcctgttttgccagctttcccgtttcgagtgtgatggttctaccatcaggaagctcgatcgtcttaacaattggattgatcataaaaaatgttttaatatatttttcgtctaaaattcgtgcaaagataggcatttattcttctaatttggtgagaatgagataaaaagttactatgattactattttttttcattttaatgtgtaagaaggtggataaatgctttgacaaaccacgaaaagacgtatctttgcatccaaaattattaagagaacacacatttatattaattttagcgatgaaaaagaatgtatattttttgctcgcacttctgttgatagggttgagcgcctgcgataatgcaccgaagttcaaagttcaaggtgaaattaatggtgctgaagataagatgctttatttggaagcgtcgggattggatggcatagtagcgcttgattcggcaaaattgggcagtagcggaagttttagttttgcacagaagcgcccggaatctcctgaattctatcgtttgcgtttagataataaagtgataaactttgctgtagactctacggaaacagtatcagttaaggctgagataaatgattttgcgactgcctatcgtattgaaggttcggaaaacaatttgaaaattaaggaattggtgttgttgcaagctgatttgcagaagaatgtggacaaactcggtcagaaccgtaatatccctgcgggcatcgcacaagacagccttttggctatggtaaacaattacaagaataaagtgaaacgagaatatatttttgcggctccaaatatgccatatgcttatttcgctttattccagtcgttgaatgggtatatgatttttgatcctttgacaaataaggaggatgtgaagtgtttcgctgcggtggctacgagtctgaataatgcttatccacatgccgaccgttcacgcaacttgtacaatatggttataaaaggaatgaagaatacccgtactccccgtcagcagaccatggaaattcctgaagataaaatcaaggaagccagcattattgatattcagctgaaagacttgaaaggcaatacacgcagtctgaccgatttgaagggtaaagtggtgctgatcgattttactgtatataacaatgcaatgtctgctgcacataatttggcgttacgtgaactttataataagtatgcttctcaagggttcgagatttaccagatttcactggatggtgatgaacacttttggaaaacatctgcagataatctgccttgggtctgtgtacgtgacgctaatggcgcttattcttcatacatttcattatataatgtaactaatctgccttcggtatttttggtaaatcgtaataatgaattaagtgcccgtggtgagaatattaaagatttggatgaagccattaaaaaactcttgtaaaaagctaattatgagttgaatttgtttaaacatgttacatagcatccttataaacttgactcgtattagataaaagtctatctttgcaagacttgaaataccaaagagggttccgacatttccatgtcggaattctttttgtttttataggcataactggaacaatgaataattatataatttaaaaggaggaaaacattatggcttatatgtcagaagaaggttacaagcaactgattgaggaactgaaatatctggaatcagtagaacgtcctaaaattgtgtcggctattgccgaagcgcgtgataagggagacttgtcagaaaatgccgaatatgatgctgccaaagaggcgcaaggtctattggagatgaagatcagccagctgaaatcaactattggtgatgctaaaattattgatacttcaaaaatgaatgcagatacagtgcaaattttgacgaaagtagaattgaagaatgccaagaccggaatgaagatggtttatactatcgtagccgaaagcgaagcgaatttaaaattgggcaagatttcggtaaacactccgatagcacagggtttgttaggaaaaaaagtgggtgatgtggctgaaatcactattccgcaaggtaaaatcagcttagaagttgtgaatatttcattttaatatataaggcaggtccgctatgcggggctgccttatttaatacttatagatatggcaacaatatttagtagaattattacaggtgagattcctagctataaagtggctgaaaatgaccagttctatgcttttctggatatcaatccgttagccaaagggcatacgttggttgttccgaaatgtgaggtggactatatctttgatttggaggataatgaactggctgctatgcatgtttttgcaaagagtgtggcgcttgctattcaaaaggtttttccgtgcaagaaagtaggtgaggcagtaatcggattagaggttcctcatgcacatattcatctgattcctattcagaaagagtcggatatgattttttctaatccgaagttgaaactgacaaatgaagaatttgtggaggtggcaacagcaatcaatcaagcctgggaaggtggtgacaagtaatctttttctttcttagtaaatataaagagcgggaaacggatattctgtttcccgctttcctttatgattaaactccggttacctgtttttatacaaactgatctcctagtttgatttgtacgtcatttacgaattttcggatagcgctttcgtcatcttttttgcatatgagtaatacattgtctcttgcggctactaaataaccttctagatcctgtattacggctaatttcccttctggcactactattacattattatagctgttatataataaggagtttccgtttactacgacgttaccttcttggtccttggatgatatatcatacaaggagtcccatgtacctaaatctgcccatccgaagtcgcacaattggacgaaaacattgttggctttctccatgattccatagtcaatggagatattgggacaggaggcaaaatcttcttctccgttagtcagtttggtacaaacttcgggcataatctcattgaaggcttttaaaattgtattgatattccataagaatattcctgagttccaatagaattctccactttctacgaatactttggcaaattccaattggggcttttcaatgaatgtttttactttaaagaattctccttgtttttcttcctcaatctgaatatagccatagccggtttccggtctgttaggtttgatacctaatgttagtaattgaggagagtttgaaacaaattccagacctttcaaaattgcagctttgaactcatcttcttttaaaatcaggtggtcggacggtgcgacaatgacattggcatttggattgagtttttttatatgataggaagcccaagctatacatggagcagtgtttctgcgggtgggttccaataaaatttgtgatttgtccaattctgggagttgttcttggatcagttctttatacaatacattggttgtaataaaaatgttttctatagggactatttttttataacgatcaaacgtttgctgtattagagaacgtccggtcccgaagaaatcaaggaattgtttaggaaggtttttgcggctatatggccagaaccgactacctatacctccccccatgatgacacaataattattgctgtttgtcatgatataaaatcgttttaaagtttccgctaatatagggcttatttttagaaaaccattgtccgttatcccataaatcgtagtatatttatctttttttgaaaaaaaatgccgaaaagtttgcaggtatgaaaaaaagtcgtacctttgcaaccgcaatcgagaaacaaacaatgtttcaagagatgcccagatggcggaatcggtagacgcgctggtctcaaacaccagtggattcacttccatcccggttcgaccccgggtctgggtacgaataaaccctgataatcacctgattatcagggttttctgcttttatagggcgtactaaatgtgtactgaatgacgaatacaaagaaaaggtgtactttaatagttttcttccccatatctttataatttcttaacgcttatcctatcttttcttccttattattgccgatgttttcgggaaaagtgagattcttaccttatatttgtagtaagaacgtttaaaggcacacgattatggaaaatcatatagaaaccaatttcagagaaatacagaagatattagatagttgtatagctcatgactataaaactaaagtagatgcactatttttaaaacgtgaatatt

SEQ ID NO: 3914 - DNA, 10475 bp, Unknown
  gut microbiota DNA sequence
ataaaagtaatggaacaaggtgtttggcaagaaatagaactgttgtaccagaagtttcaaaaacttggtatcagtgaagcggtggactatgataagtactacctttattctctcattacccattccacagccatagaaggctccacattgactgaacttgatacacagcttctctttgacgagggagtaacagcgaaagggaaaccgcttgtgcatcatctgatgaatgaagatttgaagcaagcgtacgaacttgccaaagttgaatcagacagccttgtacctataactcctgcttttctgaaaaggatgaatgcaatgctgatgcgtactactggcagcgttcacagtgtgatgggtggctcttttgattcttctaaaggagagttccgtctatgtggtgttacggctggtgttggcggacattcttatatgaactatttgaaagttcctgctaaggtggatgaactttgtgcgattcttcaagagaagcaaaagaaaatgggaacatttcggggacaatacgagttgagctttaatgcccaccttaatttagtaactattcatccgtgggtggatggcaacggaagaacggctcgattactgatgaactacatccagttttgttatcacctttttcctactaagatattcaaagaggatagggaagaatatatcctttctctacgccaatgtcaggacgaagaaaccaaccagccgtttttgtcgtttatggcagggcagttgaagaaatcgctttctttggagattgaaaggtttaaagtttcgcaaaagaaagtgttcagttttatgttttaagtatcatataaatggagacaccagtgttgataatagcagctgttctgtttgtattgggaatgctcgtaaggaaatatcccaacctcatagcgggctataacacaatgactgctgagcaaaaaaagaatgtggatgtcaaaggactgtctaacttcatgtgtcgctcgctttgcgtgattgctgtgcttatgattgtgtcatatttcgtaatggttgcaaggtcagtaaacgaaaaagcggtgtcagttgtgtcgacaatgcttataccaatcatcggttcaatatatatggtggtaaaggcgcagcgatacgatagaaacggtaaatgaataaaacgggaatcgggtcggtatgggaaatctgatattcgtcttttgagataaaaggaacgacggcatacctgtccttccgcctgcaagggtgtaaatcaagcattgggtttatacctttttttacgttccaaaaatcaactacaggtttagtctttactatgggtaaacctattcactcccttctttatatgtattatatctcctcttttttagctcctgtaatcaaaactactctacagggtagtggagaagtcttcggaagtgtggaactttgctgcagaaatcaaaaaaacatcgtacaatgaaaaatgtattttatattgtaacagtaattttcttgactgtcataggtttgacagttaatgcaaagccacgttgtcaaggtttcaacaattacgacaacaaagtaaccatcgttttcacggacaatcaagccaaagacaaatacacggtttctgatgtaaaactcattccgtcatcatggagtgaaaaagaatatccggcaacatccgtagaagtaacagtaaaaaagggggtggccactgtcacactcacatttcctcatgtcacgcaattctcaaatccccaagtgacgctccggataaatggaaagaaaagcaaattcaaagtgtgccaataggatatatcaatgaaaaagatgaaaatgtatttgatcatgcttgtcgtgagcatgttgctgccgatgagagtgtcggcacaaaccgtgaaggggaaacttgtagatgaaagtaaccatccgttgccatatgccaatgtggtgctgctgtctctgccggattcggcatttgtaagtggaaccatcagtggtgaagatggtttgtttaagctggaagctacatcggtaaaccagatagtgaaaatatcctctatcggatataagacagtgtataaaccgactactcctgccaatatgggtatcgtgcagctcgtatcggatgcacggatgcttggagaagtggtagtaaaagccaatttgcctgtgacacgcataaagaatgatgctctggaaaccaatgtgcagggtacagttctctcgaaagccggaacagctgaagatgtattggcgcatatacccggtttacaaaaaaaggctgatggatttgaggtgttgggtaaaggttcaccgcttatctatatcaacggtagaaaattacgtgatatcgctgaactggaccaactgacatcggaggaaattaaaagcgtagaagttgttcgtaatcccggtgcccgttatgatgcaacggtaggggcagttgttcgtatccgtactgtcaaacgacaaggagatggatttggagtgagtttgcgaagttcctatgatcaatctcaaaattcagactttgtagagcaagccgatgtaaactatcggcataacggtcttgatgttttcgctatggtccgttttgataaaactacctccttgcaaaacgatattctggaacaaacggcctttaccgataccatatggacgcaaaagaattatcagcactctaataccgattctcgcagtatagacggacgcatcggattcaattatgattttaatgagtatcattccataggtgtacgttatgatttgagcaatgccctgcatacagatatgtttaccgccttcgatagcgagattcaggcagatggattgccttacgatattttatatagtaccattgctgccgatgcaaaatcacaaccggaacatcagcttaatatttactatgcaggacaaataggcaaaggagaacttacctgggatgcagactattacagcaatacatacacgcaatataccattaatatggagaatagtcaggaccatgaagaccgtactgtcacttctgataacagggtggaaaatcaacttactgccaccaaagtttcatacactcatcccttatggggaggaagtatctctgtgggaggagaatatacctataccaaccggcatgatgattatgtaaatcaggaaggatatgtacctacaacctatacccgcatccgtgaacagaatcttgccggctatgcacagtacagtcatcctttaccattcggtcaggcaaacattggcttgcgatatgagcatgtggattttgattattttgaaaatgctacatttgtacccggacaaagccgtgtatatgataatatctttccaaatatttctgtgaacgggcaattggggaaagtacaattccaagtcagctatgctgcaaaaacacagcgtcccaactacagtcagttaagaaataatatcacttatgccaataggtttacatggcaaacgggaaatccactcctaaaaccaagtgttacgcatgatataaccgctgttggtgtatggcggttctttcaggcaatggtaagctacaaagtgcttcgggactatatcctttattggggaacacaggtggaaaatcagtcggctactactttaataaactatatcaatcacgaccgtttaccgagtctgacagtaatgctggcagcttcgcctactattggtatatggaatcttaatgccagcgcaattgtgatgaagcagtggttctcgttggatgccgccggtcagagaaggacctataataatccactttttgtaggttccttaaacaatacttttactcttcctgcaggattccttctctctgctgattttaattatcaaagtcgtggtcaggttcagaatatcacccttaaacgtccacaatatactttgaacataggcttacgcaaatccctttttaatgatgccctaagtatagaagcgcgtgcaaatgacttgttgttaggttgtaagcaggaagcacttctttatatggagagtgcacaaatgaaggatttgtcttggagtgatacacgctcgttcagtcttacagtgcgctacaagtttaatgcagccaaaagcaagtataaaggtacgggagcaggacaggatacaataaaccgtatgtaaattatgacagcatcaatttcctatataaatctctcatgggcagttgtgggcatcatcgacaaggacgtccgcaacggccttcaatccatgaagcgtccggacgaaccgatagaagttaccatcgaaaggtatgtaatcggttatctggtcttctggcatattgcctttattgataaagaaaagatgaacagatgtaacgatgaaaaggtcatcgaacttggacggaagaaaatggaggaatacatattctcacatcctcctatagctactttgccaaagttctacattgtgttcctaaatcaacctcagattggctgcgatacccacggcctcagtgatgttttctgcgtgtagcttctcgaagattttcttcttgtgaaacttgacggtattggcatcaataaagagagtttctccaatctcagtgttcgacagtcctttgacggagagctggagaatctctttttcacggtcggaaagaattagttccggctgttttctccatcgtctgccctcgaatgaatagatatagtggtcagtacatgtatggtctgatatgactacatctccgatgtttttctccggtgaaagtgaaactgtacatagagccagccatatatctcccttgccactaagcaaaacgggtgttagtttgtggtggataaggtgcggatgcttttctgatgtgtggatatgaaagttatattcgatagacaagtcaagccttttttctataggctggtcatagtagaaccggaatccagcttcgttgatttccataagacggtttatctcgtcagacggaacaacctcaaagtagaaggcataacctttttgttgcacttcttccggtgaatgaccgcagagaaaaagcgggttggacgatacgtaaaggaaattcttgcggtgatagtctatgatatataggctatgattggtattgcgggccaaagcatcagccatgacaatacatacatcggtttttgcatactcgctatctggtatctgtatgtccgtatttatagggcgaaagaaattgcttataatattttgttgcataattgatgttctgatttagtattgcaaagttataaaaagtacagaccataataaaaatggtctgtactttttagtttatattctgagccctctattttttcttggctcctcctctgactgtcgtaaacttcgtcttaacttttcccattgtttagaggttttatcccgatttaggtactgtagccaggtaattatactaaatagttgattttcttttatttcctgatattacaaaggtacaaaagaaaatgagatttcaaagtgtactaaaagcgtactgaataataggaaacgggcaaaatagggaaaaatggagaatataggaaatatgcaaatagttgataataaggaaaataaattcttttgttttcctatgatttctatggcttgtacccgatatttcacttgggtgaaaagggcttttcatctgtgtgaatatccgttgtcactaaagtggaatcactgcttcacataggtgaggcaacagtatatatcggaagttaacgcaatgacatcctattaaattaaatgaaagcacggcatgtcctgtcagatccaatctgatatctgcggctcttatacaaataatgggcgaatgtttccatctccattgcctacataccggttcagggacattatggatgtttttatacggtaaattgctggtaatgagagagatggtgtgacagaagaattttatgttttacataagacgaaatcaccttttcctttggctcttatccggattactcttgttgggctctttcagctgcttggcttcacttctataaagtgatactaaatcaaaatcgagcattactttttgaaaccaacagcttctcctgatgtcgtaacgttttacgttcttgccttgaatacaggacttgctttttgtatctccgactcaaagccgaaccagtagccatgttcccccttttcatcggcaggaaggaaacacagacgaaggctttctttgtattctccataaatgatattccaagtggcaggagggatttgtcgtttggtccatactttctcggcagggagttttttcagtgacatgcctgcttctatccaggcaatagcagcctgtatctggtattcggggtagttttgtttgcagaactcatacagtatcaagcctcgtttctccagactcatgggctggtctatcagattggcttttgttaaatatgcaagaaaacgatggaggaattgttcgtcattcaaaatgagttcacgtgtcagtgcctgccatgccggtgtgttgtagaatccgtccaacaagcgtgaaagctggcgggctgtctgcaattcactgacactgatctcgtgggtttgtagcacttcgtatggcggcagaggggaatatttgattcctaattcttccgccctccggcgcatttcggttccgggaagcagcttgagtgactccagttggatttctcccgcagcatatccggcaagggtacggacatcttcaaatatctcatgaaggtgataaagaggcagtccggcaataaggtcggcgtgggtttccatgttgggcaaggcgcataggaatctcagaccatccagtgcatcagatagtttgcccatccggcggcttttctcaagtacaggttcgcgcaggctctggatgccggcttccagatgaagcagtcctttgggcagcaggctgagttcttctttcagctcttctgacaacagggcgggatgtatttccagatggaagcggatatcgggatggaattccagaaagagccggagtagttctttggctcttcgagggttgtaattaaaagtacggtctaatacgcgtacatttttgatgccatgtgcatggatgagttgtagcctttcgcggatgctttcgatggaaagggtgcgtaccggtttttcaccgccgctgacacagaaggcgcaggtgttgaaacatccgcgtgttgtttccagttggacaaagggcttgctccagttaaagaaacggctttgttctggcgggacgagtccggcgaaattcagtacgcgggctataccgttgtctttatattctttgttaggagtgaggtaacagagtccgggcacggtgtgccattgttccggatggttccagcaggtcaaccattgtggaaagacttcttctccttctcctctgaaaacacaatccacaaatggatttttgcggaggaactcttcattgtctcccagaaattccggaccgcccagcaccaggcaggcttcggggagcaatgcttttactctggaagcgacatgcatcagttgctcatggttgaaaagccaggtggttgcggcaaggatgtcgggtcggtggcggtagatctcatcgacaatcattcctgtattttcgttgatggtggcagatacgatttcccattctatagaagggtctgtcatgatttgtgcatgtagggctggcagtgccaatgaggaatgggcatatgaactgttcaggtctatccagagaatcttcatgtttctttttcttgtttattcggtcggcaaagataactctttttcggttaatgtccgctggtaagcgatgcgggatgtgccattgtgggtataaatgatgccacaacgccggaaaccgtactttttcaggatattctgcatcacaaggttgtcgtggtgggtatctacccggatattgttgcaatgttcgaaacaccatttgaggcaggcgtcagctactcccttctgtttgccgttggtagccatgcggtgaatgacgtaatatggttcgttgttcagccagttgccgtcatcaatgcgggcatacgtggggtcctctccgggaataaaacagaatgtgcctattatttctccgttttcattttcgcaaacatagttggttccgttggttatttctcgcagaatcaattcaacggaaggataaccgtttatccattggttggggttgccatgctctttcatgaactgacgggcatagtggaatatttctataattgcatccaaatctttgggcaatgaatgtctgattgttatcatattgaaataggaatgggttattctaaattcattctgtacacattggtctgcttttgttcgaagcctaatttttgatatagcttgttggctgctatccgtgtggggtttgaggtaagcataataagaggtatgccttgttccttcacaaaccggacagcgtgggtgaccagctgtttgctgagtccttgtccccggtatttttcatccactaccacatcttcaatccacgctttgccgcctgtggggctgtgataaatgcctacagtcagcattcccgcaatttcctgatcagccagtaagaaaaacagatgggtgttttcttgggatatgatctctctgagggttgtcccggtcagttttaccgggcggtttgtgagctgctccagcagtttttgtactgcatcggtgtaggctgggataaagtcttttacttctactatttctgtcatttttatagctgaaattagaatcggctgtaaatatagtgattattctccagataactgattattttttatatcttgcttacgttttaataatagatatgacattatgattagacgagtggaacttcaggatgccaaagccatcacaacgatatacaatgaatatgtcgggcacagtgtggctacatttgaaacggaacctttgagagaggaggatatgcgtaaccgtattgccggaattgccgtccgttttccctattttgtgtatgaggaagaagggaaagtagtgggttattgttatgcccatttgtggaaggagagggctgcttacaggcatacgttggaaacaacggtctatttagctcccggatacgaggggaagggcataggcagggagttgatggaaagattgattgaagaatgtcgtagggacgggtatcgtgcactgatagcctgtgtcacagagggaaatgctgtcagtgatgctttgcatttgaggctgggatttaaaaaagtttcccattttaagaaggtaggactgaaattcggacgatggttggatgtagtggattacgagttgctgttatcctgaaaccactgtccggaatgaactttttagggttatatggagttataagcttgtacctaaattaaaataaccaactatgactcaagtaaacatcaagagggtttatgatgaaccttctgaacaagacggctatcgtgttttggtagaccgcctgtggccccgtggcatgaagcgggaatatttgaaatacgattattgggcaaaagaggtcactccatccaatgatttaaggaaatggtttcatgcggatatagaaaaaagatgggggacttttgcagatatgtatcaaaaagaattgaatgaatcggatgccgctaaagcgttcattgataagataaaagcttattctaaagtaacattactttacgcttcgaaagaacaggagcgaaatcatgccaacgtattgaaacattatttagacacacatttgtagtttttgtgcaaaaaacaagtatctttgcagccaattatggctcccgcttctaaaaaacagggagttttcgttaaataatcaatactaatgagagatgccacccatgtaagatgtgttcatgtataatgaatgcatctgtaattttgtgtgacatttcgggtaaaaagagaaagattatgatacaaaaggttctaattgccaaccgtggcgagatagccgtgcgcgttatgcgctcttgcaaagagatgggtatccgcactgtggctgttttctcggaagccgaccgtacggcgcgtcatgtgatgtatgcagacgaagcctgtctgatagggcctgccgcttccaaagaaagttatctgaatatagataatattattaaagctgcaaggcaacatcatgccgatgccattcatcccggttatggttttttgtccgagaatgctgattttgcccgccggtgcaaagaggaggggatcatctttatcggccctgccgccgagacgatggaagcgatgggtgacaagattgccgcccgtaagcgtatgattgccgcaggtgttcccgtggttcccggtacggaacagccgttgcaaagtgccgaagaggcggtacgtatctgtaatgaaataggctatcctgtcatgttgaaggcttctatgggaggcggcggtaaagggatgaggctgatacacagtgaagatgaagtggtggaggcatataacaccgcccgttccgagtccatgtcttctttcggggatgatacggtttatctggaaaaatttgtggaggaacc

SEQ ID NO: 3915 - DNA, 11905 bp, Unknown
  gut microbiota DNA sequence
aatattttagtagtgaccgcgacaggattcaaacctgtaaccggctgatccgtagtcagctactctattcagttgagctacgcggccattgtaaaactaatcgaactttttggtagtgaccgcgacaggattcaaacctgtaaccggctgatccgtagtcagctactctattcagttgagctacgcggccattgtttattgttctttcgttttaacgggtgcaaagatacggactttttttgaaaatgcaagcgttttactaaacttttttctaaaaattattcgacgaaacgggaattaaacagctgccagcctagtgttaaacctacattccaatcgttagacggtgagctatagtgatttacataggcactgatagaaccgaacgataattgaaagactaatgaaatttctccaagatattcgaattttgtgaaagctttcccgtaatatgcttgtccatattcatctttcttgataggaaagatgggtataaatccataaaattctccgcgtaattgaaaagactcgcttaactggtagatgggcatggtgccgactccggcatattgattagcacggaaagcctcattataggttactttgctatgggctgtcggagtgaattctcctgcctgcattaatgtagccgtataattgttggagaaatttcgggatgagtaatatgcctccagatacgctcccaaagtaaacttagggcttaccttatggtatgtttcgttctgatatgaaacttgaagccaggattgtacttttttataaggctccggtgtgcctttagtcactttggatataccggatctgaaatgttctgtgccggtgaaaatttgtgcagccattttttcacgacttccttgtgtggcaaattggcgggcattcaaggtacttccttccaatacgatagagcctccgaagatagaataagtgctttcatcatgttttgtttcgctgaagtcgatgatattggtttggaagtacctgtcctccatacgggctatacccacaccgaattcagcttttttacggcttagaaacggtaatgacaccttcaattttacaaactcttcccttttcttgttgaaagccggattgtctttgttggaaaagaatttggcttctttgaaataatcgaaggtagagatcgaggctatgaatttataagatgtaggcagtttggttggaaaatcgattcgtgctgcaagttgtacattattgtagacccggcctaactgtccgtcaaaattaaattcttttgaataatagttcaagttttgataagaagcaccaaaatagacttgattggagccactggaagacacgtttccaccgacacgaacggagagattggcctccattttgacctgaagattcaagtcgtaggtttggtctttctcattataaacggcatgaggaatgatttcggatataatattatcggacaacaaacggaaatatgctcgtttgacatcctccatagtgaaaacatcggagtcgttttcatgaaactctttttgtatatattgcttttgctgttcattggcaccggttatattaactcttttgaaacggaaatccggtaaattgctcttataggccagtcgtttaactttcacttgttcgggggtgattcttcgatgaattcggctttttatggagtccatcatttctatggcacgtttataaccaatgtcatgcaactcgtcaaagcgctggaagtccattaaattgacatcatcatatttaaaagtcatgaggatgccgagggaatcgggtaaagagtaatctgtcttttgcataatcatattttccagttgccccataatgtcaccttccttgggtttgcccggattggcggatacggcacttcctataatgatatctggatggaaggtatcacgcattacattcactggaaaattattgtaaatgccaccgtcgtatgccagtatcgagtctatttcgataggcttgaacatggcaggaaaactcatggaggcacgtacggcatctcccagatctccttttttcaatatcagtggtcttttgttgtacacatccgaagctatacagcggaagggaatatacaggctgtcaaaattggccttgcttgcagctgttgcctgaccgaataattgcagaaatacaatattcatctgaatgggatctacaatgctggtaggcaaaaactgaggtttgacattcttcagcgagtcttttaaggagatacggatgttgataaattcgggtgttggaggatttttcttgaaataatagatgtatttttcttccacattacctgaataccagcgtttgaagtcatcggatttgagtaaagcctccatttcatcgggagaatagcccatggcataaagtgaaccgacaatggctcccatggatgtgcctgcaatataatctatggggataccgttttcttctaatgcgcggataatgccgatatgagttaggcctttggcacctcctccgctcagtaccagtcccactttctgtgcatggatgggaggaagtagtaaaaagagaagaaaaagtatatatagataatgtttcatggatgtcgaatctttgtatgtgtcgctccaaatatagaaagaaatcttcgtttccaatcgttttttagaataaaaaagcgccggaaatgaacttcccgacgcttttgatagcaaaatgtgatagatttgttaaatcagttcgatactgcgttttacaaagtttgtcaaagcttcacctttcaacatgttgttttgtaacagagcaaggtcaatcaattggcggattactttgttaccacctgcgtattcacctaaaacagcttctttcttggtcttttcatcggccaactttttctcaacatcacttaatttatctttttctgcttgaggtatttcatcggcttttttaccttcctgtgctttgtgaagttcgtcgtgacgtttattcagactggtcatttcagcttcaataggttcaagagcagctttgcaagagttgtccgcatcattcaaaacttgtttcaccagtttgtggtcgacattcagaaccaagttaaacatatccggcatttctccatagaaactcatacctgcctggatattggccatttctttcatacggcgcatatattcactttgggtaatcatgataggagttcctgtctcgcctaaagattgtgtttccacattgaactccactttcttcatctgtggtaactgactgcggaatacggaagatagaatatcgcgttggccaacttccaaactggcatctttgcgctcttctttagcaatcaggtggtcaattacatcactgtccacacgggtgaagcggctcttttcaaatttctgctcgagcatacttaccatggctacatccagctgaccatccattaacaatacgttgtagcctttgtttttggccgcatcaatgtagctgtattgttcgtctgcatgggtagcatacagataaatcaagttgccgtccttatctgtttggttatctttgatcaagctttggtattcttcgtaagtgtaatatttgtcatctgtgtctttcagcagagcaaatttattagccttttcgtagaaatcttcttgagtcaacatgccgtagttgatgaaaatcttcaaatcatcccatttctcctcgaattctttgcggtcattcttaaaaatggcttgcaggcggtctgatactttcttagaaatataagtggagattttcttcacgttggaatcgctctgcaagtaagaacgggatacgttcaacgggatatccggtgagtcaatcactccgtgtaacagggtcaggaagtctggaacaataccttctaccgagtcggtgacatagacctggttgcagtaaagttggattttgtttttttgtaattcaatgttgctcttcactttcgggaagtacagaatacctgtcagattgaacggataatccacattcaggtggatccagaacagaggttcgtctgccataggatataactcccgatagaatttcttataatcttcgtctttcagctctaccggtttgcgtgtccataaaggataggtttcgttgattacgttgtcttcgtttgtttcaacctgctttccatctttccattctttctttttgccgaatgcaatggggataggaaggaagcggcaatatttagtcagcaatgaagaaatacgtgtttcttccagaaattccttgcagtcatcatctatataaaggataatatccgatccgcggctttctttttcaacgttttcgatagtgaactcagggcttccgtcgcaagtccatttcacagcttgtgctccttcttggtgggattttgtgatgatttccacttttttggctaccatgaaggcagaatagaaacccagaccaaagtgtccgatgatggcattggcatcatctttatatttttcaaggaagtcgttagcacctgaaaaagctatctgattgatatatttgtcgatctcttcggctgtaagtccgataccccggtcggaaatggtgatggtatcttttcctaagcttactttaatggtaagatctcccatctctcctttgaattcacctttagatgcaagggttttcagcttctgtgtggcatctactgcattagaaactaattcacggaggaatatttcatgatcactgtataagaactttttaatgatggggaaaatgttctcagtggttaccccaatatttcctttttgcatactatttatggttttaagttattatgttatatatacgtttgaatcgtctttttgttggatgatgggcaaaaaaaatgccagatacagtgatatctgacattttgtctgttattttttgaataactttggactctttacttttccacagtcatgacaatgaggtctttttctttgtcatagcttaccttgatcgtgtcaccagctgccatttctgatccaagtatcagttcggagatgccatcctccaagttgttttggatggcacgtttcaatgggcgtgctccaaactgtacatcgtaacctttggtggctacaaactttttggcatcttcgtcaataacaagcttgtaaccaatgttttccacacgactgtaaaggcccttaagttcaatatcaataatccgggtcagtgcatccatatcgagttggtcgaaagttattatttcgtccaaacgattgatgaattcgggcgcaaaagacttattcaaagcttttgtaatcacgttgcgcgagtattctttgtcatcagtacggacctgggcggcaaatccgattccttttccgaattctttcagttggcgggttccaatattagatgtcatgatgactatggtatttttaaagtctacagttctgccataactgtcagtcaaccgaccttcatccatcacttgcaacaatatgttgaatacatcgggatgcgctttttcaatttcatccaataaaacgatggagtagggtttacgccttactttctccgtcagctgcccaccttcttcataacctacgtatccgggaggtgctcctaccagacgggatacggtgaatttttccatatattcactcatgtcaatacggataagtgcatctgctgaaccgaacattagtttcgctaactccttggccaaatgagtcttgccgacacctgtcggacctagaaacatgaatgtaccaatcggcttattaggatctttcaggcctacacggcttctttgaatagcttttaccagtgtggcgattgctttgtcctgaccgataactttagaaagcagatcgtctttcattcctaataatttcattccttcagcctgtgccattctttgtacaggtacgcctgacatcatggaaacgacttcagctatttgttcgtcatctaccgtttcccggttttccttcaggcttttttcccattcttccttcagggtatcaagctgattcgtatattctttctctttgtcacgataactggcggccagttcgaaattctgtagtctgacagcttcatttttaagagatttcatctcatcaatcagtttttcctgttcttcaatttctttaggagcagtgatattagtaagatgtacgcgcgagccggcttcatctaaagcatctatcgctttatcggggaagttacggtctgtgatatatcggtttgttagtttcacacaagcttcaagggccgcatctgtatagttcacattatgatgatcctcgtatttatccttgatatttttcaatatctgaagtgtctcttctgcagttgttggttctacaataaccttttggaaccgacgttccaatgcaccgtctttttcaatgttttggcggtattcgtccaacgtcgtcgctccgatgcattgaatctcgcctctggccaatgcgggtttcaacatattggccgcatccattgagcccgctgcagaacctgctcccacaatagtgtggatttcatcgatgaaaagaatgatgttaggattcttcttcaactcgtttaagatagaacgaatacgttcctcgaattgtccacgatatttagtgcctgcgacaacggcagtcatatcaagagctatcactcgtttgtcaaataagatacgtgatactttcttttccacaatccgtaatgcaagtccctcaacaatggcagatttgccgactcccggttcgccaatcaaaatagggttgtttttcttgcgacggctcaatatttgtgccagtcgctctatttccttcacccggccaactacaggatctagttttccttcttcggcagcttttgtcatgtctgtgccgaaattatcgagtacaggagtatcattagccggctttttttgtgccgggcgtgcctgctgttgtgctgcatttgatttattgccacttggactctgacgtatatcttcgtcttcatcctcgtcctcactgaaccccagacctgcatgggtgtctggttgtaaagtgagtttgattttttcgtatgttacgccattgctttccaagacgtggaaagctgcattatccttgaccttcataattgctaacaaaatatgttcagagtcagccgcaatgtttctcaataacttagcctctagaatacatagctttaacactttggatgctttctcattaaagctaatattttcgtcataggtggtgtcattttccgcattgtttttcacaatggcctccaactgattttttatgtcctgtaagtttatttgcaaattaaacaaaatctcgatagcttttccttcaccttcacgtatcagtcccaacaacaagtgttcgggaccaatatagctatttcgcagcctgttggcttcttccttgctatacatgatgatatcggacactctttgtgtaaattgattgttcataaatttatcgtcctcctaaagtatagtatttatttcccagtgtgcaaagatacacataataacaatgcataccattgttttcttatttatattagcataacaaaatgtatgccaagctttgacaggctaaatggattaaacaaaaataagggttatagcgaaccattcacaaagtaaatgagaagtgggagtgataatcactatatactataaaataaggtatagggatactttttacttatataagtaaaaacatttaatggacttaacttttttatgggttttgtttcgtatgtcgtataaaagtagtactttagcgtggtttttggtaaaccaaaaagatgtataattaatatttgtttaaatgctagaacaagacagaattataaagattaacatcgaagaggaaatgaagtcgtcgtacattgattactcaatgtcagtaattgttgcgcgcgccctcccggatgttcgcgatggctttaaaccggttcatagacgtatcttatatggtatgattgaactgggaaatacctccgataaagcttataagaaatcagcaagaattgtaggtgaagttttgggtaaatatcacccgcatggtgacttttccgtgtatggagctttggtcagaatggctcaggattgggctatgagatatccgttggtagatggtcagggtaacttcggctctgttgatggtgacagccctgctgccatgcgttatacggaagcaagattaaagaaaataggtgaagagatgatgcaggatctttataaggaaactgttgattttcagaataattttgatgacacgttacaggaaccgactgtcatgccaacacggattcctaacttgttggtaaatggagcatccggtattgctgtaggtatggcaaccaatatgcctacccataatctttctgaagtaatcgatgcatgtattgcttacattgacaataatgatattgatattgaagggcttatgcaatatgtaaaagcaccggatttccctacaggtggatatatatatggtataagcggggtacgtgatgcttacgaaaccggacgtggtagagtagtgatgcgtgctaaggctgagatagaaactcatactacacatgacaagatcatagttaatgaaattccttataatgtaaataagaaggaattgattgaaaatatcgcatctttagtcaatgacaagaagattgatggtatttcgtatgtaaatgatgaatccgaccgtgaaggtatgcgtatcgttattgatgttaaacgtgatgcaaatgctagtgtggtgctgaacaaattgttcaaaatgacagctctgcaaacttcatttggcgtaaataatatcgctttggtccatggtcgccccaaaatgttgaatctgaaagatttaatcagatattttgtagaacatcgtcatgatgtggtaattcgtcgtactcagtatgatttacggaaggcacaggagcgtgctcatattcttgaaggattgattatagcttctgataatattgatgaagtgatccgtattattcgtgctgcaaaaacccctaatgatgccatagcagggttaatagagcgttttaatctgagtgaaattcaggcacgtgctattgtagaaatgcgtttgcgccaattaacaggtttgatgcaagatcagcttcacgcagaatatgaagaggtgatgaaacagattgcttattatgaagaaattctttcaaatgatgaactttgtaaaaaagtaatcaaagatgagttagtagaggtaaaagagaagtatggggacgcgcgtcggtctgaaatagtttattcttcagaagaatttaatccggaagatttttatgctgatgatcagatggttatcacgatatctcatatgggatatatcaaacgtactcctttatcagaattccgtgcccaaaataggggtggagttggatcaaaaggaagtgaaacccgtgatgaagactttgtagagcatatttatccggctacaatgcacaatactatgatgttcttcactcagaaaggtaagtgctattggttgaaagtttacgaaattcccgaaggaactaaaaatgctaaaggacgtgctattcagaatttgctgaatattgattccgatgacgtggttacagcatatctacgtgtgaaaaaccttaatgataccgagttcattaacagccattatgtgctgttctgtacaaagaatggcgtcattaaaaagactttgttggaacaatactcacggcctcgccagaatggtgttaatgcgataactattcgtgaggatgataaagtgattgaagttcgtatgactaacggtgataatgaaatcattattgctaaccgtaacgggcgtgcaattcgctttcacgaaagtgcggttcgtgttatgggacgtacggctacaggggtgcgtggtatgactttggatgaagatggtggcgatgaagttatcggtatgatttgtataaaagatcctgaagctgaatcaattatggtagtttctgaacaaggatacggtaaacgttctgatatcgaagattatcgtaagaccaatcgtggcggtaagggtgtaaaaacgttgaatattacagataaaacgggtaaattggtggctatcaagtctgttacagatgagaatgacttgatgattattaataaatccggtattacaattcgtttaaaagtcgctgaagttcgcatcatgggacgtgcaacacaaggtgtgcgattgataaatttggagaaacgtaatgaccaaataggctctgtatgtaaggtgacatctgaagaagaggttacagatgaaaattcaaatacagatcttgaaaatataactgaaggagagagtggtggtactactaattctgatactaattcagatttaactgccgaagcaaatagtgaagaataaaataaattgtattattaaatccacaaaatcatgagaaaagtattatttacagtggctttattgttaacagcttgctttgtgtctgcacaagtaagtgttgttaaggaggctaaatccttgaaaagcaaacctgaagaagctgcaaaagctatcgaaccggctttaactaatcctgaaaccgctaatgatccggaaacatggaaattagctggagattttcagaaagcaatttatgatgaagaaaacatgaaactttatttacccggaggtcaggcagatacaactaagctttataacagcttagctaagatgtatgacttctacttgaaatgcgatgaaatagagcaggctaaagtccaaagtggtgagttaaagaaacccaaattcagaaagaagaatgcagatgctttgaagactttgcgtttaaacctagttaatggtggtggtgatgcttacaataaaggagattatgctgatgctctaaaatattttggattatttgttgatgtagtaaacgagcctatgtttgctgatgatgatgagttgaaggctgatactttgaatgcattatatgcttgctatgcaactttagctgctaatatgctgaaagacaatcaagctgtcatcaaatatggcaatataggtaagaatcataaagaagaaggttatagagcattaatgtgcttggctgaaacatatggtcagaaagaaggtggtgattctgcaaaatggcttgaagtaatcaaagaaggtactgaattgtttcctaagcaagaatactttgttggtaatattatggattattatattcaaaaaggtatggttgatgagggtttggctcaaattaataaattgcttgctacgagtgaaactccgtactatctttatgtaaaaggtatcttattgtatgagaaaaagcagtatgatgatgcagttgctatatttaataaaattatttcaaacaacggagatttagttgctgaagcatattcaaagattggtgattgttattttttcccagctcagattattgttgaggaaaatgcaaagttagctattgatgatcccaaatacaatgaaaacgaaaataagattaaagagttgtatgagaaagctaaaccatattatgagaaggcaaaagaattaaagcctgataataaagctttgtggggaaattatttgctaaatatttattggaagttaaatagagctgaatatgattctttggaaaaagaattaggatattaatacgatctttctatttatgcacaaagcccggacttttccagtctgggctttgttattatctaaagtttatgtatctttagatattagttttttgcatcatggcaaaatttattttcgtctttattaatcaaaaccaatcctttttcaagtctatttacgcgagctatttttgatatataatcagtattatgtttaattaaatactaagtgaacattaatatgggacattcattaaatattacaaaatcagccaactaattcatacacaaagtattgcgaattagttggcttttttgtatctttaggtattc

SEQ ID NO: 3916 - DNA, 236 bp, Unknown
  gut microbiota DNA sequence
ttatatgtcggatggtgtatacctttagtttttactacagaatgaaattacgataacagctcaacaatatgtcaaccttattcaggtggctatagcacaagggttccacctcttcccattccgaacagagaagttaagccttgtcacgccgatggtactgcgtcacagtgggagagtaggtagccgccgttttgattgaagcctccggacttgaagaagttccggaggcttttttt

SEQ ID NO: 3917 - DNA, 5168 bp, Unknown
  gut microbiota DNA sequence
ttaccagcaaacatacgaaggaaaaattatccggatttcctgaaacttttttgtaatactctgaataacagatgtgttacaaagcatgttttcataacggaggacaccggaggaaaaagacacacacattataatattcgcacgcgcgtataaggacggaaaaaaggaaggggcccatacgaaaacagcagacggaaaacaaggaaagacggaaaagaagcaaatccgaaggacaaccggacaccgcaagctagggcagggcaaggaatggacaggaaaacagctacgaaaaacgcagtacgatatacacaacacacacaagtgagttttcaaaagctattgccactgctgaaaaactccaggaaagaaaaagcagagaagaatgtccttattcaagtacgtgccaaccagagtctgaatgtaaaattcataaagaagactacatattttgcacctccccctctaccgcacatacacacttgataattattatttgaaaaaagttctataataatttggtttatattataaactatattacatttgtaaagtatttaagtaaaataaacttttgtcattcaacctataaagcatcataacaatgaaaacaaacacaatattttacaagaagcgtgccactatcctggcatgtgccacactagctattccgagatttgctactgaaagtatagcacagaccactaactttatatcaccataagtaagaaataaagcctatgaaaacaaaccaaaacaacgaaaagacagttccaacccaggaacaaatcgaagcagcatgccggcaaagtgcccgtcatttttggaattggctcacttggtcattagtctattatgtggtaataaacctgtttcttatagctataaactggtttaccagtccacactactggtgggtactatgggtgatagcaggctggggaatcagcttgctgatgacagccatagaaaaaagcatcaaatattaatcaatcacaaactaaaaagaaaaaacagtatggaagaaagaaaattgaatgagaaagagagtttggaactcatcgctcaaatgattcagaatacaaaaaacaggctagaaaccaattgtggcatgccattcctcttttggggatataccaccctctttgtcagcctgctgatctggtttctggtagtaactaccagaaattattattggcaatacctatggttcttactccctatcatcgcaggaacaggaacttacctctctacacgtaatcagcagccgggtatcaagactcatttggacaaagtaatcaattatatttggttggtattcggcataaccggctttctgatatccatgctcgccatgtttttctggcaacttcccatcctgttcataatccttctgctgatgggcatggggactacactaacaggactggtggtaggttataaaactgtcactatttgcggcacactgggagcgttaagctccatcggatgccttttttatccaggtccaaaccagatattaatcttcgctcctgtctttattttcatgatggttattccgggacatgtattgaatcatgctgcccgtaaacaaaaaaaatcgtaactttgcgcctatgttcaaagaattgaatccattactacattccgaactgagacttgccgtgatgtccatactggtttcagtggaagaggccgagttcagctatctgaaacaacagacaggagcgacggcaggtaatctgagtgtgcaaatagacaagctgaacaaggctggctatgtagaagtcatcaagactttcaagggaaaaatgccttgtaccatttgtaagattacactaaaagggcttgaagcctttgaagaatatgtagacgcattaaaaagctatataaacatcaatacataacaaatcatatcattatttgtcacatccacaaacctgtttgaataaatactgtttaacatcttgattgacaagtattctggaacttaccatcccaagatgattatatgggataactttctattatcccatataattttttagaataaacaccataataaaaggttttgtaaatttgtacccggaagagagaacatcctctcccacaaaagtgtttatattatacaaactttaaataatagaattatggaatttgtaacgaatgaaaagctgacaatcgtaggcgctgccggaatgattggatcgaacatggctcaaactgctatcatgatgggtcttactcccaatatttgtttgtatgacccatacgctcccggtctggaaggtgtggcagaagaactataccattgcggtttcgaaggcatgaacatcacattcacttccgatatcaaggaagctttgaccgatgctaaatatattgtaaactcaggtggtgcggcacgtaaagccggcatgacccgtgaagacttgctgaaaggaaacgcagccatcgctgaagaattcggaaaaaatgtaaaggcctactgtccggacgtaaaacatatcgtggttattttcaatccggctgatatcaccggtctgatcaccttattatattcaggtttgaaaccatcacaagttacaacccttgccgctcttgactctacacgcttgcgcagcgaattgtccaagcatttcggcatcgctatggataacgtagaaaactgccgcacgtatggcggtcatggtgagcagatggctgtttatgcttctaccgctaaagtaaacggaaaagcattacttgatatcatcggcactgatgctttgacaaaagaacaatggaccgaaatacaacaaaaagtaactaaaggcggtgcaaacatcatcaacctgcgcggccgctcttctttccaaagcccgtcctatgtttctatcgaaatgattgccgccgctatgggaggaaaaccattccgctggcctgcaggaacttacgtatccaatggtaagttcgaccatatcatgatggcctgggaaacttccatcaccaaggatggctgccacttaaaagaagtgaaaggcacgcccgaagaagaagccgcattagaaaaaagttatgcacacctttgtgctttgcgtgatgaagtgattgctatgggagtacttcctccagtttccgaatggaacaaactgaatccttatattaaataattctgattacaatattccgttaaaaacatcgccgggttcacccttggcgatgttttttttgtatcttcgcactcgcaatgatagaccaacccaccatagaccggatactggatgccgcacaaattgtagatgtggtatccgagtttgtcactctgcggaaacgcggtgtgaattttgtcggactttgtccattccatgatgacaaaaccccttcattctatgtatcaccggccaaaggattatgcaaatgcttcgcctgtggcaaaggtggaaatgctgtccatttcgttatggaacacgagcagatgacctatcccgaagcactacgctggctggcaaagaaatacaatatagaaataaaggaacgcgaattgaccgatgaggagaaacaagtacaaaatatacgggaaagtctctttgttgtcaatgagtttgcccgcgattattttcaaaatatcctctacaatcacgctgacggaaaagccattgccatgtcttatttccgccaacggggcatccgtgacgatattgtcaagaaattccaattgggatacagcactaccgctcctgacgcattggcacaagaagccatgcgaaaaggatataaaaaagaatttttgctcaagaccggactatgctacgaaaaagaagatggcagtttacgcgaccgtttttggggacgtgtgatatttccatggtttaacatcagcggaaaagtgcttggcttcggcggacgtgtactggacagccgtaccaagggagtaaaccaaaaatacgtcaattcgcccgaatccgaaatcttcagtaaacgaaaagaactatatggcatttatcaggctaaagctgccattgtaaaagccgactgtgtttacatggtagaaggatacaccgatgtaattgccatgcaccagtgcgggctggagaatgtggtggccaactcgggtacagcattgagcgaacaacaaatccggttgctacaccgcttcacctccaatatcaccttattatatgatggtgacgaagccggtataaaagcaagtatccgaggcatcgatatgttacttgcagaaggcatgaatatcaaagtgctgcttctgcctgacggagatgatcccgatagtttttccagaaaacacaatgccacggaattcagaaaatacattgatgatcacgaagagaactttatccgtttcaagaccaaccttttactaaaagacgcacaaagggaccccatcaaacgggccggattgatatcggacatggcacgaagtatcggactgattccggataaagtaattcgatatacctgcttgacagaatgtgctaccctcttgaacgtaaacgagcaaattattttagacgagatcaaaaagcatctgcttcaacgggatgataactatctggaacaaatcaagaaagaaaaagacgcatccgccactaccggctctctgcctccagcggatactccttttcctgccggcagcatacctcctgccgatatgcccaccctaggcgtggatgataatgttccccctccgtttcctcctgcagaagcagaagcgggatatcaatcgtatattccccaagaaggacgggaaaagtacgttttttatgtaaaagagcagttactgcttcaaactttgatacgccacggagagaaagtcatgtgctatgtagaaacggaagaaaatacggaaactcctcttactgtgatagaatatatttctatggatttgaaacaggatgaattacagttccataatccgttgcaccggaaaatactggcagaagcagaagctcatctgcatgaccccaacttcacggcagagcgttattttctggctcatcccgatcctacaatcagcaaactggcggcagatatgataaatgatcgttaccaactgagtaaaagcaattcacaagcgatggttaaagatgaagaacgcttacacgaattggtaccgcaccaacttatcgacttcaaacttgccatattagaagaggatatgaaatatacga

SEQ ID NO: 3918 - DNA, 4341 bp, Unknown
  gut microbiota DNA sequence
tgtaccttgcaaatttacacacctcatttttatgtaatttaatatatcccacttttagcaggatattactttacagttgttaactcttttaaagtgtccgtatcttcactccgattgctaaaaattgttttcctgttttccatccgatagctgcttcttgacagttgtataatctcacaacagtagagcagtctgtcaagcaatgccgctgcgacagcttcctctcccggtattgccagccactctgtaagggagtagttggctgtaacgataagcgatgtcttttcctgaaactcattcaccagtttgaacagcaacatgatatcttctcttttcaagggaaagagtgtggcattgtcaatggccagcagctgtgccttcatgatccgtttgtaggttttcatcgcatgcctggaaacatcccttgtcttcagacaggtcagaaggtcctccagcgtaaccatatatgccctgtatccggctttcaccgcctcatggacaagtccggcggcaatataggtctttcctgttccggaaccgcctgccagaagcaggttgtatgcctgtcccacccataccagctcgcgcagttcgcgcagctttctggagtcgattccttccgtccgggtaaagtcgtaacggtccaggtcatgccttgcaggaagcccggccgctttcaaacggcacaaatatttccggttctccctagtccggacctcctccctgaggcaggcgagtagaaactccggataggtcagctgcttttcctgggcctgatgcagcagttcctccagatgttcggtcagattgcccagcttgagcatacgtgcacattccatgagttccttcttatgtcttgtcataatccctgagtatttcgttataagactgtatcaatccgccttgtcggggcaggcgatcctccagtccgtatatttctgttccattttcctttcccctgcacacatattcacacaggcttttaaccgaatccccgttatagatgcctttgtccagacatatccgtatggcctctatcagtgtattcttgtcatatccgggaattatgcgcaggatcacctccagattatccctgtaataacgttccttcctccttttcagattatccatccacatggccacctccctgttgcccgacacatggacaaggatgcgttcggctatcttcactccggcgtttctcggttttctatgggagtcgtcataaacggtccttccctttctggtacagagcgcatgccggcagatgagtttccccgtatccttgttgtacagctccacattcccttccgtttcctgcagccagacggttgtctgcccgctccggtaagttccgcatggcaggctgtaataattccccctgtactgcactgtattgtccttgcgtacatggtattccctcatctcctcctgcggtggttgtggcgtcccatgatagggcatgagaaagcctttctccacggcaaaatcttcccggggaacaagacgggtggtcccgtgcaccttcccgttccccgtcctttcaagccattcgagggcctccctgttcagactgtcaatatcacggaacacacgtgccaccaggaagttctccttcacatatttcactacgttctcgaccttgccttttgactcgggatcggccttatggcagaacaccggctggaaatgctgctccctgacaaacgtctggaacttccttgtcagcatcaggtcccccaggttctcccgggagatcagcaccctgtcctggtcataaaggatcttttccggtttccctccgaaatactcaaaagcacactcatgtgcatagatggcgagttccgtgtcgaaagggcggcgggcgaaaaaggtgaacttgtaacgtgaacgtgccaggacgatcgcaaaaaaatagactttcgtgcttctgccgtttcccgctgacatccatttctccccgaaatccgcctgcgcatactccccgtagggggtgtccggcagtttctcatagtccctgcgtatcctggcctccgacttctttccgatgccatatttgcagcgcaccttttctacaaaattgaatacggtcttgtcgcacacttccgggaaatccggatagcattccttaagccagtcatgtatccttgcggccgatatatacggatattcctccagagtcccccgcacatactcctcgtatcctgccagtttcagcgtgtatttgcgatgcgaattccgccgccttacaaaatcttcccgggacatctgcagatatctccgcacggtgcttctgtccactcccaggtgcttcccgatctgtgtcttgtttaatccttttgactgaagctctctaaccttgtaccacatatactgtttctctttaaaaaatcggctcgttgttatcataatgatgtctgtctttttgagccggcaaagataggcatccccggaaaagtgctgtattcacattttccattttcctgctggtaaagttacaaattacatgcatggataagaattccccgcattgggcgggatatacggaacggccgtacttgaaaaaacattcattccggataaaagtgagaacaaggttattttttatcgggtgtgaactgtagcggggacgggtactattcttcagactgccattcccggaactgtcgtaccttttttaccaaagacaatgccgccctccttgagaaatgtacgggggaaaacgtttggcagggaggtgaacggtattctgcaatttacttaaaaagtatatatgtataataatagaaaaagtaaatcattgcctgaagttttatatgtaagttacttgtttctataaaaaatccccactttcccttgaaaggaaaatggggacacggtaataataaaggagagccgtccgttatatttcttttgcatatcctgtccgtatgagatcggataggaatttctccggagtatcggtggcaatcctcaccccggcctgcaccacataacgttcggcaaaattgtgcatatactgctcgtcggtacagtcggaatccatccagctgcccacacggagttcatgcacaaactcttcggcgttgccggcaacgatacgctcgtcaccaggcaacatatatgtcttcttgttcatattattcatacggctaatttttttgttcttaatttataatacaacttttgtttctctcccaggaaaggaaaatcttccagtctgattcctgcaggcagagaacccacggatgcaaaggtaatcattctgtcgagaaaacacacccaattttctatttttgtaaaactgatggttcccgaatgctggcggaactctaccgtcctgtggcgtgaataggcttgaaggttcactttcatatacctgctggggaacagcccctgaagttccctgatgtttcgtgccgagcgtatccgctcatcgggaaactggatgagggagccacagtaagtgttgctgccgcccctgcgcgaggctggcatgaacttgtctatttccgcttcggcatgcttgtaggaaagcagcaggttccgccatgtagtgatgttgaagtcctccgcattcatgtgcacatgcaatccgcagcttccattaatcttgacattacaggagtccagcacccagcagaccctctccagcttctccagtccgtcctctccctccagtatggggcttacgagttcgaatgtgtcattcccgttcagactgctgtccgttaccagtttccagtgcggacggaggtcatggttgtatctttccgaagccacctcgattcccgcttccgtcagctcgcgtacgagccgctggcatgtgcagttataggcttctatctcgacaccgaatttccttctgaaagaataatcaagttcgggtgtggtggtggcggtgggagtccctgcggatacgatcagcccctcgtccctcattctcttgtagacattccatacaaacccacggtttccacgggttacaagatcggcaatttcacggtgggtgagtccgagcagcagaagttttcggattttcgaggtctttgtaccgtcctcggctaaaatggttctaatttgttcattcataagatgctatctcctttattatcacatatcaaaggtaatgatttttcttcgaatatccaagttttatcatgctatttatcagcgtgttagctttgttttgcttctgctaaaagttgtatccggtatttctgtgagccgtttttccttctttcatggggatttttccacatgcccgtcatttcctccatacgttttccccttttctgcatgtcatttcttttcatgggatggacctcccctaaaaacgcc

SEQ ID NO: 3919 - DNA, 4673 bp, Unknown
  gut microbiota DNA sequence
tcattatataaactatttttgagagattgaatttattggcaataaatattgtacgcttgatttacaccccaaagctaaacttgttttaaatgctcctttcattatgggctataaacgaataaaaggatcaaagttggaaagccgtttgttgatagaggagaatggaaggatggaaatcaagtacggtagctatacggtttattatggagcagatatacaggttttcaaaggtgctcatcttgagataggaggtgacgcttctgtaaatgttggtctgaatcttatttgtgccaaccatatctctatcggaagatggacaggtggcggacgaaatgtgactatacgcgataacaatggagaacatcacatttcgatcagaggttacaagacctctattcccattgtgattaaagaacatgtgtggcttacagaaaattgtactatcatgccagggaccactatagaagcgggagctattattagtgcccgttcagtagtacaaggtcatgtccccagttttagtattgtgagtggagaccccgctaaagtaattgaaacaaaagtttattggaaatcataattaattagatataatgaatttacaagaatttattagcaagtttgcttcccaatttgaagatgaagacccttctgtttttacagctgataccgattatcatgagttggattcatggtcatcacttacaggcctgagtgtggtagctatgatcatacaagaatacggcgtggaacttgacagccaggatgtgcgcaaggcagatactatagaagatttgtttaatctggtcaatgaacgtcaggcatgaagacaactatacggaatgtagagattaaaagcgtagcagcatggttacctgcaaataagatatcattactttcattttgcggatcttttcctgaaaagcaagtgagggatgtgatcaggtcctccggtgctgaatatgtgtatcgtgcagaagaaggacaaaaagcctctgatttatgttttaatgcagcagaacatctgatagagagggataatatagatcgtagctccatagacggactcgtttttgtttcttctacccgtgaatggattattcctgatacggcagtatcattgcagcaccggttaggattgtccactgaaacggtttgtcaggatattaattatggttgtacgggttatatttatggtttgttgcaagcttcagcatggattaattgtggtatgtgcagaaatatacttgtcttgtgtagcgaagtgctgactccatacctagactctcatgctgttggtagcatagaaaccagcgaagttgctactgccacattggtagcgcagggtgatagtcatatgaccattcatctttcttcaaacggttctaaagcagataggattatgataccttataacggatatctctatcaagatggtatgactgtattcacatatggtattgtcaatgctaagattagtattttgaatgtaatggaaaaggaaagttgggaagaaaaggatgttgagcttgttgctatgcatcagtccaatcagatgattattaaaaatgtacggatgtctttgaaatcaacgcctgaaaaatttcctactaatatgaaggaatatggcaatacgggatgttcgtcaattcctttgttgttgtgtgatttatatggtgacaaacagatgtcccaaccctctcgtgccatactttgtgcgtttggtgtaggattgacttgcggtagcatagctactaattttagtaaaactcatttttatgctcctgttaataaaaaatagtatgagaaaaaatgtaactgaatacttggatatcactgaaggtttatattctgagaagatagcagtggaagatgcaaatggttgtatcacatttggtgaaatgaaacgcaatgctttgaaaatagctgaattttgtgtagaacagaatatattcaagcagccggtttgtgtttacttgcctaagtcaaaagagatggtaacgagctttgttggtactaactatagtggaaatttctatgtcccattggatattaaatcgccagacactcgtatacggaatatattggctacgcttaaccctggattgattatcactgacgaagaacacaaagatcaggtagaaaattttggccttcccactgtgactgttggatgcctttgttcgcgtaaagaggcagatttatctgtagtggaatcagcaaggagtagacagatagatacagatcctgtatattcaatttttacatctggttctacgggtattcctaaaggggtagtgatttcacatcgtggtgtgattgattatattgattgggcggtagatactttccattttacagctgatgctaagattggtaatcaagcaccgttctattttgataactctactttggatatttatttgatgatggctacaggtgctacattgaatatcattccagagtcgaactttatgttcccagcaaaattggttgattaccttaatgaacatcatgttacttttgttttttgggttccttttgtgcttgtcaatgtggccaatttcaatatttttgaatcaaagaaaccagaatatcttaaagatgtgtttttcgctggagaagtgatgcctaacaagcacctcaattattggcgtaaacatttgcctagttgccgatatgttaatctctatggacctacggaaattaccgtagactgtacctattatattgtagaacgtgaattcgcagatagtgatccattacctattggtttcccttgtcgtaactcagatgtactcattcttaatgatgaaaagaaggaatgtgcaatcaatgaagaaggcgaactatgtgtgcgtggttcatcgttagcattgggatattataacaattctgaacgtacagcttctgcatttatacagaatcctctaaactcagcttatcctgaaattatttattgtacaggagatatagtatataagaatgagcagggagagattatgtatgtaggccgtaaagattttcagattaaacatagcggttaccgtattgagttgggtgaaatcgagaatgctgtattaggtacgcatatggtggatagttgttgtgttgtatatgattttaaaaacaagcaaatcgttctcttttatcagtctcatgaagatttgaacttaggtgaattccgtaagtcaatcttgaagtttatcccccgttatatgatgcccacggttaacaatcgtgtggaatcaatggaaatcaatgctaacggcaagatagatagaaaatattatacagctttacttaatggataagaaactatccttaattcctccttcaatattataaaaatggaattagtacaatcatatcatcagcttaattcttttatttctgaaatacgttctttacgtaaaggattcatttcaaatttatttctgcatttcgaaaaacacaatttgtggattgaaaagaaagaattgttttatcaagctactactgaaggatattttatttttagaaataattcaatggcaagttatctgttttatattacaacagacgaattccaattaagaaaaggattgcaagaaataactcctcaaatcaagaaaactgtaatggtagatattttggaagactccaaaatagaatctatcaaacaagtgttttttgacaatgactttcttttatatgaggaacttaatcggatgagccgaattggcttgcctgattcgattcagccgggattgggagttacatttgcagaaccggaagattcggttgttattcttcagcttttatattctaattttgaccctttatccgaacagattccagatattgaagaaattgcacattatatacaaaacaaatgggttttagtttataaactggaacacaagattgtaggttttatcatatttgaacttacgggcttaacattgtatttgcgttactggtttgtattgcctcagtttagggaaatgaatataggatctaagttattcaattcatttatgtatgaaggacgaaataccaaacgtcagttgttatgggtaataactcataatataaatgctatcaaacgttatgttcattatggtttcaaaccagaaaaattatttgattacgtattaaaactaaaataaaaatgaaagaaaagattattgcgattttaagtgatcttcgtccagaattcgattttaccgacgaaagtctcaacttcattgaggaaggcatgcttgattcatttgatgtggtgtgtcttgttgatgcccttgataccgaatttaatatagttatagatggcattgatatcttgcctgaaaatttcagtaccattgaaagtatcgaagctttactgaaaaaaaatggtgtgacagaataataatttagagtaggaaacagccattttacatgatcaaaaatagttgtattcttacttgtttatattagttatgtatggaatatttcaaactaagagatggaaataagctgcctgttatagccttgggaccaggagctgtagttcgaaaggaagtattaccttacgctcatttatcttccaatccaatagttaaaattggacaaaaggttgtgaataagttaatatatgaaaaggaatctcttgtctttattaataatgttgcaagaggcataaatttaggatt

SEQ ID NO: 3920 - DNA, 24664 bp, Unknown
  gut microbiota DNA sequence
tttttgaatccgttgtttttacgccacaaatcttctggtccatttgcatgcatacatccctctgaccaccaggtagctgatgagaaaggctgttacggccatgcaaataatgtgtattatggcaggaatcccctgaggcaacagcgaggcgaacaagtcatatcccatttgcacgaagacgaaatgacacagataaatgccgaaggtcatggatgccacttttgaaagaacaggcgaagaaggtattttaagcttctgtatgcagacaaaaacaggaaatgtcatcataaatacattgatgccgccgaaaagccatactatttccagataggcgtagtttcccggaaaatattcctgcatgatgaggtagccgccgaaagtgatggcgtaccctgtcacaaacatagggataccgatagccagggtttttctccaactccattgcagcgggtattttaccagataatgggccagtatcagataaccggtaaatccggaaacataataaaatgaaccgaatgcattccagtcgcacactcccaggatatccatattgccccagttgccgatatatcccagtgcgggagcggccatctttatgtagggaaggaacaaggagatgccccagatggaaagaaatagcttgatatctttccgggtagcacgctccagccatgcatggaagatggggatgatgaagtagagccccaccagcatatacagataccacagaggagtggtgtcatagttgaaattgaaaatgaatgtccaaatcttcgtgatagtcatttccagggtgaaggcggacatgtctatggtaggattgtctgtcgtggtgatgtaattcagataaatgaaatacaatacaggcagcatgaccgaccagaagataagcgggacaacaatgcggccgatccgctttttgtaaaattcactcatgccgtttcgtacaggaaacagcagcactcctgtcatcatcacaaacaagggtacgcaacagcgtacggcacttcccaatgcgcacccttgcagaaaagtaggacggtctgtgtcaaaacgtgccacaaaagggtcacagcaatgggcgaatacaactaaaaaacaggcggtgacgcgtagcaagtctatccatccgatgttctctcttttatttatttccatattctctgttgggcttatttttgttcaagcaccactactaagggacggtgatctgatgctaccggttcatttactacctgtgcggaggttactgtgaagcctttcatgttctgtttcagtgctgtaatataatcaatggtttctgtaggggcgggagccggaaatgtatgctggtttacgtcagaaagtatctgaaaatcctgttgcaagtattttatgaatgcggattcgggttcggcattcaggtcgccggccaggaaaaaaggttttttgtgagcggcggcaaagtcttttataagctccagtgaggccatgcggtcttcttcggtgagagacagatgggtgcaacaataaatgtagttgtcgaactctgccataatcagcgcacgtgcttcttcccgtccgggaagtgtcatggttttcaggctgacgggaatttctttggtgagaagtccgataccatattttcctccgtcgtaatcaatggcaggggcaaagtaagcgtgcatttgcgtacgtccggctatctcgcccagtacgtatttttgtccgctgcggtgggtcatgctgtccagttcctgcaaggctaccacttcggggtggatatgattgattacatcggctatgcgttggaagtcgcatacatcatccattccgtttgcatttttaatgttataggtcattagccgtaacgaattttgtgattgtgccgacagggctaaaagaagggtaaaaagtaagagcaatgtctttttcatatattcatcaggttttgattgtttaaattctctccaaagatagataaattcattctttttttctttgctctcaaagataaaaaacaagagaaagtttttatcagaaaggaaatgtttctgttcaacaacttgccggggctttatttctttcctgccggagaagcctgtgtcatacggatactgcttaccacgcctgcggcaatggcaaagaatatggctaataacaaacaagcctgcgcccgatgtccttcggcgaacatacggaacaacaaagcaaccagtgtggttcccaaagtctgacctaacagacgcgccgtacctagcataccgctggctccaccgcttctgtgagtgggcgcggaagaaacaatggttacattattgggcgtctggaacagcccgaagcccataccacagagtgccattcgccagatgatattccattctgccggatgggggggaagcaaatagagtgtgaataggccggtagcgaagatggccatgccgatgcctcccagcaatccgggatgtactttctctaccagtctgcctgcaagtggtgcggtcaggatggtagccaatggccagggggtaagtagcaaaccgatctgtacggcgctgtatcccaatatattctgcataaaaaacggtaaggaaaccatagccagcatctgggcggtgaatgaagtgatggaagtaccgatagaaagagcgaaaataggaatcttcagtaagtccacaggtaggataggggtcgttttcttcagttggcggcggatgaaataagtgccgattatgattaacaataccaactggatggcaatgaactttctgttttcggcgtgtgcaaaaccttccaaggtataaattaacaacccgaaggtcagtgcgttggctattgcactgattttatcaaacttgtgttttgtgtctgaagccggattatgcggtaagaaccgatgtccgatcactaatgcagccaatcccaaaggaatgttgattacaaaaagccagtgccagcttcccaatgctaagatactgcctgcaatggatggacctgcggcggccgaaacagctaccaccatggcatttacgcccattccgcgccctagtatctgcggcgggtaaattaaacggataagggcggtattgacactcattacacaggccgccccgaaaccttgaatgatacgggagacagtcagcatccagaaagagtccgagagggcgcaggccaaagaggcgcctgcaaaaatggagatgccggtcagaaatatccgtctgtaaccgtaaatatcacctaatgaggcaaatgatagcaaggtcatggtaatcaccagttgataggcattgacaatccagatggcattggaaggggtgacatcgaaatcgtgtgccagcgtgggtaatgcgatattcataatggttccgtccagtacggacatcatgatagccagcagtacggctaccactgcgaaatattgtttaggtataaatgcggtcttttctttgctcatgatgcaaaattaacggaaatcggtcagattaggtttaatttcttctaaataattgctattccaatgttaaagaaccgggaatttatagaatggttaaggaataatgcttatctttgcagccgttaaaaacagtggagagatttgagtagcttgcaaccacagaaaaaaatgctaaaaaatacattgactttcttatttacatttatctactctgataacttcccaaggtggttaacgaattaacttttaatttttaattcttaattttcaatttagaatgggatatttattcacatccgaatcggtgtctgaaggacaccccgacaaagtggccgatcaaatatcggacgctgtgcttgataaactgttggcgtttgaccccagttcgaaagtagcttgcgaaaccctggtgactaccggacaggtagtgctggctggagaagtgaaaaccaaggcgtatgtagatttgcagcgcattgcacgtgaagtgattaaccgtatcggttataccaaaagcgaatatatgttcgaaggaaactcctgcggcgtattttctgccattcacgaacaaagtgcggatatcaaccgtggcgtggaacgcgaggaccctatgaaccagggtgcgggcgaccagggaatgatgtttggttatgctaccaatgaaacggaaaactatatgccgctgtcactggacctggcacataaactgttgatggtactggccgaaatccgtcgtgaagggaaggtgatgacttatcttcgtcccgacgccaagagccaggttactattgaatacgatgataacggcaagccggtacgcattgatacgattgtggtttctacccagcatgacgagtttgtaaccccggctgattcttccaaagaagctcagttgaaggctgacgaagagatgttggccaagattcgtcaggatgtgattgaaatcctgatgccacgtgtcattgccggaattcataatgaagaagtattggctttgttcaatgaccggatagtttatcatgtgaaccctacaggtaagtttgtgatcggcggtcctcatggagataccggtttgaccggccgtaagattattgtggatacatacggtggaaaaggtgctcacggtggcggggcgttctcaggaaaagaccccagtaaggtagaccgtagtgctgcctatgcagcacgccatatcgcaaagaatatggttgctgccggtgttgccgatgaaatgctggtgcaggtgtcatacgccattggcgtggcccgtcctatcaatatctacgtaaatacgtacggtcgcagcaatgtgaaactgagcgacggagagattgctaagaaaatagacgaactgttcgatctgcgtccgaaagccattgaagagcgtttgaaactgcgtaatcctatttatgaggaaacagcttcttacggtcacatgggacgtgagccgaaagtggtgaccaagacatacgaatccatgtatcatgaagcaaagacgctggaagtggaactgttcacttgggagaagctggattatgtggataagataaaggaagcgttcggtttgtaagaaacggattcgaatatggtgatgtatacgggcgaattcaattcgttcctgcggcaatgagcgtcattggctggcaggggaggattggatccgcccgaaaacataaggatttatatgaatgatataaagaatgtatgtgtatatagtgcgtccagcacaaagatagcgaaggtgtattttgatgtagcggaagaattaggacgtcttctggctgaaaagaagatcaatctgattaacggggcaggctgtatcggcctgatggcggctacctccgatgcagcattggctgcaggcggtacggtgacgggggtaatccctcattttatggtggagcaggggtggcaccatacagggctgacccgattgattgagacggagaccatgcacgagcgtaaacggatgatggccgatttgtccgatggtgtcattgcattgcccggaggttgcggcacattggaggaattgcttgaaatcatcacctggaagcagctggggctttatcttaatccgataatcatcttgaatatcaacgggttttataatcctttgcttgaaatgctgcaaagggcggtggagggtaattttatgcgtaaagagcatgttgcgatctggaaggtggcttcaacagccgaagaagcgataaatttgctctatacaacgcctgtttggaacaaggaaatacgtaaatttgcagcgatatgagtgaaacctgtcatcccggaatagcgtatattctccaactttatacggaagagcagagccgtgttgatacggctttgacacacagcgtgtgtcatatgtccaaggaagacgggatgagaggaatggagttgccctatcagctgcgttcggactggatggtgacctgcgtgctgtttctttgctttatcctggtatcatacgtgctggcacatggcaagaaacatcttgaacagcaatttaagaattttgctttgtctaaagagcgtgccagtttgtttgatgatactaccgcatctgatgtgcgttatacattggtgctgatattgcagacctgtatattatccggtttttgtgtgtacgattatttttcggaccatgacctgctcctttttcgtacggttcctcattgtttattgctaagtatttacattggttatgtagtttttttctttgtcatcaaatggcttctttatagctttgtaaattggattttctttaacaaaacacgcaatattatttggctggaatcttactttaatgttgtaatcggggccggatttttactttttccaattgtacttttgattgtgtatttcgatctgtcaccgcaaattgctccttattttatcggttttgttataataattgctaaaattctgctgttttataagtgctttagtaactttttcaacaaattttatggcgctttccatttaattctgtacttttgtgcccttgaaatactccctgattttgttctgtggaaagggattatcttagcgaacaacattttgattttaaatttttagtacattgaaaataaaaaaagtcctcgtatctcagccgaagccgacttctgaaaagtcgccatactatgatattgctgagaagtacggtgtgaaaattgatttccgcccgttcatcaaagttgagagcttgtcggcaaaagagttcagacagcaaaaagtctctattcttgatcataccgctgtgatttttacatcgcggcacgctatcgaccatttcttcaatctgtgtacagaattgcgtgttactgtgcccgaaacaatgaaatatttctgtacgtccgaaaccattgctttgtacattcagaaatatgttcagtatcgtaagcgtaaagtgttcttcggcgcgaccggtaaattcgcagatttggtgccttctatcgtaaagcacaacacggaaaaatatttggtgccgatgtctgatgtacacaatgatgagatcaagactttattggataaaaataaaattcagcatacggaggtagtgatgtatcgtacggtaagtaatgatttcactcctgaagaagagttcgattacgatatgctgttgtttttcagtcctgcaggaatcaattctttgatgaagaattttccggagttcgaccaaaaggaaattgcgataggatgttttggtcctgctactgctaaagcggtaaaggatgccggattgcggttggatctggaagctcctactgtagaggctccgtccatgactgcggcattggatatgtttatccgcgagcgtaataaggattaatttttagtttatatcccaaaaccgggggttttgtatcaataaagttgtaactttgtgattcgaaaccctcggtttctttattttaataaaagaaagaagattatggtagaatatacactcggtaaaaaagagcgtctgaatagtaagacattgattgagcgtcttttttcaggtggaagcaagtcttttccggcttttccgctacgtgtggtgtatatgtcggtagagcctgtggaggaagatatggcggcagcttccattctgatcagcgtgcccaagaagcggttcaaacgtgcggtaaagcgtaatttggtgaaacgtcaggtacgtgaggcttatcggaagaacaagcatttgttgctggatgcgctggcttcccggaacaaaagactgattatcgcctttatatggctggataaccatattcattcttctgccgaagtggaggagaaagtgaagaaactgctgtttcatatagtggaaaggctggaatgaaaaagatactttcctatctgttgctgttgcctgtttatttctatcgggggtacatttctccaatgactcctccttcatgccgttttgtacctacctgttcggaatatgccatcgaggccattaaaaaacatggtcctttcaagggattgtatctggctgtccgccggatattgcgttgccatccgtggggcgggtcgggctatgatccggttccgtaaaatctgttgtccttatgttgctggatattcatacgcatcgcaatgctgctgtaccggaagaatgcattttcaatgtagagcctgcatggtttgaacctgtggaagggtgttattattctgtaggcattcatccgtggaaagttttggaagctggtccggaagattggacaacgttggaaaaggcggtctgtcatccctctgttctggcgataggagaggcgggtttggaccgtttggggccggcagatattctgttgcaaaaagaggtgtttgtccgacaaattttattgagcgagtcagtaggaaaaccgttggttattcattgtgtgaaggcgtttaatgaactgattgaactgaaaaagaagtatcgtccgcagatgccttgggtggtacatggtttccgtaataatctgcatattgcctgccggctgatgcaggaaaacatttatttttcgttgggagaaagatatcagcctgatgtgttgcggcacgtgcctttagaatgtttattggccgaaacggatgagagcacgcaggatatccgtatggtgataggacggatggcggaaacgaagaatgtggaagtttcctttctgtgcgataggatagatgaaaatgcacggaaaatcttttttcggcaataagagttgtttcttcagataaagagtcgtacttttgtggcatttaaagtataaatcaaacatttaaatagataatcattcgatgaattttgtagaagaattaacatggcgtggaatggtgcacacaatgatgccgggcaccgaagagttattggctaaagaacaagtgacagcttatctgggtattgaccctacggctgattctctgcatatcggccacttgtgtggtgtgatgatgctacgtcatttccagcgttgcggtcataagccgttggcattggtgggcggcgcgaccggtatgatcggtgacccttccggcaaatcgcaggagcgcaatttgctgaccgaggaaacattgcgtcataatgtggcttgcatcaagaaacagctggctaagttccttgactttgagagcgatgctcctaacaaagccgaattggtgaataactatgactggatgaaggattttactttcctggactttgcccgtgaggtagggaagcacattacagtgaattatatgatggctaaggattctgtacagaaacgtttgaacggtgaggcgcgtgacggtttgtcatttacagaatttacttaccagttgttgcagggatacgatttcttgcatctttatgaaacaaagggctgcaaacttcagatgggtggttcggatcaatggggtaatattactaccggggccgagctgattcgccgtactaatggcggtgaagtgtttgcattgacttgtccgttgattacaaaggccgatggtggtaagttcggtaagactgagtctggtaatatttggttggacccccgttatacttctccttacaagttctatcagttctggttgaatgtaagtgacgaggatgccgcacgttatataaagattttcacttcgctgagtcaggaagaagtggaagcattgacagcagaacatgctgaagctccgcatttgcgtgtattgcagaagcgtctggctaaggaagtaactgtgatggttcattcggaagaagattacaatgctgctgttgaggcatcgggcatcctgtttggtaacgccacttccgaagcgttgaaaaagctggatgaagacacgttgctggcagtgttcgaaggtgttcctcagtttgaggtgtcacgagatgcattggccgaaggtgtgaaggcagtagacttgttcgttgataatgccgctgttttcgcttctaaaggtgagatgcgtaagcttgtacagggcggtggcgtttcattgaacaaggagaaattaagtgcctttgaccaggtgattacgactgctgacctgctggatgaaaaatacctgctggttcagcgcggaaagaagaactattatctggtgattgccaaataagaaaaaagagaacttcttttataaataaaaaggggatattcagtaaatgtccctacaaacaaaaaccggaagaagaaaacctgttgtttctccttccggttttgtttgtatcttttctttcgtcttattttccgtctatctctttcaacagctcgtctaccgcagctttcaattgtgtgtcttcacctttcactactgtttccggtgaattggccactttgatatccggctctaattgtgaattttccagataacttccatccggcaagcgatagccgataacaggaatgccgaataccagtgtcggatcctgcaatgtttcccaagatacgctggtcatggttcccggtacaggcatacctaccagcttgcctattttttgatggctgtatacccacggagtgccgtgtgcgttactgtagttggcttcacactgcaccatgatactcggcttgttccaacggcggctgggcatatcgcaagcttcacgtccgcgaactacctgtgtaaagtatttctttccgctgaacaggatctcaatatcctcgtgcaaacgtcctccgccattgaaacgggtatcgatgacgataccttcacggttattgtacttgcccagaatatccgaataaacggaacggaagctgtcatctcccatggattcaatgtgcacatatcccaaacggccgttcgaccatttgtctacatcggctgcccgttgttttacccagcgtgcatagagcagatcgctcattacaccattgctgacaggaacaactacttcttcccaacgttctttggtctgcgggttatagagcgtaaccagtgttttctttctggctttaccgttcagcagaacagagtaatcgctttcgggagtgatttcctggccgtcgatcttttcaatgatatttccggccttcactttggaacgggcgtggtcgaaggggcctttttccactacttcagaaatcaacagacctttgccgttatgattccagtcatacagtaatcctaaggtagcggtggcatctcctttcagttgcggacggaaacgtcctccggtatgtgaaacgttcagttcacccagatattcgctcagtaattccgcaaagtcataattattatcgatatgcggcaggaacttgcgataggctttggtcatggcatcccagtctattccgtgcatgttcaggttgtagaagcgtttctgttcttgtttgtatacatggttgaacatatagtcacgttcggctgcgaggtccattttcacgtgggcttgatagctgatgggcttcaaactttcagaatcagtacccattttctgcatcgtgttactgcctagcaagaacaagttctttccatccttgtccatttccatgttggcccatccggcatccattttatggagtaacttggtatctttcttgcgcagattcattttccacaggtcatagccgccttcaaaggcagagaggtaatataaggtctcgccgtctttggtgataatggcgctccccaaatcggaagagttgggagtaaggcgtacgatgcggtcctctatgttgttcagttccaccacaatgtcctttactttttcctctttcttctcttcggatttttctttgttatcacctttctttttatcgtttttcttggcttcggttgtgttcttttgttctttttccagttctttctgcaattcgtaatcttctttgctcaggcggaatttgtcgtatgcatcctggttcataaataccagcatcacatcgttcagtgatccccatgaggcatgggcacgcataccataacgctcggtaatgaataaaatggcattaccatccagtacccagcggggggagccactggtatagccgctattggtcagattgataatttttcctccttgtgcacttaccatacctatatcggaatatggatcatgccggtttccgataaattccaatgtgaaccatttgccgtccggcgaccatgaatagtcaaagccaccgccggtactgaaccaggtggaaccgtcagtgacctgacgtacttttttggtttccagattaagcaccatcaaccggttacggtcttctataaaggctagttccttcccatccggcgagaattgcggataggtacgttctgtcttgtccgaaggcaggagtacttcttcttcaatggcagtcgcattggggaagttggcttcctccttacgtgcaatcttggccatgtaaagttcccagtttccgttgcgttcactggcgtacgccaaagtacggttgtccggtgagaaagtaagtcctgcttcacgggcaggggtatgtgtgatttgcttggtggtattataatcggcggaagtgacgaatacttcacctcgtacaatgaaagcaacttgtttgccgtccggtgatacggtagctgaggttgctccgttactgaaattcagatccgctattgtattttggtcatcacggatgatatcgattttgactttctgcggtttatctccttgtttttgagtgtatatttctccatcatacgtataacagagagtgccgttgctgcccattgacaggaagcggaccggatgggtcttgaaatgggtgaccgttttcaatgattgaggactacttatcggaaaggaatatacgttgaatgtacctccgtctcgttcgctcaggaaataaacggtttgcccgtcgggcgcaaatacagggttacggtcttcgcctgcatgggcggtcaggttggtatgcttgccgttttccgaatcatataaccatacgtcacgggtgatggacgaggtgtggtgtttgcgccattcgtcttcaaaacctttgcggtcttggtagagaaatgtttttcctgatttgtcaaagcagaccatttctgcgggagtacccagcacctgttcggtacgtccgccggttaccgggactttgtatagttctgtcatggccgaggtagggaacaaggcactgttggcagggtcttggatagaggccgagaacaggatatagttgccgtcggtggtgaaggttgacggtatttcggaagccgaatgggtggtaaggcgccgggctgctccgccatcggccgacatgacgaacaggtcgaaattgccattgcggtcactggcgaaggcaatctgtttactatccggtgaccagatggggctgcactcgtatgaggcttgtgtagtgagttgggtggcagttcctccgttggagggtactttatagatatctcctttataacagaatgcaatttccgtgccgtcgggggaaatttgcacgtcacgcagccataaaggtgtagctgcataactgcttgctgcaacaaggcttaaagcaaggcaagttagaagttttttcatgtatttatttcttttagtttgtacgcaaagttaagcatttgcactttattgcaaaaaaaagtgcgaaaatatttggaatatattgcaggaaaaacgtatctttgcaccgctttctaaggaaagcacataatgattggactatggtgtaatggtagcacaacaggttttggttctgtttgtccaagttcgaatcttggtagtccaacagttttcaatccgaaatgaaacaaaagcccgttaaacatacagtttgacgggcttttttcgtatcggatcatatcctttaatatagtcaatacaagaagcagcagtaaaaaaacaatcgatgccgttaattagcggcttagcacatttacaatttccaccacatacatcttgtgaaaaccaccgtgtgattccccataccatcggtccgtaatgctcttgtcgataaagtttccgggcttgatcagatcggcatacagtttcttgcattcaaaagtcaaccgcgcctgctcaaaagtgatgcttccgttctcggtgaacaagggcgatagtcctgtcgcttttactttatccatgtcacgtcccgatttggaaccgcatatcttatgtacttctttatgctcttcacctagaaaagagagagtgagatagtcattctgctctataaagtcgaatgtataacgctcggggcggataaagataaaggctaccggacggttccatagaaatcctgcacctccccagtttgccgtcatggtgttgaatttgtctttggtaccggcggttaccaacatccattccttgctgattgtctcaaacagattgtcagtcagttcgtttacttttatttctttcattgtttccgtatttttagctagtacaaagatataatttttttcttttactgtttcagattaaatttgctaattagtatctttgcgagaaatattaattaaaaaaagaaaggacgatacagtggcaaatgatgtagttttaaccccgatgatgaagcagttttttgagttgaaggcaaagcatcccgatgcgattatgctattcaggtgcggggatttttatgaaacttattcagaagacgctattgttgcctcagagattttgggtattacgctgaccaagcgggccaatggacaggcaaagagcgtagaaatggccggctttcctttccatgcattggacacgtatttgcccaagctggtacgtgccggcaagcgggtggccatttgtgaccaattggaagatcccaagatgaccaagaaactggtaaagcgcggtatcaccgaattggtgactccgggtgtagccatcaatgacaatgttctttcttacaaagaaaataattttctggctgccgttcattttgggaaagccagttgtggtgtggccttccttgatatctctaccggtgagttccttaccgcagaggggccttttgactatatagacaagttattaaataatttcgcccccaaagaggtgcttttcgaacgtggtaaacggggaatgtttgaaggaaattttggaagcaagttctttacttttgagttggatgactgggtgtttaatgaaagttcctcacgcgagaagctgttgaagcactttgagaccaagaacttaaaaggtttcggggtggagcaccttaagaatggtattgtagcttcgggcgctattttgcaatacctcaatatgacgcagcattatcagatcggccatataacttctctttcccgtatagaggaagaccgttatgtgcggctggataaattcacggtacggagcttggaactcataggtagcatgaatgagggcggaaccagtctgctggatgtgattgaccgcactatcagccctatgggagcccgtctgctaaaacgctgggtagtctttccgttgaaagatgagaagcctgtcaatgagcgtctggatgtagtggaatacttcttccgcaagccggatttcaaagagttcatagaagagaaactacatctgataggagatttggaacgtattgtttcgaaagctgccgtaggacgaatctctccacgcgaggtggtgcaacttaaagtagctttgcaagccatcgagccgattaagaatgcctgtttgaatgcggataacgggagtctccgccgtattggggaacaactgaatatatgtctgtctatccgtgaaaagatagcgaaagaggttaagaatgatcctcctttgctggtgaataaaggcggtgtgatagcagacggggtgaatgcggaactggacgaactgcggcagatagctttttccggcaaggattatctgctcaaagtacagcaacgtgaaagtgagctgaccggcattcccagcttgaaaattgcttataacaatgtgttcggttactatattgaggtgcgtaacacgcataaggacaaggtacctgccgactggatccgtaaacagacgctggtgaatgcggaacgctatattactcaggaactgaaagaatacgaagaaaagatcttgggggccgaagataagattttagtgcttgaaacaaagctctataatgaattggtgatcgctttggcagagtttattccagccattcagattaatgccagtcagattgcccgattggattgtctgctggcttttgccaatgtggcgaaagagaacaattatatccgtcctgttgtggaggacagtgaggtgattgacatcaggcaaggccgtcatcctgtcatcgagaagcagcttccggtaggggagaagtatattgccaatgatgtctttctggactcggaaacccagcaaatcattatcattaccggtcccaatatggcgggtaagtcggctttgctacgccagactgcgctgattaccttgttggcgcagatgggtagttttgttcctgccgaaagtgcgcggatcggtatggtggataaaatattcacccgtgtgggagccagcgataacatttctgtgggcgaatctacctttatggttgaaatgaatgaggcggcaaatattttgaacaacctctctagccgtagtttggtgctgtttgatgagttgggacggggaacctccacttatgatggtatttccattgcttgggctattgtggagcatattcacgagcatcctaaagccaaggcacgtacgctgtttgccactcattatcatgagttgaacgagatggagaaatctttcaagcgcatcaagaattacaatgtatctgtgaaggagatagataataaagtgatttttctgcgcaaactggaacgtggcggcagcgaacattctttcggtattcatgtggcaaagatggcaggtatgccgaaaagcatcgtgaagcgtgccaatgatattctgcatcaactggaaacggacaaccgccagcagggcattgccaagcctacggctgagatagcgtccggccggagcggaatgcagctcagcttcttccagttggatgatccggtattgagtcagatacgggatgagattctgaatttggatgtcaataatctgacccctcttgaagcattgaataaactgaatgatatcaagaagatagtaaaaggcaaataaatgccttcatttttcattaaccgttaattactaaccattaatcattatcatgaaacacttactaaccttatggatgttggccttgtgtctgtgtgtttcggccaaggaaacatgtccgaaagtaattcccgccctgcaagagtggaaggggggaagtggaaaactcgtattgcctgctgaaggcagtattgttgtagctcctgccgatgaggcggcactgaaaagtgtggcgactgtgctggcacaggacttgaaagatctgttggattggaactacaccattaggaccgggaaaccgggaaagaatgatatttatctttcattgatgaaacccgacaaacaattgggaaaggaagggtatgtgctgactgccggacgctatgccggtattgaagcaccggctcgtcagggagtcttttggggaacccggagtttgttgcagattctttataatgaaaaaggagagttgcccaaaggagttgcccgtgactggccgcaatatcccagtcgtggcttcatgctggatgtgggccgtaagttcttcacaatggatttcctgcggcaatatgtcaaaatactatcgttctataaactgaatgaattccagattcatctcaatgacaatggttttgtacagttctttgataacgactggaacaagacctatgctgctttccgcctggaaagtgagcgttttccggggctgaccgccaaggatggttcttataccaagaaagaattcaccgacctgcaacgtctgggcatggaatatggtgtgaatgtgattccggagattgatattccggctcattcattggcctttacacattataaacccgagataggcagtgataaatatggaatggatcatttggatttgtacaaggaggaaacctatcgttttgtagattctttgctggatgagtatctttctggtgagaaaccggttttcataggtcccgacgtacatatcggtacagacgagtacaatgccaaggaagctgagaaattccgctattttacagatcggtatctgaagtatgtagagaaatacgggaagaatgtccgtatgtggggagcactgcgctggttgaaaggaaacactccggtgaaagcggataatgtaactattaatgcctggtcatacgattggattgatcctaatgcttctttgaaagacggatataagattatcaatacgtgtgatgcttatctttatattgttccggctgccggatattatcgtgatttcctggacacgaaatggctgtatgagcaatggcgtgtgggtaaagtgaatcctaaggaagagttgcctgaaggaactccgggactgttgggaggtatgtttgccgtatggaatgaccattgtggtaacggtgtgtcacaacaggatgtgcatttccgtacattcccggccgctcaggtactggccgagaagatgtggagagggaagaatgaaatggtttcttacgaggaatttgaggaattgtgcaaacagatgcctgaagctcccggtgtcaacctgctggggcgtgtgcagggtgaggtagtccttccggggcagaatgaagaactgtctttgaacggtacggacagcattgccactatgttgccggaggtaggctatccatacgtggtagaatttgaaataaatccggacaaagaccaaaatatcaacggtattttgtttaaaggtcctcattccaccgtatatgccaattgggaaaataagggaaaattggctttcagccgtgacggctatacgtttgtattccacgctgccacactgcctgccggagcatggacgaaggtacgcatagagggagaccacaaaggtactactctttacataaacggtgagaaagcggaacgtttggaaggacgtatcaagcagttttacaactatactcataaacgcaaggacaagatgtatatgcaggaaactttggtgtttcccatgcggcagattggggatgtgcagaatgggttcagagggaagttgcggaatataaattgcacgcaataaaagatatttcttttctcttgctgtgtaggggcaggttttagacctgtccctatgcccaataggagtgaaatttctccgaatgttatctttaatagtgttatattgtttattatcaaagttttatatgcggtaaatgttatctgttttattttcatgaaaagggctttataccttactttgcattattaaacttaagcaacaaacccgatgaaaataaaacaaattctactttgcatgcttttagcctgctttattcttcccgcttccgcacagaatagctggggtattgtaggaggcggacttttttctaaatctctgtccagggatgcacgcttcagcctgggcggttatgccggaggaatgtatgacgttcatgttaaaaactcatggtatgtacaaccacaattattatttacttatgaagaattcagatccaagacaagacttggtaccgattctttttttagtaaattcaatttggagcttcctatccttgcttcttataatgttgctttgaataacaaatggaatttgcgcatcaatgcgggaccgtatctgtcctatgctatgtttggcagggataaatccattgattacgcctatggcaacggaatgcattctagtttgggctggtggcatcaggattttccagatcattttacttacggcggaagggccggggtttcattggaatccgagcatttcatttacactatcgatggtaagtgttctcttcgtaagagacctttcgggcagagtggcagtttatcggccggtgtaggatataagttctgagttttctgtatctttgtcgccggagaataaaaatagagttgcatgtatgtttatataaaacagccgggtattgtttgccttctatgttggctttgtctttcctgtactttgcagcgcacggaacatcctgctttgcggcaagcaggatacttgatggaagaacatgccgacagtgcgttttcattattgaaatccatctcttccctaaccggtatgagcccggaagacaaggccggttacgctttgctgctggctgaggctgcggataaaaatggttattcactgcttccttgtgactcattattgaattttgctctccatgtatatcatgaagaagccaaagaacatgccatagctcttctgtataagggtaaagtgcaacaggaaatggaaaactatgccgatgccctgaagagttaccgtatggcgcttgaaattctttccgcctatccatgcgaattctattggaaagggtttgtatataatatgttgggtgggctgtatggcaaacagaacttgtacgcacaggccaaagatatgtatgtcaaggcttgttataatgattcgctggcacggcataaccgtcatttcatcagttcactcagcaatctgggggtagcttacattgggtatggaaatatagactccgcttttatctgccagcaacgcgctttgcagctttctctttctactgatagtttccttttgcattctctttatggaaatataggggatttatgcggacgtacaggacggaacagtatagctattatttgtctgaaaagggcatacgatgcctgtcgtcttagagaagacagcttgcagtgtctttggaatctaggggaattttattataataacgggcagcttgattcggctctttattatttgaaccgaagcaaggaagctgtcgatattcatatccggtatctctctttctttgacttgtatgccatagccaagcagcagggaaatgtggagaaagctttggaatatctggaaatcagcacccagttggaagattctatctattccaccaatgtggctacggaactggagaagaagacctatcgttggaatgccgatgcgcaagtaaggaaagaacagttcaaggctaaacggaggatatacaccattgcgatgatagctgtggtgttgctgctggtcattgtgattatttatcaacagatactgaagaacaagaagatacagcaatccaactataaatatctgttgcagaagctgaaacagaacctgatggatatgcagcagaatattgctcaacatgaagaggtgatagccgaattgaaacagaaacaagaaagccgtgtcgaggaaatagaagagaaggaacgggctatagaggccatgaagatggagaaggagaaattgcgcaactggttgttccggcaaagtgccctctatacgaaaatagacaaactggccaaccagcaaaagcatcacaaagagcgtattgcagtgctcaccaatgctgagcaacgccaactcagagtgattataggacagatttatgctgattacatagagcaactgcatacccggtatcccaagttgaacgaagatgatgtccttttgctatgtctgcaattggcggatttatctccttttgccatcgctttatgctttggtaataatgatgcacagattgtagcgcaacgcaaatatcgtatgaaaagtaagatggaataactgtgtgttacagaatttacataatgtttttttaatagatgtttgtatatcaggttataaaggcattttgctatctttgtgcatagaaagctaaaagacaaaattactatgcgttcatttattatatatttaaatttcgtcagtttgctggctgtctgtttgtttgcctgtaaccaccattcttccaatccgatgttacagcaagtagattcattgttggaaatgaagccggacagtgcattgactattttaaaaaatatatctgttttagaggatttgccggaagtagacaaggcatactatgctttgttgctggctgaggctacggacaagaacaaactacccttattgccttgcgattccttattgaatttcgccttggattattatggagatgatgatagggagaaggctgtggcattgatgtataagggaaggctgctggcagagatggatgatgaaaaggcagcgatagagatgaatttgaaggcattggaaatattgcaggattatccggtagatacaaaatatagaagattaatttatagtgcgctgggattgtggtatgggaattgtggattgaatgacaaggcattggaggtgttgcaccaatctcttcattattcttttgatgctaaagatactgccattgcttatattaatataggatatatttatggcatgagaaatatgcaggattctgccataacctatcagcgcaaagcagtgaagtatgccatgcgttctaaagatagaagcatgatacttacttcttggcataatttgagcatttgttatagacactttgaaaatgtcgattcggctgttgtttatgcgcataaggttttacagcatttatcttatgggaatggaaaagcagatgcttattataatatgggggatttatatgttgatttggaacaatatgattcagcacgccattatttagaaaagagtttgtttctttctccatcccgctctataccctactggtcacttgccgtaatggaggctgaactaggaaattttaagtctgcctatcactatctggatacgtttgttatggttcaggactcattagataacagtgagctattgacggaagtgcaacatttagtctataaacatcagacggaattaagagtaaaggatgaacagataaaatccaaaaggattataagatggattgtctttgtatccgttattatttgctttgtcgttgctttgatttaccaacgttggataaataagaaaaataaccagcaggcactctatcggcaagcattacaatatgctgatgagaaacagaatgtgatgcagcagcgcatagaagaaaatgaatccgctcttgcactgttacaggatagggaaaaccaaaatcttgatgaaattgcccaaaaagagcaattgataactcaattgaagaaagaaaagttggcacttcgtacatggttatttcagcagacttctatatacaaaaaggtgatgtcattgtctgaccagcagcaggtgaataagaaaatccgtaaggtgatggcagctgctgaattggacaaactgaagaaaacgacctttgaaatctatgctgattatatttctcctttgcaagcacaatactcccaactgacggaggatgacttgttggtcctttgcctgcaagaagcgggtatttctccgttggccatttctttatgtttcggacatacggatacggtagccctcaatcaaagtaaatcgcgtctaaaaaagaaaatgtcagagtgataaactgaaatatattgtttatcagtgttttatagaaatattatgtcacagtaaatagttgtacgttctttcctttccctctaactttgcggcatcatttttaaacaaaaagaagtatgaaagcaaagttattattgatgttatttttagtttccttgagtttgggagtttttgcttcggagcatcaccaaaagaagcctcatgcagtttgcaaagtttatgaaaaggtggctactagaattccttttattttttcagtacaaaccgaagatataaatgactgcttgtatctcacatttcaattttcattagatgatgctgacattactatgctagataaggatggtaatgaaaaggtgtagttatgaataacgcatttgaaaaaacagctgtacttcctaagtgtgataaaggaagtgcttactcgactcagataaatttaagtttttaagtaattccaattaaggctgtatgataatattttagttgataatctaaggttattgataatgtgaagttcatatctgaatcttattttattgctcatgttatgataaaatatgttatatggttgatttttagtgttgtataggtgagtgatgttatatggatagagctttatgcttatatcttctttctaattttgcaacatcaaataaaaaaataagtatgaagactaaaatgattgtagtggtggtgttggctgccatgtgtgtattgcctttgtctgcacaggtaaaagttggtgtggaaggtggaatgaacctgtctcattatctggtttccggttctgacggatataaagccgaacaggtaggtggaatgaagcccggctttcaattgggggtgactgtggactacgagataggaaagcattggatattaatgtccggtttgtcttggttgcagaatagaagtaccatgaaaatgatggatcacatggttacttattttcctaagacagagataaagatgaataatctgattttgccgttaaaaatgggatataatattcgggtttcggataaactcagcctcattccgtcggttggagtttatgcttcttacggatttggtgctggaaactgttctttggatgttattcaccaagagggggataatataactaccgagcctgcaaaatggaagcccttggatggtttttcctataaagccggggagcccaataatagtggtaatcttcaggctttccgccgttgggattatgggggcattgttggaatgaaggctgttattgccgatcattatacgataagttttgattatagggtcggaataaaaaagatacaggcacaaaatggtttgaggaattcaactttccagttctccgtaggctatcgtttctaaactgatttaattaaagtaagcattcggcctcgtgcgtgtttctctc

SEQ ID NO: 3921 - DNA, 51240 bp, Unknown
  gut microbiota DNA sequence
tctcaccataagtggtgattctccattctttaaaatctttgatttataacaggttacattaactgttgcttccattcttggtttaactctcggtttaactgaaccatgtaaaccagcgcaattaaggcataaaaaaagagagttactttggtgtaactctctgattctttggtgatccgcctggggctcgaacccaggaccccaacattaaaagtgttgtgctctacctgctgagctagcgaatcaatcctttattattgctattcttccgaattgcgagtgcaaaggtacagtttatttttatatctgcaaacatttctagaacttttttctaaaaaaatgcattttatccattattcattcattgcaattaaaacttccatgtacttccgccaacagtttccaagcccttgcactatttcacaataatctcttctacaggctgtttcaactccttatccaatggatacgactgatacttcactttatcaaaatcaatcttcttcatactaatacaacgaatattgttattgtatgctgttttataatacactttcctgtttgtcaaatcaatagccgaagtccattgtgtggcactaggaatatcaggtgctttccctaacgcatgttctataccgataggaatatcaaaattattcaggatatgaaagctttgtaatatagcgtcatacgctgtaggacacaccggagctgttgccttataaaacgctacacgaacaaaacgggatggaggagttacatcccccggaatgccatgaaatccggcacctgcgccaaaagggaaaatagtcaccccaccccattgctgtggagtgacagctcccggatatagatttacataattattcaagttagtcacctgccatggaaaatcgggagaattggtgagtactcctactttattttcataaaaataaggaacaccacctacaaattccaacaccatttgatttcctttagcatcgccaatgcgccaatgtaccgtagaacttttaccaggtttatcaagagacaccaccttcaccccttctatagcttctctcacttcgtctatagtagcaaattgggaaagcatccagttcaccacctgcaaatccgacaaagtaattgcattttgagcctcatcatattcttcatacttcccataatggggaaaataaaacaatccagccgaaagccctacttcattcagtccttcagccacaaactctttctgaatgatagccagtcccaccagaccatatttagcccgaaatctcaagccatttacacccgttggagtataagataccaaatcctgtcctctgggaacaataacatattcactcggaagataactgtccccccactctatagtacgtgcctgcacatatccgccatcttcagcgaggaatgaaataccggtacatgccgatccgcttgcaatgcctgtcagcaataaggccaaagctatcaaaatctttttcataaccattttaaatctatttatgatagtaagaacaaagcatcggacattttagttcttgtttacgcaacaaagataaccaaagccatcaaacaatgttccggcactgattgccatacaaatagataagaatagaaaaacaaaaggagtgacaagttcccaatcgagtatatacaaagaagtaggaggtgaatttacaaaacacacctccttacccttaaattatttattcagcaaacaatttactacatctttctcccgttctttaggtaatacggtcaagccaaccaccgtccccccttttagaacagcctctacagtagtctgtcctgtagcatgcaatttgaaatgcacatcccaatctttaggccaagcaggaaacaataaaatctttccatcggcttcctgcaacagcatttcctgcatacctatcatgccgctgcctccccagttatggtcgggagtccagtcgtaacccggtccccaaaaggcgggaaaacgatgaggaccgttcgccattttctctaaggtaagttgtgcagcctcctcggtcatacccagacaagccgcccagatattatcttgtttccatccgatatgtgaacggaatttctgtgcatcgggatcatatagataggtattacgggctatttccagaccttccttccccactccatacatacgccagggaaatacagcataaagctggggagtttctatattgttcacccgttcccaagcctgtgccggagcaatcatttccttcccatccactatgcgcaaagggatctcaggaatacgtgccagcatgtccggtttacgtccgtaggtttgtaaaacagagcgcagcgcggcaatggttgaggatggattataagccatcttataagtttcacaagccgatcccggataaatcaccagtttgccgttaccatctaaatccttacgtccacgctgtaatgccagttgacgataatgctcatcaaagaaattaagtgagctttctatcaaagggatataacggctgatatcagcctcattataacgtgccgtttccagtatcatctgacaaaattcaagaaccgtatcccattcgtattccagccatgcattatattccaaccccctgtcatagctttcaggacgtttaaagccatactcggcaggattgggcagaccgaagttctccatttgttcggtgaaacaggcaccggcatgtccccaataggtacgggtacgtgcttcggctgtcggcaacaaacgcagataaaagtcaaattgtgatttcatcaagtcaaagtcaccgcttttcagcatgggccaataaaccagacgctgattctgtgcagtcatggttcctcctccccatttccggaaatcaggggtaaattccattttctgatctacatacataggatcaaaagtaaacagtcccccgttaaacttggtaggccactgactataggcgttacatcccaacatatagcggaacagtgtatagttacggatagcatctcccgcttcaccttccccctcaataaagctacgtttccaaaaatcattccaccaacggcgggtagcctgtttgtctttggatacatttatttccttctcagtgcgggccaaggatgcttcccatgcaggaaccgtactttgttccgtattcagaacaatccgtgcagactgcttataagtaggtttcttgcttttgtacatccatgccagatactcagtacctgcataatgtccacggcgtgtaccgttataaaccagattatcacctgataaacgccccccaaaaatcaaattcttcaaaggattatacagttgttccttcacttcattcattccctgctggtccactaccacatcaaaaatagtacgttcaggattgcgatggaaaaaagtaaaattatcttcttccacacagacagagtcacgcctagtcatcaatccatcaggaatggcccatttgtaagagcattgctgcccttcccctttacgcaccggacgatcttcataacgccagctttcaaagttcacacgcatggaagtcagttccttcgttttcacctcaacatgtaccacaggatgaaacacatccacccaaataattagagtggcattatcactacttacgctgacatagccatcattaagatgcagagtctgccgaaaagaagccgttccggcaaaagggttcggagtgagcctcacacgaaaccgaccctgcttcagcagacagttattctcgtcaaaagaaccactacgactaaggtagaacagaacatcgtcattctctacccatacattcatgccgatatcaccacccccgcagggcatagactccgaagcattccggctttgagtattccaaaccaaattggcaggctgtccccacagaaactgcccgccaataaacactaataataaaaacgtaaagatattcttcatttttttctgtttttaccagtcatcggaacggaaagacgatacaggtaaatcttcaccaaacaaatctccctccacataattctcgaagccataacgaactgccaccggatgaggtactctttcgctctttacaagcattttgcttctctgtatccacgctttagcaggataaaaaacccgatctttacctgcaacctgaaagttatatgattcaaaacggtctttacaatttatccacatcggtgcccgatcaaaactgactattaccgtatcattctttacttccattcctgtatagtaaggactttcggccgtaacacctttcattccgtaagtttttaccaatgccaaacgcgccagacgttctcctgccaccttctttttacccggatgaatccccgttttcattcctgcgtccaacaatacagccataccactattgcccacccggtgttctaccatagcttgttgttcgcgaagataagcagaatttatcacattcttgccaggctcagtaataattccataatcataaggtgcaatttgacaataatagaagggaaattccccttgctgccattcttcgcgccacccgcgtatcagtgcactgaacatatcggcataagtagaagcccggttatagttatcttccccctgataccagataactccacgcatggctaatccgatgagcggatgaagcataccgttatagagaacagtcggagtacggttctttgacttgatatcggcttccgattgaggaatctttgcttcgggaaatgccttcaaccaatccggatgcatccaggcttcacaggcagaacctccccaagaagccacaatcaaacccacaggtatattcaactgctgttgtatcatccgaccgaaataataagcagtagcactaaactcacgcacagttgccggaacagcttcctgccaggttcccaccacatctgttttcggagtaaaagaggaagaacgctttacggtgaacaggcggagttgcggattacggctgttcatcacatctgtattgctattctccaccggctggtttttaaaacctttcatgggcatttccatattactctgaccggagcataaccataattcccccatcaggatatcacgtatttcggtcagctttccatcatcaaaagtgatcgtgtaagggcctccggcagagggggtggataaagcaagtttccacgcgccttttgcatcggcagtcgttttataggtttgtttatcccaacttgttgtaattttcaccggtgcatcgggagtagctgttccccataaattggcacgagtctgctgttgcatcaccatgccgtctgaaaagaaagcgggcaatttcacttccgcatttgccgacaggcaagtcaaccatgcccaagcaatgcccagtagtagtttcttatttttcatgttatgtgtgattagcattattctttagttctaaaaaactcgcaaggtcccatccatccggcaggtaacaaaccatctccgggcagacggaattttgcattcgtccatatcccctcaaaaggcgctttatcctgatctgctccacggagcgcattcgcccaggtattcaccacctccacttccaagacattggttccgttacgaagcgcatcggtaatgtccacttcgtatggagctgtccaagccgtaccgcatgcaatgctgttgacacgtacagtcgctacattggctactttacccaaccgaagaataattcttccgtcctgttcattcttccatctgaatagccctctgtaagtggcatgtccggaataatattttattttttcatcctcttccttactccagtcaaataataccggacgagtgacagttttgcgcacggaagggaatgttactgtccattccttgatcgatatggatacaggttccctttcgatccgttccggagaaacttctgaagattctttggggaatacgacaaatacagagccattggctggcaaagacaaagcgacttcggtacggccgtccgcttctttccattgtgccggacgggtaatggttcctgttaccgcattccacaattcaggcgtgcgccctgcaatgcggaaagaagcgttgaatgtacgcaaactgtccacctgattagccacaaaataaatctcatactcttccccgctccgatgagtatatgccacatcagcaggaagaagtacatcccgttccacaccgaaagaagaaaaatcatcttcccgataaggcaattgcggaataatgacacctgccgcgcggagttcctctacttttgcctgtgcctcaggagacaacggcaggttatcaggattcataggacgggctgtaggaagcaccaatactttataagaagctcctcccggaagtaccattcttccattctccgcttttgccaaacgtaacagagcgtctttgttaaaagaatcgtaggcataaccacgcatcgggttcacccagtcttcgggatcggccatgtttgccgaatgggtaacaccgacaggacgcacacgggtgggttgaccttcattagccagccgaatccgttcgctttccacccgttcggctccatagataccgggaagcatcgaaactaaccgttcgggcaaaatggaacgtcgcggcatctcttcaccggtaaagacggcgatatcaaccaccggatgaccgtattgcaacaaagtctggcaacgggtgatgtaatctacaaaagatttcccttcctcccaccaggtctggtcgcgctggaagaagagtccgatgccgtccaaggtcataccgggacggcggttcatccaaggattatgggtatagacatgaaagaagagtttattgatacccagtgcatagttacggtccagcaaaggtttcagcatggcagggtcttcatcccatacgccacgaatttcagtaaagccttcggcctggataatattctttccataaatatgcgcgccactgatggcatccagcatatcattgggtttatcgtgcgtaggactgttcagccaaaattcccccataggcagatccactttctgataatgcatcaatccgtcactgaccatagtaggagctacgcactcggcagagaaccggcaatcgtattgacgggcacagtctgccaatacagtgtagaacacatcagtcaccagttctccgatggtggtacggacatcccgcaatatctgctcactgcgggcggcactttccatcggaatacctgccagcaaaggaagataaggcatcaaatcatatccacggcgtttcttaaattccgccgcgaagttatcactccagttctgactgccacactcccaactgtctacgtgcatatatttcaatacacggcgtgccacggcttcatccgtctttttgaacatttccgcaaaccagttcgagaactgtttctgaacagccttggtgctgaacttgtcgcattccaatcctttacctcctccggcagtagcattcacatgtccggttgccgtatgtcccatgcggagaatacgccatttaccttcgggtaaacgggcggtcagcctgccctgatacaaagggagattgatcaattcatccggttgcacacaagccgcatcgggtatttccgtcgaagtagtagcagtagccacacgccacaccagtcctgcttttccctcccactgatgaatacgcggagccgtatgaaggactatatcattgattttcaaattcggtttccatttagctgcatccagatcctcactacccggttcgcttcccacgggagtccactcaaaacggaaataacgggcggtaacaggggggatggcatgagtggactggaaatccgtattctgccatccctgccgggcagggaccagttgcttcactgttttgaacgtccgtccgtcctcactggccaatactttcaggcgatgtgcctggtagttatttcctcccaaaataatttccacgttgctgcaagtcacaggttctgcatattcatactgaatccaacaaggataagaggaacggaagactcctttctcatccctgttcacagccttggattcatctttgataacggcctgtttcaaattgccgaaagttaccttcggcttcaatgaagtatcctcaggctgacgctccaatggaatggcgtaggtaacgatatcttcataatagccatccagtgcttcgggcatgggcaaagtgagattccggatatttccaccgttcacaatggtgtcactccataccactttttgcatggattcttcgggagtcatccaaggacctcccgccaaggcaaagccgtcacagatgtgcatgcccagttgcattcccagcctgtcggcctctttcatactatgagtgaccatacgccaccattcgggggtaagctgctgggctttcccttcgtattgaggtccctgctccactcccttgatgggcatcagataggctccacccaaacctacacggtgcatggcttccagatcggcggtaatgccttcgggagttacagcgccaaacatccaataccagaaagtccagggacgagcttcctgtacggatgaatttacaaactgttgccgtaaagcggattgtgctatcatcggttggaatccggttgccagcaatatggatacaaacagatgttttatcttcataagctatttattctatatttaatgataaacgaataaagttgtaatttgtactcaatttttcaaatatagagagttcgagccaaataaaaaaagaaaagggaagaataaacaaagttcctcttccctttacaatctattttttcactgttattcaaattttaacgtgatacctcccccatatgctccatcagcccaaaatgcttgtgaagacggacctatcaaatctgtcgtattcactttattacgaaccggaggaattactttcatcagactgatgccggtagccgggaaagtataaagcaagccgtcacgaccgtcgcgaggctgataaacccctacataattctgaggagtacggttacagatacttatcgttccttcctgcgttttcaaagtcatccattgcacattagcaaagtaccctttaaattcgggataagtaaagctttcggcaggaatgggatcattatactcattttcccatacgcccaactgcggaccatgcagacggttctgccatacacggtaaggaccgtcacctacccaacgcttgctcaacactttatcttccggataatcaaacatcacccccatcaaatccactacaccgctgaagttgtatgtaaagtctatagcagcggtaccgtcaggagcgatagtccatacagcctgatcaaaacatcccagtttgtagttagcggtaaccactacgttattgccttcttcacgcacggcaaagcctgtaaaacgaccggcatcatcaaatgtagtgtattgggttttcttcttttcagcctctttgtcatcatggttataaaactggtccatagaacggtccgaacgcttggcagcaataaaacgaggaccatttgccagactgatgatacggcttccaacctttacccccttcagttgtccgtctttctgagaaaaagtaaatgtacgtcctccggcatccaccgtcaatgcatcggcagtttctttataagaaggcttgtttccggcagaagcctgctgcaatccggcaacgtcgtccagtttataactccacgtaaagagatcattcccctgcttatccgttactgtcagcatcaaagcatgggcccccttgacagccgcaggaatagtcagtgtacccgcaccgtgagcaggaatgtcgggacagttcacctctccctgtttcatcactttcattccccccttatcggttacagaaggcaattgcacatatttataagtgaaacggcatgtattcgcattcaggaaatcgtaacggttctctattttcagtttgccgtcaaactgactgtcaaggctatcggtcatgatttgaataggacaccacacctgcttgatggtaaagtaactgccctctttttcgtgatgcggacctacaatgccatcggctccataattgccgcagttgtcaatgaatccattcatatccacacgcttcacgccctcatcggccagtacccaaaggaaacctccggcacaacggggatgcttacgcatcatttcccaataatcatacagtccggctccgtgtcctccatcgtacaatccatgcagaaactcggtcggcataaatatttccggcagacgcatatagttctggctttctccgtaagaacgatagtgcatggtttcatatccactgaagttgccttgcggatgaagcaccggacgtttctgaggatcatatttatggaattcaccatccagttcagtattccagcctttttcattaccattgctccaccagataatacacggatggtttacatcacgggtaatcatttcttttaccagcttctgcccgttgatagtttcgtgcttgccatgccagccgcttaactcatccattacataaagccccagcgagtcacaagcttcaaaaaattcgggatcggcaggataatgactcaggcggacggcattcatgttcatgctcttgatcagcaatacatcttcaatgttctttgccttgctcagtgtacgtccgctttcaggacggaaactatgccggttcactcctttaatcatcacacgctgaccattgatatacaatccgtcactttcacgtgtttcaatggtacggaaaccaaatttctgattttcaacatgcagtgttttgcctgctttatcaagcagggtaaaggtagcctgatacatggccggagtttcagccgtccataattcaggagattttacagcgaaattaatcgaagcatggtcgctgcccgtacggacatccgaagtattttcggccacttttttccctttagcatctgttatgacagtatgtaccctagcaccttctactgccatattcagaaaataatcggcatagaaattcccatccgccttcgcatctattgccagacgatctatattttgagccggtttcgccacgataaacacaggacggaaaatacctccgaaattccaataatcagcacgacgttctgccaaattaaccccagcattcgcactttccttgcttacagttacttcaagtacattcttttttttcgatccgaaaaatacccggtcactcacattataaataaagcggtaaaaagctccctgatgcatggagccggctttacgaccgtttatctttacctgcgtatcagtcatagagccttcaaataccagctctatttgtttaccattccattcggcaggcaactcaaattcatatttatacaaaccttgttcgtcagctactccttcaggaaaagccttaccatagaatttcatgccatattgataagtaccgaatccttgcagttcccaacaggaaggtactccgattttcgtccattttccggaattattaccaccggtacacatgaaatcccattgtaccatatcatcacagccacgtcctgacaagtattggcgttctgtttttacggaagattgcgccaacaaacctgccgataaagcaaggagtgataaaaaagttgttgctcttttcattttgatatttgatttttaatttaattctatatttctgtctgccaccggaaagatatgtcgcctattcaaaccttttgccatacatcattttataagactgaagcgtacccgcaaagtatgaggtttctgcttatcaatggcgtatttcttcagcactcccggaccacaactactgtttcctaaacctaaaaccgctgcatccaggctgagaataacctcctttcgtggtttcaagtcacaatcatgagttgttttataaatatcatccacggtataatgtaaggcagaaaatgaaaatggccggtctatggctgtcacacggacgcctttaccctgtttattggttagaaccacctcggtaacatcctcgtgattgccactgtcctgcggacggggataatgtgtgtactgttcactcaccttgctgttccatctacctatcagacaggacgtcttacggtcgggatagttttcccacgggccacgaccgtaccaggaaaggttctcatattcttctcccaatacaaatgcactgcccagacgaggcaattccggcaattctccttgtggcagataagtctgttccagatccaccgttccatccacatatattttataatgggaagaaacacggatgctacctttggcataacgatattccacaaccgatttcttcgatacggttccatctgtttcctgagtttccgtttcgggagtaattacctctacttgaggagcatccaatccctgattcttccaatccttggccaaccagttaccgaaacttttatcattatccgtcggagcacggaaagcttgaaaataactatcttcccataaatccaaaacagaaaacttacttttacgtctacccggttgtacaccgtcagccaccgccatcaaatgatcattcaaggcaaactgttcctttaaaatttcatgcccggccttcgcccataaagcatcttctttcaatactatacttacattcaatcgaacatcagcctgtttattaatcttaacatcgggcaaagccatcgttcctgtttcaccgggtgccaccgatggaagcgccagttccccttgtttcatcttcttcccgttctctatcaaagtccacagacagcgatatccttccagaccaatgtgatgattgcggttcgtaactcttaatcctttgggcaaaacatcttgttcttttaaaaaaaggtgctgatgtttttttaaaaggtcttgttcttttggaaaaacctgaagatctttttccatttccaatttaaccggagcatatactttcttcacctcccaatatttaggcgtagtttcgcggtcactcatcaccacaccattaaaacagaaagcctttaaattaggccgatcaccaaagtcaccgccatacgccaccatccggcggccatccggcaatatcttataaataccttgatccacccagtcccatataaagccgcccagcatacgtgggttactataaatctcatcccaatattccttgaaattacctaaagcattccccatgcaatgtgcatattcgctggtcatcacaggacggttatcattcgtgcgttccgctatttccaacaagcgttcccaacgtgcgttctccgcccgttccttgtcctccccttcgggaatgccgggattcagatactcctgtttcacacgggtataaaaacggctgattacatccactgttttcgggtcgggttctccgtttactccctgagctccttcatagtgtacgggacgtgtaggatcaaaatcatgcagccaagccgaaatagcagcaaaattaggtccgtaaccactttcatttcccatgctccacatcactaccgaaggatgatttttatcgcgttccgccatacgtaccgcacgatccagaaaagcaacgtgccaatcggatgtactagccaatgttccacgtaatccgtgctcttctatatccgcctcatccatcacatacagtcccaagctgtcgcacagttcataccaacggctcacattgggatagtgactggtacggactgcattcacattggcttgtttcatcagcaatatatcctgcaacatcctctcctcactcatcacgcgtgccgtatacggatcgtgttcatgacggtttaccccacgaaaacggaccgaattaccgttaaccaacatttgtccgtcctttatttcaatacaacgaaaacctaccggctgttccacttgctctatggtctgtccgtttgcattctgtaaacgaagttccaacttatataaataaggagtttcggctgtccaacgttgcggagattttataacggcggacatacgtcccatcttacgtggaccacgttgcggataccattcattcatccgtgccgccttatgctccaaatccaagatatcttccacattgccaaccatattcactacttcccttccatccgcatccttcagcaccgcctgcaacgtataacctttaccgtccattccccggtaaacgctgagctgcggatcaatcagcagtcggaaatcttgataattcccctgaacagcaggcagagtgcgcactacatagtcacggatacggatatccggagtatgcaccaaatgaatactgcgatgaacacctccaaaacgccaaaaatcctgatcttccagataagatccgtcactataccgataaacttccagagcgatttggttctctcccggtttcaaccagcgggtgatattgaactcactaggttccatacttccctggctataacctatacgttcaccgtttatccacacataaaaagcactcatcactccttcaaagcgaagaaaagtctgcccatatgccttccacccggcgggcagcgtgaaagtacgccggtattgccccaccggattacgctccttgtaggtggtatacgaagctttaggctcccccatcacccgtggaggatctattttaaacggatatcctgccgatacataaataggcgttccgtatccgttgatttcccaattggcaggaaccggaaaatctttccaatccttgtcattaaagtccgtgcggtaaaaatccgttatccgttcggaaggcacaggagtccaccggaatttccacatcccgtccagactcatcgaacaatcccccttctgcttggcaaaaggcacaaaagcagcccttgccggttccctattaatctgtaatacatgatgattctcccaatcatgtatttgttgggcctgtaaggataccgtcatccatccgcacagtaacaatccatataatctcatatttttggtctttcttttcaaatgaagacggacgaaatatgattttgtaccatataaattgtaaaaagaaaacccttctctccgatatcatcatcgaaaagaagggcaaacttaacatggacaaaacaattatctaggattttgaactatattcggattagcatcaatttctgtttgtggaataggaagtgccaccctagggtctgaaggagcaatgacacgggcatcttcaggcatagtcagatgccagcctcccgaacggtccaccgacttgccattacgcatataatcaaagaaagcatgaccttcacctaccagttctttacgtctttctttcagaatgcgctccaggctgagatcagcagatgttacggatttcgccggattggcacgggtaactatcgcattcagatatgtcaatgctttttccgtattgccgattttaaaagcagcttccgcagcattcaaatagacctcggataaacggagaatacaaagatcattatcctgtggattgactgtagaaacagcatcggtcacactgcccgatttccccggatatttaatcagatatttcggttgacctttggcagctacaggcaatgtatccgcaacggcattttccggcaaatgaggaaatacatggcgcacatcttcagggtcttcattcagcaaatccaaataagcctttgtcagaatcaggttattccaatctttcacattatcggcatacaccatcggcgccccttctcctcccgaaccgcctgaaggttcagacatcgtaaaatagaattcaaacaaagactcagagttaaagtcttttccccatacagaaggatattcgtcatgagtaaaaagccggtaaattcccccattgtcattgattacttcttctgcacatttcaatgcattttcattgtcattcatatacagatacacccgggaaagcaaagctttcacactccaataattcatataggcatcatgtttttcctttgtcagtcctcccaacgcatcgttcaagtcctttagcacttgttcgtaacattgtgccactgtgttacgttccggagcatgatcttccaaggtagtctgaatctcaataggaactcctaaagaagccccattatccaaagtataaggcataccgaacaaacgggtcagatcaaataaagccagtcctctcattgccagtgcctccgatttaatccgtgccacttcttccggcctggcattccccgcatttccggcatccaacttttctatcagactgttagcctgatggatcactttatagggttggttccagacaagggttatattaaaattatcatccgccgtaacatcaaagaaatagtaaggcgaaaccctgcggcctgctcctttattaatacgtgcctgcacatcttctccacgacaatcagcataataaagataattatcaccataataactatgtgcggatgctaatcggtatataccattcaatgccacctgtgcatcatctatatttttaatggcatcatcactgggaactgccgtagaaggatctgtattcagccaatcagcagtacacgaaacaaacatcaatgatacagccgcaacaatcgataaatatatttttttcattttgttctaatttaaaggaaattcattaaaatgagacttctattccaaaactgtaagtacgcataggaggtgtttcacaaaatacttcgccggaaacaggtacttccggatcatactggttccactttgcccacgtcaacaggttactgcctgagaaatacaatcttgctttactgacacccagtttggtcaaccactgatccggcaatgtaaagcccaaagtcaagttctttacccgtaaatgatccgtactatgtacataacgggatgaattctgaggtcctgccgcctggccaagtacaaatcggggtacatccgtcacatcacccggcttttgccaacgatccaattcataaatgggcaagttatagttctgttcttttgcaccgtcggtttcattataggttccggttttgtcaaaagaatatcctcctaaagaataagtcaacgtcaatgccagatcaaaccatttgtaattcacgatattggtaaaacctcctgaaattttcggatccacagacttataaggaattgcctgtgctgcagaagcgtcagtagtaactgttttgtcataattgccatttgcatcctgtgtattcatatagtacaaagcttttcctgtctgaggatcaacccccgcatattctttcacatagaaagtagaatacggcaaccctactttatggataaaccagcttccctcgatagactgttccaatttaccatccaatgatacaatcttatttttattgtgggtcatattcaaaacagaagtccaattaaaattgttaccggcaaaatttatggtacgcagttccagttcccaacctctattattcagttgtcccaagttccccaaataattttggaaaccggtagtgctactgataggacgattgtaaagcaaatctttcgtatcgcgattataatattccaagctgacaaaaatacgattgataaacgccaggtcaagtcccaaattcaagttatagttcttttcccacttaagattcggattcggtaatgccgattcataagatccaccacctcccatataattctgcccgtaggaataaagtcccatatatccgtaaagagcacccggctgattaccattcacaccatacgaggcacgtatctttaaatcactcagcacactctttatagattgcataaatttttccgcacctacattccacataccggatacagaccaaaaatttccccaacggttctcgggtgacaggcgcgaactgccgtcacgacggaagctaccggcaatatagtaacggtcatcataatcatagttgatacgggatacataagaaatcattcttgaatcctgagtagaagacacaaagctgttcaatgatgctgcattatccggttccaccaaataatctgaaggaagtttggatttatcccccattgctttgtcagtctgataattttcaatttcataagctaccaacgcatccacatggtgtaattgtgctatagtcgtattatatcccaatgaagtggaagaaatcaatttactatattctataaatccctttgccgtctgtgcatcactaccacttttagctccggctccactcaacggattccaataacgggaatctttctgaatattataatcatagctaagcgtttctttcaatttcaaccctttgataatatctatcgaagcatagcctgtagaaaacatacgtgtcatgcgggtacggttataatctgtacggatatcacgcaacggattcacattgctactgggatatgatcctacataattcccttcagcgtcacgtaccgaaaaagacggagtggtattcaaagccacacaaaggaaaggattaatagatgatccacgctcctcattcatttcctgattcaattgagagaacatcacattggcgcccacttccccacgggaacctaccttctgggttacattcaaacgagctgtatatctgtccaaattagaattttccaccaaaccctcctgacggttaaaacccaatgaagaatagaacgtagtcttgtcattgcctcccgatacggacgcttcataactttgatgatgtgccgtacgcattaattcctttctccagtcagtatatcccagttccggaatggaggcataatcattgatatgtaaatcggcatattcggtgggcgatgccaatcccgcctccggattcttggctatttcatcttgttgaaagttcatcaaaccttcataaattagctctctacgctgctccccattcaacgtcgggcggaattccacagcagcattagaaaagcctccatccatttttaatgtagccttagcacgtccttttgtaccttttttagtggttatcagaatcacaccgtttgccgcacgtgaaccatataaagaagccgctgccgcatcttttatgactgttatattttcaatatccgaagggttcagcgtactcattatattcgttttagaattattcatgtaagcggcatctgccgagccaccactcaagcttccggaagtcaccggtactccgtcaatgacaaacaaaggttctttcgatgcattgaatgaccccataccgcggatacgtatactttgattagcacccggctgaccggaatttcccgaaatggatacgcccggagtcataccctgcaacttctgttctaccgatacaaccggaacgttcttcaacaagtccccccgtaatgtatttgccgaaccggtaaatgaagatttggaaaaattaccatagcctgtcaccacaacctcatccaatcgttgtgtatccggatgcaaagatacattcagcaccccattggcaggtatcttcgccgttagtgtactcatacctaaaaactcaatcactaatgttttgtctttgtcgggaacttccagagagaaattgccatctatatccgtcaccacaccgatagatgtaccgggtattttgacagtagctccaattaatggttctttatcctccgctgagagaacgcgtcctttcactgttctattctgagcttgcacgtacaaaccgaataaacaagccaaaataaaaaaaacatacctagatttattcatgatttatatttatataattatataataatttatcatgttccggtcaaaagatatgccaacaacaagaagcatccgtcaaatcactgtatattaactaaataagaaaacagaacgtctgtaaaattgtagaataaatccacatgaatgtagaatttgtccacacaaaaaaagggtgtgataccacaccctctcatttaataattatttaaaattaatttttagtatatcccggattctgctccatatcaggactaaatgtaaactggtctgttggaatcggtaaaacacatttataataatcccagtctatttcctccacgatacccggtaaatgatatcctcccttacgaacaatggtctttccatttctcaacatatcaaagaaacgatgcccctcacctatcaattctttacttctttcttccaacaccctatccaatgtatattcagccgccgttacttcctttgcaggattagcacgctgcacaattgcattcagataattcaagccctttacggcagatgccccacctattttcactccggcttccgccgcattcaaatagacttcagacaaacggaaaataacataattattttcaaaagatggagtcgtagcatctgttcccggccatttcttcaaccaccatacatcatttttattataaacattcttttccagcaacagacagcgaatatcctccgggtcactcaataactcatccacaaatttctgagtggcaaaaatctcacgatacccattccaatgcatcagatatgccaatgaacttcgtcctccattatcatctgtactattagcaatttcaaataatgattccgtaccaaacgtatttttcaaatcccatgccggaacatattcatcacgtgtataaagacggtacattccatttccttccacttcttcaatcaagttgcttgccatttgaaacgctttctcgttatcatcatgatacagataaatacgagacagcaatgctcttgcagcatacgcattcatccggctgttatttttagaagtactcattaaaggtatagcctcctccaatgtactgattatgaactcataatcctttgcaacagtgctgcgtggcggattttcatctaatgtaattgcatgatctacaattggagctccccaaccggcccctttatccttagtataaggataaccgaaacaacgggtcaagtcaaactggcaaagtgccatgatagtcatcgcctcacctttcaattcctttaatctttgctctgaaccttgcacttttccatcatcaatcgcattgatcacattccatgcattacggataatataaaaaggacgtccccataaatatccggcatttaagcttgtagagcgatgatcatataagtaacaccggttacaagttctcccgctattataagaactctgcatatcatcccctttcatatccccataaaaaaacatggttccgccataatagccatagctggacatcaaatcatacaatccattcacagcattatctatatcctgctctgtactcagtgccaaatccgtagaaacgctatcaccaggatgagtggttaaaaaatcatccccgcacgatacggccaataaagaaatcaagcctaatataattatattttttttcataaacagttcggtgttaattgattagaatttaagttcaagtccaaatgcgaatgttttaagaggaggagtaaaataacttacaattccattcaactccggatcatattgatcgtatgcagcccacgtcaacaagttggtacccgaaaaataaatacgggcagaattaatacctatggttctcaaccaagactgaggagcagaaacgccaacaatcaaacttttcaagcgcaaatgatctgtgctatgaacaccacgtgacgagttccaccagccaccatactcttgtccatacacatatcggggaacatctgttatatctcccggctgtttccaacggcggcgtaactctgtactcttattgtattgtgccgtataaccgtcatcctgcaaagcatacatggcaccatcgtaagaatatccacctaaatgaaacgacaaattaaaagataaatcaataaacttataattaaacgtattcatcaatccaccggtcaatttaggatatatatctttcaactccacacggtcggcatcattggggtcatacacaatattcctgcttctattgccattttcgtcttctttattgtcataatacatcgggcgtccgtcattaggatccactccggcatactctctcaaataaattgtcgcatacgaacaaccttcctttctgatataatttccatctataaattccggaagatccgccagttttacaatcttatttttattatgtgacaagtttaaagaagttgtccaactaaaatctttggtttgaatattacttgaacgtacctctatttcaaaaccggtattcttcatttcgcccacattcgtaagaatactgccaaaaccactgatagaattcaattgcttactcatcaataaatccttagtcgttctggtataccaatcgaaagtcaaattaacccgtctgaacagacttaaatcaacccccagattcaatgcatagttcttttcccaagtcaaatcaggattagcaatagcatcttcccacggagcaggttttccattataaaatgctccggtagtataagttccatgataaccataataaccggtcggcagattaccgttcacaccatacgatgctcttaatttcatatccgacaccacatcctcccacggtttcatgaagttttcctgagagagtctccatgaagcggaaacagcccaaaagttcccccaacgggtatcaggcgccaatcgggaagagccatcacgacggaaactgaaacctgcataatatttatcattatatccataattcaagcttcctacatacgacaccatagcatcttcctgcctcgtattagtaagatcagcaggtttggcgccattatccaacgacggattaagtgtttgcccgtaaacctgtttctcaccatacatatcctcataatcgtatttcataacctcatacgctaaaaccgcattaatgttatgtttgccaaacgttttattatatgccagattcgtttgtgaagtataactcattctctcaatcatcatcatctgtccggatccctgtgtagcttccccatccttaccgtcaggcgagtaaaagaaaaagtctttatttaaagaatagtctactgtaaagatagtagataacttcaacccgtccaagatatgataggcagccttggcggatgccattgtacgtgccagacgtgcataatttgaatctacagaattctcatacagcgggttaatacctccattattctggaaacccgtatgataactgccatcctcattataaataggtatggaaggggtcaattgatattttgaagaataaagcgcactggcataatactgtccctccggcgtatgtttattacgagtccatgaaaaggtagcattcattccatactcaaatttattccatttactgtttgcatcaatacgaccggtaaaacgttccattcctgaatttatgcttatacctgtctgattggtgtatcctaacgtaccaataaaattcgatttttcattacctccgcttacagacaaactatagtcctgctgatgtccttttttcaataaagcatcttcccaatcagcatatccgttggccgggcgtgcagcataattgtcaatttgtccatccgcataagcctttgcctcggcttccgaatccccctgattcaaacgataattaacaaatccttcataaatcaactccctacgctcttcaccccccattatcggacgataattgtaagcgatatccgtaataccgtaagtagcctgcatactcaccctcattttaccttccttcccttttttagtagtaataaggattacaccgttagatccttttgctccatataatgaagcagaagcggcatctttcaatacggttatactttcaatatccgcaggatttaatgtctcgatcaaaccaagtcctcccgcactggcattggcacttagaccactcatatccctagacgctaccggcacgccgtccaatacataaagaggttctgtagaagcattcatagaagcaattccacgcacccgcactgtagctttagaacccggctgggaagaactggccactgaacttaaccccggaatattagcctccatcatctgtgctacagacacaacaggcaatgactccaatttatccgtattcaaaacagaagcagaccccgtataagtagccttcttaaaatcaccataaccggtcactaccacttcatccatcaactgcgaatcctctttcagcatcactcttatttgcccgttagcaggcactttcacctccgccgatttcataccgatgtaactgattacgataatatcaccctgtttagcatcaagagcgaaattaccttcaatatcggtaatcataccggtattggttcccttgatgattacggacgccccgattaaaggcattccgttagcatcctgcacattacctgaaacatgttttttctgctgtacgctttccacacgatctgaaaccggagaagatagtgcatggttttccactgcgagcacggagctcaatcctgtaatagacattgccgaataggcaactacaaacaaacatctgcatttgtctgtaattcgagagtgtgtgtctttattcctcataaaattgagtatatttataaataccatatatgagttcagcttattcataccatattccaatcgtcattctgtcactgaataagcctaatctttctccgtattacattaaggttgtgacaaatatataaattaaaatctataaaagaaacaaaatgaatattttttctcctcatatcgataaataaaaatacaacattcatccaaataaaaaatgtgccaaaagtatttactacctttggcacatacccacccggctgtttgatatatcaataaaccgccgaagcgatcacttgtataaacaaaataaggaacaccattgcaatcggatacaccgtagcatatgcaacactcggaatattactatctaccatggaatcggctgccgcaagaccgggcgtactggtcataccaccggtgatggtgcccagcaaatccaacaaactgattttaaagaccaacctgccaaccacaacggcaaccagcataggcacgacagtaatggccgcccccactccgaacaataacaatccgctctcctgaaaagtagccaccagattcttaccggcagaagtaccgacctcagccaaaaacagcaataagcccaactggcgtaacaactgattggcaggaccggacatagaccacaatatgggtcctgtctttcccacggcactcagcagcaatgccaccatcagcactcctccggtcaatccgggtgaaaaggaaacactgtctgaaaatgaaatatttattttgccgaacaatacacctaatacaatccccatagctatcgggaagaaatcagtatcagacaactgtttggcattattccccaacaaacgggcaacgcctctgagtccttcccgttcaccgaccaccatcagcttatcaccgaatttcaaggccaaatccggagaaggtgacaagtctatgccgcttcgacggatacgggttaccgtacaaccaaagttacgttgtaaattcagatcccccaattgcttgtttatcatatctttctttgtcagcaataaagattcaatctcctgtgtctgatccagaggcaattcaccttcctcccgttctccaaccaatacggcaaactgattcagcgcttcctcacttcccaccgcctgcacatagtccccttccagcaacatggtattcgctttaggcatcaatatagaatccccatgctttacccgtgaaatgacggcccccgtcatggcacgtgcatttatttgcgccaaagtacgtccgaataccgcttgattggtcactctgaaaatgcaagttgtcagttccggaaaactgctgcgccgttccagttccaacctgcgcgcttctttatccagatccacccgcataatcttgggtaacagcttcacaaacaaaatcacccctatcactccaaacgggtaagcaataccgtatgcaatggaagccaacggtgaatttgtactgtctatagctaccgccagaccgggcgtactggtcaatgcccctgctatcaatcccaccacactgggcgtatcaatgtcaaaagcatacttcagtcctaccgccgtcagacaggcagagcaaataataagcatagtgataagaatcagtgtctttcctttacttctgaaagaatcgaaaaatccgggaccggcctgaataccgatggtaaagataaaaagcaccagaccgaagttccccaattctttaggaatgatcacaccgaaatgtccgaaaagcaaggcaatgaagataacggccgacacatccagcgacaagccctttatcttaatcctccctagcataaagcccaacgctacaataaggaagagcgagaaataagaagaatgcagtaaatcaattaacatatttttaagaggttagtttcagagcacaaagatatgtaaaaatgccaaatgctgaaactttccccttactatttgcagaaaccattcctcctattgcacatccagcgcatccagtgccagcccctccatatccggagcggaaagcaccaccttataataacctgcattaatatatgtacccgtcgttgtactcagcatacgccactttccgggagtttcggcaaaagtcagatgatcctccttcagtaccacccctttggagtcgatgaactgcatacgcaccttcataggcttccccgtagcgttcatgtatttaaaacgaagggcatagacctgtgccagaccggtagagatattccaggtaatactgcttttctcacctttaccaaagaagacaccggtttgtttcttgacctctttctttataaacttgcctttcaacatagcgtcctcggcttgataagtcacattggcacgggcatttttatcttcaggcaataattctttgggagtcttttccatcacatccttgtcttgtgcagcccagctgaaacttacattccggtcatcagccccttgattagcaacaggctccacagaagcggccgaagctatcgcaatgccacaaatcagagcttgccccgctttcacctccggaaaatcaatcttcaagcccccacctttcacaacagcattcaccacctttttgcaagcgccgtcatgccccgcttcagcccatacatccaagtcatccagaagcactttatcatttaccgctacatcaaaaatacgcaagccttcacaatccgtctgtacgccgcctcccgtaccatgccagggctctgtaaaataaagttccacacgatactcgccatccggaacgggaaagcggaaattcagtttatggcgtccgaaacggaaagtctggaacagctcccaatccctagtgccatgaatgggatcattcgtggtacgctggctcgcctgataagggctcaataactgcacactatccgacggatggataaacgattccgcccacgaatgagaataacggctgttatcctgcgcccagacctgaccatacgtatccgtataagcatctcccccgcaattcaaacgataaagatacgtatatccctcagctcctttcaacaaatcagttccgttcaaccggtcggcagcaacaggcactataacagaaccacggtaaagagcctcaaaatgaggcgctttttccaaaccgtccaacaccaatacatcttccgctgccggttttcctttaaagtatcccacggcacgaatcacattgtaacggatatcacggttttcccacataaaatgagtacctaccccatgattcagtttccgtcccaagtattcagcatccaccgcatcattgtacagcaacacactgtcacaattactataagcctcaatggtagcccgtctgcgacctgttgcaaaacggtcttcccacgtgtgggatgccagatagaccatcggatcttcggaagccggcacatagttggcacgatacatataatatacatccagcggttcttcccacggagtaaccagtcctttataattaaacggtcccaccttatctatccggcgatacacttcatccggctggcggcgtcccggattatcatgactgctgaatatccattggaattgtccgcacacactgtcctttgcctgttccgccaatcggatcttggtttccatcagccggcacatacgttcctcgctccatacgccgttcgcatcaaaagctgccggttccgtatgcagtccgatgctgcgccatgccccatattcaccattcaacaactgattcttctgtgacaattcacggccatacttattcacatcaccaccataggttccactccagttctgaataacattccaatctgttccatcaccaccgttacacgtggtaatcacacgcatggtacgcgccgtaggatccatttcacggataatctcactacactcctcggcaaactccttaggcagcgtgctttcgttctgcaatccccacatcaccacactgggcgagttgcggcgttccttcacccactggcggagcagtttcttgaaattctcacgaaactccggagtgtcataccatacatgggccgagaactgagtccaccacaagaccccttccttatcccaatatttctgataatccaggtgatggggctggtgagcgtcacggaaagcgttgaagcccgccgcacggatctgtttcacacgggctgccacctgttcacggctgaaagcatggctttgtccgaactggtgttcatattcacataccccattgataaagacaggctgtccgttcagatagaaccgtccgtcaccgtccttccgtttcaccggccaactgacggtacggataccaaagggcgtactaatctcatccgtagtactcttgccacgctttatcatactggccagtttatacaaataaggattctccgtactccataagacaggattctgcaccggcgattgttgcttcaccactttcctttcacccggctgcaaagtcaccttctccgtcaggcggaacacctgcttgccatccgcattactgaatttattaaccacttccaccgtttcggcagtcttcccgtaatttttcacctccgtttctacaaagacagttcccgccttatcatcattccagatatgcactccgaaaggttcgatgcgtatttcatccgtagcctccagcaccacgggacggaaaatgcccaaaggctgggaaccttcactgaatccccattccgaagaacaaccaccgcatacccaaggcatatcggctatcatttcaggatgctccgctttcaccaccagtctgttctctcccggcttcaacgcctccgtcacatccagtgtcaacgtagtacgccctacgggatgacggccgaaatcctttccattcaatgtaacagtggcatacgttcccactccctcaaaacgaaggaaataacgttttccgaatgaagaattggaaattggaaatagagaattatccagcgtgaatatcttttcgtacatggcagtaccgtgaagattgccatgagtcagttggcggtaaccgtaataatcgtcccagttatgagggatatccaccactgtaggggcattgtccgcctgcccgtatgcacttttatcacaaagccatgttttccatcctttatccagttccatcaccatccggcggttcttcacctcccgttccgggaaatgcacttgcgaacgtcccatcggcttgctggtcgcaatggctataccacgttgttccgcgtcattcacggcacaataaaaatgatacaccaccccattgtgtttcaccacataacttttatgagcgaacaattcatcatagtctttggaagggataatcaagtccgctcctttccaatcggtccagtgcaccaggtcataactggcagcaaaggtattgaatgccttgtatttgcggctcggttcaaaagccgagaagtagaacatgacatacacgtcgcccattttctggatatgcgcatcccccgtgatggttccgtccgcctcgtgtgcaaagaccggattgcccggatatcgtttccacttcttcatatcctttgacaaggcgatacccacccgttccgctttcaaatccgtttccggatgccgtcctgccgcgttatagaacatgacgaaaggagcgcccagtgttttctccttatcccaatagaccacacttttgtactgggtcagcttttcccaccattgcgcgtctttatcatggatactcatcacaggcttgtcctgtgcctgccactcatgggcggaacccaaaggccggtctgtccaggccaaaccgatatacagcggcttgttcaccgattcatatccggtcccttccccacccagataagtcatccaatgcttgcctttatacgtctgcagggcatagcttcctccccactccatatccggcaatgcagggaaaccaccacgctggttgcaatcccagaatccgtcacgataagacaagacacgtcccaatgtacgccattccaacagattatcactttcggctatccatgtctcgtatccacgcccgtccagtccgctcttaccattataaaccacgtaggtcatataccacttatccccttcgcggaacacggtagggcagtctattttatgcttgttgtcggcaggagctacagccagcccatatttataaggagtcttggcttcctcataaatctgctccatgcgcgattgcggaacttcacgttgggcgtatgttcccaacgtgaacaaagaaaatgctaatattaagatctttttcataatcaccttttatatacaagcaagacggataagaaagtaaaatgtactaggattgagcatacaaaattaagccgtaatatttgatattccgaagcaaaacagctatttttgtcaaaaagaaattggttatgaaatattagagcaagaaaccaacaaaaaattaaagtcattatgaatgtaatgtcacaaaaagaatatatttctctgttatcccgacatttattttgggatatggacgtaaataaagttaatttagatacctgcccggcacaaattatccaacgtgtactggaatatggcaatttaaaagactggcaacttatattatcatattatggattggatagaatcgtttctatttgccaatcattacgcacattggacaaaaaagcattgtcttatatttgctgtatttcaaacacctctaaagaacaatacagatgttatcatatcaaacagtcaactcccacactttggaattgctaaaaaagctgaccaatgaagaatttctttcaaaagccagattagtaggtggaacagctttagcacttcaatacggccatcgtatttcaattgatttagattttttcgggaatatagaggaagataatgaaactataaaagaagtactgatcaacatagggaaattatctgttatcaaagagtctaaaaacatcaagatatacatacttgatgatattaaaatagattttgtcaattacagatataattggctggatcctgctattgaagaaaatggtataagactagcctcccccagagatattgcagcaatgaaaataaatgcaatagagggacggggaaccaaaaaagactttatagatatttatttcctactgcaacactattcactggaaaacattctaaaattctatgctgataaatatcccgataattcccaattccgcgctttgatgagtttaacttattttgaagatgctgaagaacaattcatgcccgaaatgcttgttgcaatagattgggataggataaaaagctttatcatagacaaagtggctaccctatccctataatctttttaatagaacatccagtccatcgtctcctccgcaccggccagtcccgcattacgcggagtcacctgcgcgtccgtaaatcccagcaccatcgtatatcctttcggcagcaacaaggtatgctttccggcctcaaaatgataagcgtgtacattcgccagcggcatacccgctatgcgtatggcattggtcagtttcggttccgcctgaccgtaatcattggcagaagcgtccgtttccagtttcggggctttcgcatacttcttctggtcatcacggaaataacctaccaacaaactcaccggagcagccgcttcaaactctattgtcgtaccttccttgcgctgcacatccccgttcattctataagcagtcagcccttccagctcggcggccaacgcatccaccttgcccggtacattggagaacaggcttgcccccgtcgccagtttcaccggagccagtccgttcaggatcttcacatttgcggcggacaaaggttttatctcagctgcactttccgtcaccttacctgccgccctatctttcagcaactgcaagttcgccttgaaattagccagctcattttcataatgcaccagcatctctttccaggtcttgttcttgccaccgtcaccaccgataggaatacggcgttgcgcggtctgcatactgttggcataataataagtactatccgtcaatgccaccagcttgcggtaatgatccagactttgttccatcaatggaatagcggcatccagttcattcagatcctttccccactgatagttcaagacacgctgagcagctttcactttcaggttaaaggcataagcaaattcacgatagcaatgcatgtcattctgcaaacgtccgaactcctctttattacgagtcaccgctgcggcagccttgtcaatggccgccaccgccttgtcaccgtgttccaccacctgcgccacaatatccagcggcaattcgcccacatgcggctgtttcttccattccttctccacatattctatcagcttctcgccctccggcccgcaactctcataaaatcccggatagatggtatatttataaggattcaccaactggctcataaacatacccagcaacaaagtctgccggttcccttccgtgatgccgaaacggcggagcaacttcggagcaatctctccactctgctcgtatgcctccagaatatctccggcttcggcaggagtcgtaccataaaaatcgcccaactgcttgtcccaatattccacttcggatgaacggtcccgatgacagttccatgcatagcgtccccacgtcttgtaccatatccagtcacggtccagctgatactcccgtttgccatccgccagtttgtccgccgtgtacggccagtcccaataagaagcctgcggatacagatgcagggcattggctccatgtacattgtgcatggcattcaccgccttctgtacaaagtcgggagatccccaacgccacggttccaagtttgccagaatatgcacattactgatatgaatacttcccaaggcactcaagtccgagtgtatcttggaccaaggaccgcgcggttcgtaagtagtcagtgactcaccattgtatttatgcatggtatagaggttcttgtataacggcaatgccgcatccatcaccatcttgcagtccgtatcatgtgcacgcagtaaaatgggcggttcgtctgtacgccccaatgccttcaacccgtccttcactcccggaataatggttttggtaaaccactccacatcatcctcgtaggtatccatagcctcgcccaaacaaaccagcagacctacattgggatatttttctataaacgcggccaccgacttacgtgtataatcactgatcagcggagtaatgggacggttacgatcctgtgttttcaatccgtaatgctcggcaaaaggcttgcttaacaatatattataaaacatctggatcacaaagataccgcgtttgtccgcttcggcagtcaggaacgagaacatttcctcatttttcttgaaagtttcctcatccacctctacggcaaaaggatactcttccagcttcaccaaggaagcaaacggatgcccgttccacagatacaaggaattcatgcggttctccaccagcatatccagatactttatccattgctccttgtcataaaaccaagggaagctctccggcgtataaggatactcatacacccctcttccgggcaggtattccattttctgaatccctacacaacctccgcgaagcaccatttccggagcatccgtcagttgtgccggaaacttcaaatccttgtattgccctacatgatctatcaattcccgacagccgtaaatcacaccgcttccgtcgtttcctgtcaccgtagtcatgtttccacgggtagaaatggtaaacccctcctttttcagtccggctgtatcagcagcctgttccagacggatgcatacctcatctttatccataccggcagtatccgacaacataacagacgaataccccgcatcttccagcgctttcttcaaatgttctcctgcaaacagcacccggttcgacgcctcctgcggcatcacaatattcacattgggtttctcgcacccccataacacgcacatacatgcgacaagtgttcctagcctgatatttttcattcttttcatataaattatttacagttagacgaaaaaaacaacaagacgtactcacaagacctccgccaatcgtcaaaaagcgaagaaaaagcacaagctatcacaaaaagaaaaaaagcttatgaacaaacgggggcaaactcaacttttaaaaggaaatgtattgtggaacagaattacctaacattaaaaacggaaagaacaatgaaaaagaaatctaacctgaccctatttatgaaacaacttatccggtcgctaaaagaagaagagcgtttcagtaccgcccacatctaccaaagcaccctgaacgccttcatgctcttctgcaagaccgatgccatccggttcaaccagatggaacgttcacgcctgaaacaatttgagaaccacctgcgcaacaagggatgtacctggaacactgtctccacttatatgcgtaccttgcgaagcatctacaacaaagccgtggacgatggtctggcggaagaaaagccccgtcttttccgtcacgtatataccggcgtaaaagccaataccaaacgtgccctcgatgccaaagacatgagcaaattattaagcgcctcccttccacgccccctgccgcaaagcatgaaagagagccgggcatggattaccctgatgttcctgttacgcggaatgccctttgtggatctggcacacctgcgcaaaacagacctgcaagattccgttatctcctaccgccgccacaaaacaggagccctgctcaccgtcgagattcctcccgctgccatgaaccttatcaaacggtatcaaaatacagactccgcctccccctacctgcttcccattctcagtggaaaccggaaaagcgaagaagagtatgcagaataccaacatgccttgcggaaactgaactatgacctgaaacaactggcggtatactgcggaatcaaactcaacgtcagttcctacaccagccgacacacttgggccactttggctaaatattgtcacttttcggaacaattgatttgtgatgccctggggcactcctccacaaaggtgaccgaaacctacttgaaaagctttaaaaacgatgaattagacagagcaaataaagtaataattaatcacattagcatttctatataatcaattttaaaatttcacattacattataaaacaacaaattaaaagactgttactttagaagtaacggaacagattttggaagcaaaagtatacaaactttaaatacagtgcaagatttctacacttttttttcgtttttattttaaaaattttttttattccgcatatacctctccctacccatactccgattgtcaatatgagtgaagccacatttccggtcttttatcttctctaacagccactaaatctttatcttactgctgttttcatgttttttcgcctccctcctccccttccgttacttctaaagtaacagaaaaaaaacaaaacaaaaatattgacaatgcgacattcttacttatttataatagcaatcatgctagcagttatgactccgcgtatagccccggctcaaagtatcgctgtaaaaagcaatgttctttatgaccttaccggcactctcaacctgggaggagaaataaggtgtgacgacacccattcattcaatctgagtgtcaactataatccctggaatctgggagaaaacaaaaaaatgaagcacattctgatccagcccgaataccgttggtggctcaatgaaacattcataggaagttttttcggggtgcaagcccatttcgcccaatacaatttcggtggaaccactcctttcaccacagtcaagaacaaccgttatcagggtaatctgataggttgcggcgttacctatggacaccaatggctgctcagcacattctggaatcttgaagcaagcatatctgtcggatacgcccatctcacctatgataaatacggtcccgccaaaggagacgcactcattgagaaatcccactccaactatgtcggacctacccagctaggcatatcattcatttatttcattcaataaatataaaagcaaatataccctatcagtcatgaaactcaagacaaacatactattcagtcttttattatgcggcacctttgccactgcacaaaacctgaaactcgatatcctgcctccttccgttactctcggacaggactctgccacagtgtccatgaaaatgaccttcaatgttccccagatggacaccaaaagccatatccgcctcactcctgtcctcacagacggaacccatacggcagaactccctcaaatcctgctgaacggagaacgtgcacaccggctataccgccgcaccctggcgctcaacaaacgaagaggcaaggcagatgtaactcccgtatttaccgctatccccctgacagacagcgatcagactatccactaccgtgcttcccttccggcagccgactggatacagttcgccaccctgaacctcaagaaggaagtcatcaacggcagcggagagaaagtacaaagcgaaaatatccccattccggacacagcaccccatatagcaacagcaacagatcatttcgttccccaacaggacaggaaccgggaagctcctatggcagcagcctcaccctctgcccccgttgttccggaacaccgtcctgtttcccctgctccgtccgcaccctctgccaaaccgtatttcaagggaagctatgtatctcccgaaagcgatgccaccgatgagcgcaaccagaaagagctgaacttcagtctggacgaagcgcgtgtcatagccgaaatcaatccgcagatgctttcgttacgcgagctttacaccgtagccatcagctacaagaacactccggaacagttctacaaaatcatagacatcagtgtcaagatatatccggcaagccccgttgccaacctcaacgccgctgccgccgccatcgaacggggcaacacacaggcagccggccgctatctgcaaatggcttcccatgaaacgcttgcctacaagaactgccgtggagcctacgagctgttgtgcaacaacacctacgaaggcatccgcctgctgaaagccgccaaagccgaaggctcggaagaagccacctataacctgaaaatattctttgaatccaaccaaaccaatatacaataaaacatgaaaacccggtatgtcctttcttgtcttctgctcggcagcgccctttccgtttccgcacagaaaacggctgtcaaaagcaacctgctttccgccgccaacggtgcgctgaatgccggtgtggaatatgccttcggccccaaatccacattcgatttgtccggcagcatacgcccgtggaaacgcacggaaggatatgtcaacaaatattggctcatacaaccggaataccgctactggacttgccagaaattcaacggcagtttttggggagcctatctcaacggagcgcagttcaacgtaggagggaaaaagatgcctttcggactcttcccctggctgaaagagcaccggtatgcaggctggctggcaggcggaggcataagctacggataccacatcatgctcaaccgccactggaatatagaagtttccgtcggtgtagggtatgaatatatcgactataagaaatataaatgccccgacgtgtgtgccgagctactggaaaaaggccattatcactatttcggcccctccagagcatccctgagtatagtttacatatttaactaaagagccatgaaatacttattctattttatatcatttatttttcccgcgctttgctcatcggcgcaaccggcagaacgggacagttcgatttacatcgcctcctcccggctctaccggatgggagaaagtctggtagtgtccatgcaggtagacattaccagacagattccctccaacgaatcagtcatactgattccccggctcagcgacagcctggacaacttcatccagcttcccgccatctatgtgaacggtcgtaaacagcatattttcttccagcgtgaaaccggcaggcaggaaaaagactatgaagagttacgccgccgcaatgaccgcaaacaaagcgtacactacttgcgcagcatccccttcacccattggatgaagcatgcctccttgcatctcatcgaaaaagaatgcggatgcggagttccccgccatacagactccacctatctgacccgcctgaacatccttcccgatatccatccgcacgtagcgttcatcactccgcagatggaagaaaggaaagtgcgcgaagaaagcggacgtgcctatctggacttcccgctcaacgaaacaaccatctatcccgaatacagaaacaatccggccgaactggcaaagataaagcgcagtatcgacctgataaaaaacgataccaatgtagtcatttcgcatattgacattcacggatacgcctctcccgaaggcccctactccaacaacgagcgtctggcgcgggaacggacccggaccttgaaggactatgtatgcagccaatatgctttcaacgatacattgttcaccacccattacacccccgaagactgggacggatttgtcaagttgctgaccgacaccgttatcacccatcgcgaggaactgctacatattgcagaaagcaaaagcagccccgacgggaaagaacggaaaatacggaaacgttatcccgaagagttccgtttcatcctgcaacattggttccccggcctccgccattcagactacaccatccactatgtggtacgtccgtttacggtagagcaggccaagcaggtattccaaagcaaccccaagaatctgagtattgaagagatgttccgcatagcccggacctaccctgccggcagtccggaatacaataagattttcatgacggcggttctgctaaatccggaacaccccgttgccaatctcaatgcagcctgcatcctgctctcgcagggagataccaaaggcgcctcactctatctggacaaagccggtgagactcccgaaaagacccttttgcaaggcatcatgcaaatgctgaacgggaactataccgaagcggagaacctgctgcacaaagcggaagaagcaggactgccccaagcaggtgaaaacctgaagatattacatgagatttactaatcacatttttaactaaaactattttacattatgaacaaaaaattattattatccttcgctcttgcagccgcaatgacaggatgtatcaatgatgcagatgttccctcaggaaacggagacaatccggctcccggagccagaggagggaacatggagatttcatttgtagttcccaactcttccaacggcagccgtgccgcttccgccgaagattccggaatctatgaagacggtaccgccgaagaatacaaggtgagcaatgtaaccctctatctgtttgactcttccagcaagaatctggttactaccatcaatgtaactcaaagcgatctgggcgcaggcacttccagcggagagagcagcaaagaaggacaaaccattgtctatccttgcaacaaggaaatcacagtaaaaccgggcaactatgacatccttgccgtagccaacggttcacagaccttcgaaataggtcaggaatccacattattgggacagattgacgcctccacctatggaaacggcatgataaccagcgtacccggaagcggtttcatcatgtccaaccgcggctcggccaatatgaacatcaccgtagagtctcccgaagaaagcgacaccaaagcacacgtcagaatcaatctggaacgtgccgttgccaaactgatggtcagaaatgacagcaaggaaatctacacgttgaagaaccctgccggagtgacttacgccacagtccgtctgaacaactacaaattcatcaacctggcaaacaagttctacaccttccgccatgtcgctaaactggataacgcccctgagactccgtctgctccgtcatcttacagcgtggaagcaggaaacttcggtaacatcgccgacaacaacggttaccttatcgacccctatttcttcgacaagaccgtagcaggagccactaccaatttcacaggcggttcattctacaccaaccacctgtcaaaacagacagacagcaactggtcgggcctggccgatgcaggaaagtacgtttccatgtactgtcttgaaaactgtatgttccgtccggcacagaacacagtatacaccaccggtatcatgctgaaaggtacatttacccccgaagcttcacagaccatcggtaataacggtaatccggtagaagacccgcttgtattcaacacactgtattatttcaactataagttctacaccacactggcagctgtaggcaaatatggcgatgccaatattgatggtttgacagaagaatccagtgatgcagaactggctgccaagcagattacccgtttcaccaagaacggaggcaatttctctaccttctacaattactggatcaaacatcttgacaacaacaaccccaccgtcatgggcgtcatggaattcggtattgtacgtaacaacatctactctgtcaatatcaccagcatcaagaacctgggtcccggcactccggataccaaacccgatccggatgaaaacaaagcattcctggacgtagaattcggagtatatccatggattgtccgtgaccaagatgccgaccttgaataaaacagtctcaaaatagaaaaacaatgagtaaaactgctactatcctcttcgccctatgtactcttttctgtagtgcatgttcctgggtagacgatgaccaatccgattgccccacaggctgttggctaaagttatcctatacctataatatgctgaacgtagatgccgtaaccacccaggtaaaagatgtcacgctatttattctcgatcaggaaggcaactatatagtccgggaggaagtagacagtcttacattccatcaaaatgaatgtacaatccaagtcccctccctgcctcagggagattacacctttctggtctgggcaggattggcggactcactttaccggcatactcccacctcactgacactgttacgcaatgaggcgggagaacaatccgaaaaactttcatctctattccacgggcggctggacaatgtgcatatcagcggcgaatatcaggttttggctctctctcttactaaaaacacgaatattctgagctgcatattgcaaagccagtcggccgcccctctggatacagatgatttccgtctggagctgacagcccgcaacggatgcatggatcaccggaacactccgacagactccgttttcacctgctatcttcccttcatgcaggaaagcgccaatctggaagacatacaggtagtacatgccggaatgaatacattgagactgatggagaatgacgacacccgcctacggttaatctatcaacctagtggaaaagagattttcgatattccgctgaccccctatctgcttctgtcgcgtaatgtcgaaacaacctacatgcctccacaagaatatcttgacaggcaagaccgctataacctgatatttttcctgagcccgacagaggatccgcagaaaccttacatatgtttacaaatgcaagtaaacggctggataatacgtataaatgatgcagaattagataaataatctttctgttttgaacatttcaatctatattcgattccgttatgaaaattacttattatgtaaaatctataatacggaaccttatgagaaataaaaaaaaattcaacgagtttatgaacaaaacgattgaagaactgaaagacgagaaacgttatggcacggcacacgtctaccaaagtaccttgaacgctttctgcgaattctgcggatgcaagattgtttacttccaccagctcaacagagccacactgaaagaatttgagacccacctgcgcgacaagcagctgagctggaacaccgtttccacctatatgcggacactgcgcggcgcctacaacaaagcggtggaccagaaaataaccaccggcaactcccgcctgttcaatcacgtctataccggagtgaaaaacgatgtcaagcgtgcgctggaagtggaggagataaacaagctgctgaacgaagttcctctgaaaagactaccggaagacctggtacgatgcagggtttgggcaaacctgatgttccaactgcgcgggatgccttttgttgatctggcctttcttcacaaaagtgacttgaaaggtaacacactttcttaccgccggcataaaacgggcggccaaatgatagtggatattccgccaacagcaatggaactgatcagacaatatcagaataccgactgcaactctccctatcttttccctatcctgagcggcaccaaaaccggagaagagctgtatatagagtatcagcaggcgctacggatcatgaattataatctgggcagactggcaagacgatgtggagtgataaccaaggtcagttcatacaccacgcgccatacctgggccacccttgccaaatattgtaatttctctgaacaactaatctgtgaggcttttggacattcgtcagtgaaagttacagaaacatatttgaaaaacttcaaatatgaagagataaaaaaagctaatgatgcaataattctatacgtttcaaaaaatggaaagaaaagggcatgaatagataaaaagttgattatcaagctatttaaattccgttactttgtaagtaacagaatttattcggcagcaaaaatagacaataaatcgatagcaaacaagaaacaacccgcttcttttttttaaaattaataaaaaagacggtctaatagataaaaagtaataataaaaagaacatttttaattatataaaaaagagaaaatatagtaacacacatcacgttttacacagtcaacgcaatgcattaaaatattatatttcagaatattatatcttatccgctataaaatagtgagatataaattatacaatatgtttattgataaattttctgttacttacaaagtaacagaagagcagaaaaaagaaaaaaagcgacatagttgaaacatagttgaaaaaaacatcatatagatctgacatataaaaagttttacctatgatacaagtccagagatttaacaaagtacttaaattagcagtcattctaggagatttagtcattctgaatgtacttttcatctcatttaattcaatatggaacgagttgtttggggaaagagcctgtagcggcactttaccccaaattctaactctgttcagcgtatgttattttgcatgcactatttcaggaggtgtcatactgcatcgtcggggagcccgtgccgaccaaattgtattccgggtactccgcaacgtgttctatttctcttttttatcgaccggactgatggtattatccgaacttgagatatattccaaacgcttttttatctattatttcattctgctcatcctctgtatcactgtctatcgcctgcttttccgtttctgcatacagctatacagaagccatggaggaaatttccgtacggtcctctatttgggaagtactgaaaatatagccgagctgtaccatgaaatgacctccgatgccactaccggctaccgggtactgggctacttcgacaccacccccaatgccaagttccccgccagctgtacctatctgggaaaaccggagcaagccattgactacctggcacagcacaaggtgaaccagctttactgctgcctgccctcggcattgagcgaacagatcgtgccggtcatcaactattgcgagaacaacctgatacatttctacagcgtgcccaatgtgcgcaactacctgcgtcaccgcatgcactttgaaatgataggcagcgtacccatcctcagcatccgcaaggaacccttgggaaaaatagagaacaggctgataaaacgcatattcgatgtaatcttctcgctgctctttttatgcacattattccccattatattccttattgtaggagtgaccatcaaaatcacttcttcgggtcccatattcttccgtcagaaacgtaacggattgaacaacaaggaattctggtgttataaattccgttccatgaaagtaaacaaggaatcggacaccttacaggccaccctcaacgatcccaggaaaaccaaattcggcgatttcatgcgccggaccaatattgacgaacttccgcaattcatcaatgtattgctgggagatatgtccattgtagggccacgcccccacatgttgaaacacacggaagaatattccaagataatcaataaatacatggtccgccatttcatcaagcccggtatcacgggatgggcgcaggtgaccggtttccgtggcgaaacccgcgaactggaagacatggaaggacgtgtgaaagccgatatatggtatatggaacactggtctttcctgctcgacctttatattatgtacaaaaccgtggcaaacgtgctgcacaaagacaagcaagcttattagaacaagacctgaaaactgaaattttttaaataacagagagccaaaaaatgagaagattgaaatttaccctattcgcgctggcttccctgctgctatgcagttgcagcgcctacaaaaaggtaccctacctgcaagggtccgagtacctgaacatggcaaatgtccaaacacccctgtatgatgcacacatcatgcccaaagatttgctgaccatcacggtgaacaccagtgatcccgatgccgccattccttttaacctgacggtagccacccccatcacggcaaacagcaaaagccttaccagccaaccatccctgcaacaatatctggtagacaataacgggaacattgatttcccggtcttgggcacactgcacatcggcggtctcaccaaaagccaggcggaaaacatgataaaggaaaaactgaaaacctatatcaaggaaaaccccattgtgaatgtacgcatggcaaactacaaaatctccgtgatgggagaagtagcacaccccggcacattcaccatcaccaatgaaaaagtaaacatcatggaagcgctcgccatggcgggagacatgaccgtatacggacaacgcgacaaagtgaaactgatccgtgaagatgcgcaaggcaaccgccaggtgattccgctgaacctgaacgatgccgacatcatcgtatctccttactactacctccagcagaacgatgtggtgtatgtcacccccaataagaccaaagccaagaacgcaagtatcagcaacagcaccaccatctggttctcggtagtaggaactctggtcgcactggccagcctgatagtaaccattgccaaataaacagaattatgaaagaagacttatacgacgacctttatctggaagaaaaagaagaaaagaccgatttcaaagcgattcttttcaaatacgccatccattggccctggttcgtggcatgcaccctgctgtgcatagcaggagcctggctttatttacgttacaccccgccggtgtacaacatctcggcatccgtcatcatcaaggacaatgacaagaacagcaaagcaagcagcggcatggccgacctggaagacctgggcttctactcctccatcaataactttgacaatgaagtggaaatcctgcaatcacgcacgcttatcaaaaaagtggtggaagagctggatctttacatcagctatgccacaaagagcagtttccatgacatcgaactttacaaaagttcccctgtgaaagtatggattacccccgaagaagcccagaaactgcccgcccccgcgcgtcttcacctgaccttgcagccgggcaacaagctgaatgtgaaactccggataggagaagaggaatacaacaagcagttcgacaagctgcccgccttgctgaccaccccgtcgggcacgttcagctttacccctaaagattccacaactgtccaaagcacgcaggaaatcatggctacggtttcttccccccgcagtgtggcaaacacttaccggggagcattgagcatagagcctacttccaaatccaccactatcgcacagatctctgtcaagagcacgcatacgcagcgcggcatggatttcatcaacaagctggtggaagtctacaaccgggatgccaacgatgacaaaaacgaagtggctaccaaaaccgcggaatttattgatgaacgtatcaaaatcatcaacggcgaactgggaaccacggaacaggaactggaaaccttcaagcgcgatgccgggctcaccgatttgaaaagcgacgcccaactggcattgagtgaaaactcggaatacgaaaagaaacgtgccgaaaacagcacccagctccggctggtacaattcctggccggctatgccaacaatccggatcatgcctacgaagtacttccggtcaatgtgggcctgacagataccggtcttgccgagctgatcaaccgctacaacgagatgctgctggaacgcaagcgcctgctccgttcctcccaggaaaacaacccggtggtagtcaatctggatgccagcatccgcgccatgcgcagcaatgtgctgaccaccatcaacagcgtacaaagaggtttggccatcacccaggcggatctggaacgtcaggcaggcaaatacgccggacgcatcaccaatgctccgggacaggaacgccagctggtcagcatctcgcgccagcaggaaatcaaagccggcctttacctgatgctgctgcaaaagcgtgaagaaaacgccatcactctggcatctaccgccaacaacgcccgcatggtggacgaagcactggcagacgccatccccgtatctcccaaaggaaagatgatttatctggtagcactgattctgggaatcgccctgccggtagttgtcatctatatcatcgaactcttaaaatacaagatagagggccgcgccgatgtggaaaaaatcacctcccttcccattgtgggcgatgtacccctgtcggaagataaaggaaaagaagaaagcattgtagtacacgaaaaccaaaacgacctgatggccgaaaccttccgtaatgtacgcaccaatgtactttatatgatgaggagcgacgagaaagtcatattggttacctccaccaccacaggagaaggcaaaacctttatcgcttccaatctggctgtcagtctggctttattaggaaagaaaatcgtgatcgtggggcttgacatccgcaagccgagcctgaacaaagctttcaacttatcacacagggaacaaggcatcagccagttcctcgccaatccggaacataccgacctgatgtcgctggtacaagtttcacgcatcaatgccaacttgtccattctgcccggagggcctattcctcccaacccgaccgaactggtggcacgtgaatctttgcctcaggctatcgacatactgaaaaagcattttgactatatcattctggataccgcccccatcggcatggtgaccgataccctgctgatttcgcgcgtagccaacgccagcatctatgtgtgccgggcagactacacccacaaggcagattatactttaatcaacgaactgagcgaacagaaaaaactgcccaacctatgtacccttatcaacggactggacatgaagaaaaagaagtacggatattactatggatacggcaagtatggcaaatattacggatacggtaaaaaatacggttacggctatggatatggcactgaaaatgtaaataaaaagtaatttcaaaagtaattacataataccataagactaattctcttctgaatttgttaaaatattaacacattagaaagagaattagtcttattacgttttaatatataaatattatttactatatttttctttcgaaacatcaaaacaggggcactgtttcacccattcctcaggctctatctcgccatttccgttcaaatccggacttaaatcccgatgaccgcaaaccttgcaaccgggataatccaccagcaacgccctgaccagtacacgcaacgaatgtttctgccacaccgtccgcgtatccgccagcctgccccgctcactgattcccccctcatagcatatcccgatactctgcgcattatgtccacgcgcatgcgcccctattttctctatgggacgggttgtttttatatccccgttcttgcggatataaaaatgatatccgggtccgttcattccacgcctgcggtggcacacctccaaatcctgttcggtaaagtccctgtccgcctttgtggcggaacagtggacaacaatcagattaatcaccctcatccccctatgcacgagctgattcctactacacccgcaatagccgtagctactgcaatcaccactttcaaaatagtgctccaaacagatttacctttcatcctacagttttttttaaaattaaacacttgtccgccatctacttaagcaggcttttgctcttccttcgttttcaccggcaatttatccaccttcgtatatttcagtgctgccagaataccgcttagcgcaatacccggacggaaattgatacgcgcttttctaatcatcgacacatcatacgcatcctccgtttccgcacctcttccgctcaggcctatctggaaagtgcccagatcggcaagccttacgatctcgcccccttccagagcctccataatcacatcctccaaggcaacaagcacagccattacatccgcacgcgtcaccgtacaggttttctgaatacgatccgccatttcgcgaatctctacatggccattggcctgagcttgtgcatagaacttaggcagcgcgtcctgatcaagcggattattacgctttactaccgaataagaaactgttcttcccatactttttcaaattaaaaattaaaacttgcaaattaagaaacacactggcaatcaagcgttaaccactaagccggctatgattgacttttgattacactacaaagatacgatgaaccggaagccccgtgtagacatttgtagagaagcgtaggagattgtcgggaaatgtcgagaataacttacagagagagtaggaaaacaaggacattttgcgtatctttaccctataatcaaaacgataaaagaacatgaaccaagaagaaaaagcattcattatcagagcgtatgacaaagcggaactggcagaactatacagcccggggcgaactgccgcggcagccctgcaaaccctgtatcgctggatgcggagaaacatgctgctacaggaagaattgaacgaagcgggctacaacaaattccgccacagctttctgaagcatgaagtggcaatcatagtgaggcatctgggagaaccttaggacatacgcttcccaaagaacctgttgtctacatcgaaagaccttgttgtttttttaaaatcccctgttgttttaccggaaaggtcctgttgttttttgaaaacaacaggatctttttcacctgcatttaaggctcacaaggctcagggctcacttaggcggttttctgagccaagatttgccggtctttctatacttaccatcctctttctcaacgatttgataatacaccaaacgcaacaaataacgtttcacggatgctgtaggcaacccggcttcattggcagccgccatcagctccgaataggtgaactcgcgcggcatttttttcaaaacgggacgcagtttgaaaaaagcctttaccggcctgattcttccggcagtatcatccatggaagtggaaagcagcaaactgtgttccagcaacacatccactatctgcattgccgtatggaaatcctcatccgaacactcccactccgatgtattccattgcggctcacacttacgcaatgcagtcagcaccatggcaatacgagacatcatcagtccgtggcgcagcacaatggcacccggagaatcatcatcttccgccactacctcacgcagatacgttctgaaacgctccgtatgctctttccattgttcctcggtgaaaaccacctcggtaggcgatccggagagaaagataaacatacgcagcagctcctcgcccatccctttgaaataagcgcgcatatccagccgggccttgccgggatttgccgacttatactcccagtgggcctgtcccacatagaaagccacacggctgtacattccattctccagcgaagaaataaatttatgcaactgggcgggagtacccgaagcgcataatgccagatgagggtcactcacaacaacaagccggtgatccgtcttgaaataagaagacacctcctcgtgctgggaggcggcacgcatcacatcatcatgttttccatactcctggtgcatggcagaacttatcatgtccagctcggaggcattcatcaccaagccgaccgctccacccgcctccaaagccagtatcaactggctttttgaaatattgggagccaccttcaggatgcgttccaccggcatctccgggcattggtccaaatcgggaaccctcttttcctgagcggcaagccgttcctccagattccacttcagcagcttctgccggtactcacgctcatccttcctgttcaattcatcgtaatactcctgaatggctgcgggcagaattgccgccagttgcatcaccccctttcctctgcccgaaccagccaaagccaccaggtagagatcggcggagggtcagcggattttcctggttggtaagc

SEQ ID NO: 3922 - DNA, 54497 bp, Unknown
  gut microbiota DNA sequence
acaacttgctattttttgattttatttcgaactcacgttaaaataaatagatgtcagagtgaaagaataaagcatttttcctttgtttattgctgacaaatatctaatttcgcgccgattttaaagcgtgtaataaaaacgatgactaacaacaagactaaaggatttctccttggggcaatcgcagcagccagctacggcatgaacccactgttcacccttcctctttatagtgcaggaatgagcgtagactcggtattattttatcgctatgcactggctatagttgtactaggtatcatgatgaagatgcaaaagcaatcttttgccattaagaaagcggatgtgctgccactttgcatcatgggactgctgttctcattctcttccctgtttctctttatgagttataactacatggatgccggtatcgcatccaccatactgtttgtctacccggtactggtagctattattatggctgtagtatttaaggaaaaagtatcgccggtcactatgttttccatagcgctggcctttgtgggaatttccttgctctgtaaaagtccgggaggacagacactcagcctggtcgggattacttttgtctttttatcatccttgtcttatgctatctatatagttggcgtaaaccgttcttccctgaaggatatgcctatagccaagcttactttctatgtcctgcttttcggcctgtctgtttatgtggtgcgattgaagttctgtacaggattgcagcctatccctacacccttgttatgggtgaacgcagtttcactggctgtttttcctactgttatttcgttggtgaccatgacaaaggccatacactacattggttccacccccactgctattctgggtgctttggagcctgttacagctttattcttcggagtactgatttttggagagcagctgacaccgcgcattattctgggcattttgatggtgattactgccgtaactctgattataggaggaaaaacattgctgaaaaaaagcaagattcgattaaggcatactgacagataaagtcggattttgtatctttgcccttgcaattataaattttccactatgaaaaaacaactgatgcaatgggcaagagtgggaatgtggatggtattggggctgtccgcatgttctcctacaaaaacagaaatcggaaatctgaatgtcattccgcagccccaagaagtaagtcaagacattcaagcccacccttttgttattaatccgcaaaccggtattgtttatccggaaggcaatgaaaagttgcaacggacggcagaatttttagcttcctatattaaagaggcaacgggaattactgtccggacaacaactgaagccgcaaggaagaactccatcattttggcggttgacggttccattaccaacaaagaggggtatcaactggaggtaacttctgaaaacatccatttgaatggaggaagtgagtcgggagtattttatggaatacaaacgctctacaaggctttgccgttgaccaaaaacaaacaggtatccgctgccatcccggtgggaactgttaatgactatcctcgtttcggttatcgtggtttcatggtagacgtgggccgccattattttccggtttcttatctgaaacaaatcattgatatgctggcactgcacaatatcaattattttcattggcatctgaccgaagaccaaggctggagaattgaaatcaagaaatatcccaaacttacggaaataggttcgatgcgtccgcgtacattgattgaccgtgaaacccagacctacgatgaaactcctcatagcggtttttatacacaggaagaagcaaaagaaattgtcaagtatgccgctgaccgttttattactgtaatccccgaagttgaccttccgggacatatgatgggagctttggtttcctatccggaattaggttgtacgggaggtccatacgagattccttgtaaatggggggtattccctgatgtgctgtgtggaggaaacgaccggactttacagttcgccaaagatgtattgaatgaaataatggatatctttccatctccttatatccatattggtggggatgaatgtccgaaagtacgttgggaaaaatgccctgtatgtcaagctaaaattcgggaactgggtttgaaagatacaccaaaacatagcaaggagaaccaattacagacctatttcatgtccgaggtaggcaaagttatcaatgacagagggcgtaaaatgctgggctgggatgagatgttggagggaggattggctccaggtgccacagtgatgtcatggaccggtgtcaaaggtggtatcgaagccgcccgtctgcaccatgatgcgattatgactcctattcagtatctttatttcagcaatcctacttacaaccggataaaagggactaaaagccttggacgtgtctatacatttgaacctgtttctaatgaattggcagaggatgaacgaaaatatatcatcggtacccaaggatgcatatggacagaatggacgcgtgacagtttgaagatggaatggcaaattcttccccgtatggctgccttgtccgagattcaatggacggaaccgtcacataaaaatttcgacagtttcttgaaacgtttaccggctctgctggctatctaccgggatagaggttatgattttcgccaggacatttatgatgtgaacattgatattgttccggctcccgatgaaggaaaagcccggattgcttttcagacgtttgatgacgcggaaatacattatacattggacggcagcgttcccgatgtgcaatccccattgtataccgacactatacaagtggataaagatgttatcatacaagccattgcagttcgtccgcagggtgccagtcagataagtaaggaggaaatacattttaatgcagccacaatgagaccggttaccttgaataccattcctcataaatcatatacttttaaaggaggaagtaccttgatagacggattatatggggatatgaattatcgctcaggacgttggattggtttctacgggacagatatgaatgtgacccttgatttacttgagcctaaggaggtgtcttcagttttcgtaaacacaatgttgaacacaggcgatgctatctttggtacaacaggtctgaaggtggaagtttctgaggacgggaaaaatttccgcagggtagcctccgaagattttcccgttgtggaaaaaggaactaaaatgcagagccgcaaagactctgtctcttttgacaaagtaaaagcccgctatattaaaatcatagcagaagttactccgaaacttcccgcatggcattccatgcctggcgaaaaagcgtttttgtttgttgacgaaataggagtggagtaaatccgccttcggagcaatggctttctaaagaacaaataccaaacaagaaacggacattctgacaaaaacagatgtccgtttccttattcataagcctttcatgtattttcaaaagctgttcaagaaaaaatggcgatagagattcactctgtcgccattatgtgatgtggaatgtctaattccttatgctttaggaagtgcttcttttacaaccatagtacggtttacatattctgcaccgttcaattgcttgatagcttctttggcttcgtcatcattaggcatttctacaaaagcaaagcctttagaacgacgtgtttcacggtcagtaataagttttactgaagctactgttccatactcttccattacacctctcaaatcaccttccctaacattatagttaaggtttccaatatacaaattcataaaataaaaattgataaataaataattaagtaaactttgaatttaaaaatttagttagaagaatagaaacggttcaagtgtgagatgaattgagtcaatcgaaaaaactatctttttatattccgttgtcaaaggaacgataaataattggattatccactatatttctctttttattttgatatttttttagccggtgactctttttatactttttaggcttaaagcaggagccttatatcattcatattcactaattttgtatcaacagctaacttataactaagatttatatgatattgaatgaaagagaaagccgccatgagcatgtgttgcatgtggcccgacaaatgatgacggcagcgcgcactgctcccaaaggaaaaggtgttgacattattgaaatagccatggtgacggatggtgatatcaatattttatcggaaatgatggtgaaaatggttgcggagcatggaatgaaattctttctgcgcgatgcggaaaatattctgaatgcggaatgtgtcctgttaataggtacccacgaacaggcgcaaggattgaattgtggtcattgtggatatgccacctgcgtgtctcgcaaagaaggagtgccgtgtgctctcaatagtgtcgatgtgggcattgccatcggatcagcttgtgccacggcagcagacaacagggtggacacacgggtcatgttctcggccggactagcagcgcagcgtctgaactggctggaaggatgcacccaggtttatgccatccctgtcagtgcatcctctaaaaatcctttctttgaccggaaacctaaagaataaatttctctactaccgcggctacaccatcttcttcgttagaaagggtgatgtagtcggcgttttgacggactatttcttgagcattggccattgctacccccaatccggcatattgtatcatagaaagatcgttaaaaccatcaccaacggcaatcatttcttcttttgtcataccgatttcttttagcaatacggccagtgattgtgctttatcaatacctttaggaaccaattccaaaaaataaggttcggaacggaatacgcccatacggtctttcaagtgttcgtacatttctttttcaagcactgcaagccgcgtaggttcacctacaatcagacatttggcaataggaaattttattgcctccagaaaatgatccactttcttgggagtcatcacattcagaatagcttctttcaatacatattcatcttccggatattcagtcaatacatattttccatcgtaagtgacgatagcaaaatgattgtcggtggcacatttatacaggtaaggcaatatatccggatcgagcacattctcgtacatcatctcaccggttttccagtctatgatctcacctccgttatacgaaagtatataaccttcgtatttctgcaactctaagatctcggccagtggagccacaccgtatgtgggacgccccgatgccaaaacaatttttactccgcgctcttgcgcttcgataagtgtacgacgtgtgtgttccgttacctctttcttttgattggtcaacgttccgtctaggtctaaaactaataatttatacttcatatactatttaatggagtgcttttgccaaattcgctgcaaatataacgattaaattcatggctttttgctacatttgctcaaaataaacaagaatcatgacagaaattttattaaccgtaattattatcctgctgataattaatattgtaatcgcacttactaaaaacaatcgtctgcaaaccgaacgtctggaaggattgctacgcgaagaaatgaaagaaaaccgggacgagctgggaagaaatatccgcgaactgcgtaatgaactgaatcaaaccttgaactattctatccgcaatatgcaggatactttgcataaaaacctgctgaccggtaatgaaatgcaacgggaaaaatttgaagcaatgggcaagcaacaggaagccttggtgaaaagtacggaaaaacgattggatgacatgcggcaaatggtagaagaaaaattacagaaaacattgaatgaacgtataggacaatcctttgaaatagtacgttcgcagctggagaatgtacagaaaggattgggagagatgaagagtctggcacaggatgtaggaggattgaaaaaagttttaagcaatgtgaagacacggggtacattcggagaagtacaattaggggctttattggaccagatgctgagtccggaacaatatgcggcgaatgtcaaaaccaagaagaatgcaacggaatttgtggaattcgccattaaacttccgggaaaggaaaatagtaatgatactgtatatttacctgtggatgccaaatttcccaaagatgtatatgagcaatatcaggatgcatacgaagccggagatgccgcattgattgaaacttcatcccgccaactggaaatcacaatcaaaaaaatggcaaaggacattcacgataaatatgtagacccaccttttacaacagattttgccattatgtttctgccattcgaaaatatctatgcagaagtgatccgccggaccgcattggtggaaatgttgcaaaaagactggaagatagtggttacaggtcctaccaccctgggagctatcctgaatagtttgcaaatgggattccgtacactggccattcaaaaacgaacaagcgaagtatggaatgtgttaggggcagtaaagaccgaattcggaaagtttggaggattgctggaaaaggtacagaaaaatctacagaatgcaggagaccagttagaggaagttatgggaaaacgtactcgtgccatagagcgtaaactacgccaggtagaagcccttccggcagaagacagccaacgaatgttgagtttgcccgaactgacagatgatgaggacgatgaataaacaaggaggacttaaagatgagcatgacgtgggattttattttaagattgtttgtggcaggcgctttgggtactgttattggtctggatagggaatatcgtgccaaagaagccggttaccgtacccattttctagtatcactgggaagtgctctcattatgattgtgtcacaatatggttttatggaagtagtgaagatggagggaatagatctggacccgagtcgtgtggccgcacaggttgtcagcggtatcggttttattggagcgggtactattatttttcagaaacaaatcgtgcgcgggcttactaccgctgccggaatttgggctacttcgggcatcggtctggctattggagccggtatgtactggctgggaatctcagcaacaatccttacgctgattggtcttgaggcacttagctatctttttaaaagtataggtatgaaaagttccatggtggagttctctacagacaataaagaaacactgaaccgtatggccaagaaattcaattccaaggagtacaatattgtttcctatcaattggacgaaaagaggttgggagaagtaacgacctattatgttacaatggttataaaatccaagaaatacaatgatgaaggtatgttactgacattattacaggattttagcgatattaccgttcataggctggagtaagcttttccggcttggttcaaaagcagcaggggagagcgcttattgaaagattctctcccctgtgctgtgatcatgcttttaaccgcataacaaacgtacttccttctcccagcttactgtctactgtaagcgtaccattatgggcctcgacaaaatcccgggaaatggacagacctaagccgcttccttgtactttagttccgggaacccggaaataatggtcaaagatgcttttatgataacgtggatcaatccctttcccgaaatcccgtacaaacatctcaatgaatccatcatctgtctgacgtgcccctattactacacgaccgttttccggtgaataccggatggcgttggaaagaaggttggtcagcacccaagctatcttctcactgtcgacaaacagtttacctattttgtcttcagggtactccacttctatttgaatgttgaacttctcggcttgcacacggtttgcctttattgcatattctatcaactctataggtttggttatcttaggcttcaactgtagttttcctgattctacctgcgtcatattcagcaattcgccggtgatattaagcagccgttcactattttccttgatactgtttgccaaatcttcctgttcttcatttaaagctccgatacgctggtcttctaataattgcagactcatcataatagccgagataggagtcttcaattcatgtgagattgtagagataaatgtggtcttggccgaatccagttccttaaattcggttatattcttcaacataatgacatatccttttttttccatagtaaccccatctttccccggttgggaaatactcatgtattttacttggaaaaaactctctttattgtccgcataaatcttcagaggttctttcttttctttttccttgtctttgactggttccccaggaatttccaccaattcacgaatcaggcggcgcaacaaatcattgcgcagggaaatatcctgtgcagaatgtttaataacttcttcacgcttcaggttgatcacattcaatgcttcatcattgatgaacaggatttccatatcattatttaaaccgataataggctcgttgatactgttgatgatagtctccatatattttttagatgccatcatatcggataaagtacttgcatgataatcttccagacgtttggccatgcggttgaaatttttagatacttctgaaaattcttcactgctgttcaattccaaacgtttctcataattatggtttgcaatttcctgtatagcgttggtcagctctttaataggattatcaattgatgcgggaagacgcaaccacataccaataccaatacatatacatgcggcaccaacaacatatatccacaataaagcccgctgtaatccgggacctgctgccggactgtcaggttccgtggcagtcagtatttgcaaattcacaacagaaagtacaaccaacagtacaatcattgccaccaatatccctatggcgagggttagtttcgactttatattcataacttttattttttatgcaagtataatcaaatctatgtccatttctgctaaagagtgtagaaattttcgatatttggaaagactgaataatgcaccgggcattttgaaagcaggatgccccatacagacagtcgtaattccacgttgacgacaagtcttaattatttctcccataatatcggaagatgaaacttggataacttcaccgcccaactcggtaaccagtttaaaatgattaagtaaatgccgctgtgttgccaatggaatacgttccgtactttcggcaggcgtttgtacataaagggcaaaaaagaccgtattgtaccgggaagcaagccgtgccgctttacggatgatatgtcgaggagtccgttcattactgctgatacatgccaaaaacttctcgtgccggatgcccttttcgcctgtaacaatttcattttcaacttttttctcgactcgaaaggccacttcttttagtgccagttcacgtaactgaagaatattctctgtcttaaaaaagttattcagtgccaactgaatcttttcagggcgatagattttcccggctttcaaccggtttatcagttcttcggcagtaaggtctatatttaccacttcatccgcatcctgcaacaccttgtccggaatccgttccttaacctctatacctgctatgccttttacgtcttcattcaaactttctatatgctggatattaactgcagaaattacgtttataccggcatccaacaattccattacatcttgccaacgtttctcattccggctgccctcgatgttggtatgtgccaattcatctactataaccagttcgggatgtaactgaagaatggcatcaagatccatttcttccacttccttacctttgtaaaatatctttttccgagagataacaggcaatccttccaacatagcaacggttcctgcacgtccgtgcgtttcaatataacctatctgtacatctacaccgttctccaacatttcgtgagcttcttgcagcatacgataacttttccctacaccggctatcattccgatatagattttaaactttccacgccgtgaacgtttaatcaaatctaaaaaatgctgtacactttcttctctgtcttccatttgttactttatcatattggcaatataacaattttccgcatatttaatatcagtccttttataacaggcaaagaatataccaataaaacaaacggcttagctacaatgccataagcgtgtcatcaaagactaaagcttaccaaaatgaaaagggggctctttcaaaatgaaacactttcttaatcactataattattgccgttagatctcccagaatagtttattcctgcttttctagcttgtgtatgttgaaattgacgggctattttatattcacgttctccttttagtaatctgtatccggtttgtttaaaccaaaagcttatattattttctatacattgccgacgaatgtccaatacccagtcataattacatatacgcgcttctttgcccgattctccacctaccacaatctgttctacccatgtaccgagttctcccttgaagtttatagcggacaacaacggttcacagataatgattttatgctttacaggagctgctttataaagaggaagacggtaatccactctgtcttgattttccatggtgcaacaaatggtaacattatcatacccgtccccccaatccggaggcagacattggccgagccggtctatgcgtttagttataaacaagaaatgaagatcgtatcgttcccgcatcattttccatgcttctatacgccattcatcggcttcttctatcagaaaatcggaggtaaaacaagtatagacgagattgccggaagggatcttgtaagtcttatcctttttccgtcgcacgggcagattgaattgtccggttttggttattatggaactgtctttcccatgtttactatctccgcgatatacataacaatgccggcaacctgtacttagcttatggcagccatgccaaggattccatagagaagactccggacttattctattttccattctgtctgaataaaatttatcattgtctgcaaagttagctaaagtcttttcatcatttacataattcattcctgaatttcttcaaaaagaatgggagtgttatagttaatgcaaatggattaatgtacctttgccggtataatcaattaagccactggcaagaataaattttataatgtagaatataaaacaaaaaacttattatatgagcacagacgatagaaaatgggagattattgaaagtgaatatcttatccgccgcccttggctgaccgcacgccgtgaccgggttaaactacctacaggagttgaaattcctgaatattatattttggaatatcctgattgggtaaatgtaattgctatcaccaaagagggtaaattcgtattagtacgccaataccgtcacggaataaaagaaacacgttatgaaatttgcgccggagtttgtgaaaccggagaagagcctttgctttctgcccaacgcgaattgtacgaagaaacagggtatggcaatggaaattggacaaaacttatgaccatttcagcaaatgccagcaccatgacaaatatcactcattgttatctggctacggaggtagaacgaatctctacccagcatttggaagaaactgaagatctgacagtgcatttgctggatgaagaagaagtaaaagcgttgttattgaatgatgaggtgaaacaatcattgatggctgcaccgttttggaagtattttgctttatattctcgtttataataaagacttttagggagactgaaaaagctccctaaaagtaagttgaatcatttattctattaaaccgagttaatcactttttatacttctttgtatcgtcattcgctcaccttctcagtgagaatccttttttgcagataaagaatgcatagccataatatgctttatacttactatatagctcagcctcatgatgattggatgttatcaattcttctacgattctgcttcctgcatgttttcttctgaatatttcctcggctttagcttgaggagcaaaataatgttctatccagcaattctccggaagaatgaatgtcgcaactggaatatatcctgctttttgtatctgggctactttgttgggaaccgtatctatttccgtataagcactcatccagaaatcatgaatttctgccgggcgttgatcggtaaaccagacactttcagaaacggcaaggtatcctcccggtttcaaatagttgcgccactctttcaagcctcgttcaaaaccaatattataaatggctccttccgaccagatcaagtccaaagagtccttttcaaaagaaaggtcatccatcgaaccgactatgcctttcaccctattctggagattcagtttctcggcattcttgttgaaacgttcaatgaatcccgggaaaaagtcgatgcctgtaatcttccccggcgcatgttgtgccaagatcattgtctgcccccctgttccacagccgagatcggcaataagggatttgtcggtaagattatctataaagcttaatgctttaagagttacttcgggacttccgggtccttgtcgctccgtatttaagaaaaaatcacaaatcaaatttacatcgaatcctagaattgtattgttgtcattattcattatcgtaatatattaaacatacactgaaagcatagccatactccctgtgtaattaaaaaataaaattatagtaatatgaaattgctctcgaaaaaatatcccgagaatacacgaataaacaatctatttatgagaacagattgtttacgataccaaatccgatatacgagtttttaacatagtgcaaagatacacctatttcattgaaaaacgatagaaaacaatgtttaaatttaggagatatttcagtatttgatctttttccactcttttaaaaacctattttgcgtttcaaataaatcatatcttttagtaaaatcccattgtcaataatgggatgatcgtagttctccgtgaaaaaaccttttatacaatgagaatattcaaagccgcaacttttataaaatgcaagaacaccgggaacgtctcctgttcccactatcatctgagtatattcttttgaataatggtttatcaggtagtttattagttttctaccatatccttgtcgctgggcaataggggtaaccgctatattcttcaattcacaaatttccggaccttcttttgttacaacgcccacggcttttatcccattatcttccaatacaaacaagtcaccacgctccagataccggtctatcattgtttcctgttcatccccaagcaataataagtccagatattgctttttatttctagatattttaatgatgtgataatccataatattatatttataacattcttgtctttatagatagtgcaaaacagcactattttaacgattcccggcatatcggtaaacagcagccgaaatatcagagattattttagcattcgtttccatattttcttttgagtctttaacaaatacagctactacgtatcggcttccatcaggtagaattacaaagccaatgtcattgatgccaatgtattctccccggtcattcttatcggaagttcctgtcttatgtcctatcttgacttcactttcgggaaggggagcaggcagtctgtctttgcctgtcccacactctatcataatatgctttagaaaatctgtatattcatttctcatgaaatcttgagtcataaaaagttccaatagattggctgcttccattggtgttgtccagtttttgtaacaatcatccatgtcttgatgcatctcatcttcggtagcagttatggaaacatcgtttattcccaatgaatgaatgtattcatccaccacgtttacaccacctatataatcgaataagatatcacaggctacattgtcacttgactgcattgtataaactaaaagttcactaatcggaagttctaaattgccttggggatatttatcacgcaaagggctgtatgtatccggtttgaaatattttttatcaagatatagggaagtggaaagtggaatatgccgtttttgcaggtaatcacatacagccaatgcctgatgaaacttataaacgctcatcatgggatatttttcggcattatttatggccagcgtatcttctccatccagtatcaaagccactcctatagttgctttcttatctttaataatatgtcgaatttctgtttttaatgttttcaatgaatcttgggatttattctgaacacatccgccagacaacacacaccatatacatataataatatatggacatccgttttttactaaagactgcaagattaaccttgggctccgtttttttgttatacgcattttcctgattttaattgtacgaagataccggattatcagtccttctccaaatttttccttatttaaagattagccttttatcttcttccgcaaataacacagcagtatttaccagtgccagatgagaataagcttgtgggaaattacccaattgttcttttgtttcgaaatcaatatcttcactgaacagacccaaatggtttgaatattacaaaatttcatcgaacagacagcgtgcttcgtctttttccccgatgacataaagtgcacggatcagccaaaatgtacagatggtaaaggccgaagaaggacagccaaaatcatcatgagtattatagcggtacatcaaccctttgtgtaacaaggatttcttgacggctttcactgttttatgataacgaatatcatcagcatctataaatccataaggttccattaacagtaaagaagagtccaaatccagattgccgtatgcttgtgaaaaactttgtatttcttccttccagccgtttctcataacatctgctttaattgcatcagcttcttcttcccaacgtcggctattctcatatttattcagaatacgggctatgcgggctcctctgtccaaagcaacccaacacatcactttggacgaaacgaaatgctgtccttcaccccgtatctcccaaattcctttatcaggctttctccaatcttccatcacagtcgtcataatacttttcaccatttcccacatatcttctatttcatccaatgtacctggcatcaaccggtaatattggtaaatcaagtccatcagatagccgaatgaatcattctgcctttgatgataagcatcattgccgatacgcaccggttgggagtttttatatcctgaaagatggtcgagtataacttcagtcaatttcctttccccacgaatgccatacattatttgataagtgtcatgctcggcaacaaaagtagattgtatgaatttcatgaatttgcgggctgcatcggcatgacctatcttgaaaagagtctctatggacatggaggcatcccgcaaccaacaaaaacggtaatcccaattgcgtacttctcccacagcttcgggcaggctggtagtaagagaggctaatactgcgccattataaaaggacatcatcttcagggtgagtaagctacgctctattatatcgttgtaaatagtgaactttcttgtacgatccgtccagttcaaccaataaaccaacgtgcggcaatactccagtttctcacgctctatatcaacaggaatcaccttttcattgtatgacagaagaaaaaattcatcttgctctaatataaattcctgatggtctacaataccttgcaacggcaaagaggaatacagatattgtctgtccttgttgttagaagaagaataagtttcaatataccgggaagttacattaaaaaacgcttttccacgagcatagtcgggagccggatggtaattgactttaatgcggggacgacctttaatccagtgaatataacgatagacctcagccggacgataatattccttattatcatataactcataacaaggcataaagtcgactaccgcaaattcgtcttgctctgacacaaaagtagtggaaagaatattggtatggggaacatacgattggatggtgtgatagtcttctgaaacttcaaaaccaaaagtcccgcctttttcacgatccagaagagctgcaaaaatagaaggtgaatcaaaatttggaaaacatagccattcaatacttcctttttcggaaatcagtgcggctgtgcagcaattaccgattacaccgtaattcaaattgtccatggttatttttttgtaatgttagtggtttattatccgttttaaaaaatctatagccgatgatagctgccctttcaaaccacttttcaagactgctttcaccacgcttttatctgtcatccgttgtaaaaacggcaaggtatctgtctgtacgggcagattgtaacgtgcactctcggatgctgtaccaatctttacagtcacagcagtaacaggcagggctttaaacatatcatcatccgtggtatcatctcccattgccagaataaaatcatatcgggtggcaagcaaaagcctgtttacttctgaacctttggtaaattcgggagattttatttctatcaccttattaccttgcatgatttgcaaattctgtttcaagcaaatagatatcaaggaattgaccaactgttgcgcacgtaatctgcccaaccatgcatcggcctcacgataatgccaggcaagtgccgtttctttgacttcaagatgggagcgaggagtcttgctgacaaataattttaatatagaaagtaatccggggctccattcctgcgcgtgtacattcttgtgccatacaccattctctttataaaaggccccatgttcggctgcaaaggaaacaggtagtgcacccaaccatttctctaaagtaaaatggtcacgtccgctgtttattaccacatgattcaaggggtcggcagtcagtttctgcaatgtatccagcaattgcggagtaggagaggcatcttccggccttttctgaaaagggaccagcgtcccgtcataatccaataaaatcaaacgctttttagcatgtaagtattgatgctgaatttcctgcatattctgtgaacctatcttcttaagaagcatggtcttgtttttgtgtgccacttcctgccattcatttacaaaatcggcagcccatttattgacagtctgtacggatacaatagactgcatacggtgcatccgttctttctgttcttcaaacggcatttccaatgcccggcaaatggcattttctatctgctccgtatcattgggattaaccagcaaggcgtcggtcagttccacagcggcaccggccatttcacttaagaccaatacaccgggattgtcttgcttgacagcaatatactctttggcaaccaagttcattccgtcacgcaaaggagtgactaatgcaatatcagctataaaatacatggcagccaattcttcgaatgagaaaccatgataaaaatagcagaccggagtccagttcattgtagaatatcgtccgttgatagaacctatttcctcgtcaatccgggttttcaattcggcataactgcctacatgatcacgtgaaggaactatgaccatagccagtgttaccttgccatgatattcgggatggtgttccaaaaaagaggcaaatccataaagacggtgcaaaatacctttactataatccaaacggtctaccgataggataagtttatgtttgccaaacaagagacgggttcgttctatagctttccaaacatttttttgttgtgacacattgtggtaaaggtcataatttatccccatcggaagtgcatcaacgcgcacaatgcgactgcctatccgggtttcatccaaactgaaatccatatggagtacccgttcggctgcactgatgaaatgacgcatatagtcatgtgtatgaaatgcgataaaatcggctcctaacaatcctttcagtatttcggcacgttcaggcagaattcggaataactcataagatggaaacggaatgtgatggaaatagccgatatgcaaccggggaagctcttggcggagcatttccggaagtaacatcaactgataatcttgtacccagacccaatcatccggttccacaaggcggatgatttcccgacaaaacaaagcgttaacctcttggtaagattgccagaaactctttctatataatgtataggcaaagaaatagtggcataaaggccacagtgtactgttactgtatccctcataatagttcttatattgctcatcggataaaaatatgggatggagattcatttcctccaaccggtgacagatatcctgtttttcttcctctttgtctgtacagattccgggccaccccacccaatgtttctcgtaattgccttgtagggaatttaggcccgttgtcagccctccttcactacgtgagaaaacaaaggtatcttgttctgcgacagccttcacgggcagtctgtttgatatgatatacaatttcatttttatataattctttttttcagttagatgacaaaagtcataccaccaacttaaatatcttattatcaatatggtatatatttgtcaattagtttatactttttcaatatgaaagccttttttctaaaatgggaaatgaaatagccgaaagataaaagtgcaatttttgcaatggcatcgattttgatttatacagagtataacgctatcaacttatagaaaaggtagcgagcaaacaataataaacaactgattaacaaactaataaagatgaaactagtaagaatatagctttccaatatggaaatttgcctgttaaaatgaaaaagaaaccccaaaagaataaaatgcaatacaaaaatgaaagtatataatttagaaaatattaaatctgccaccgaactgaaacatcggactgaagtaattagcatgaacgaacgttctattatagtgctcgacacttttaccggcattgcccaaaagctgcaagctgtttctatttctttattccatctcgatatcgaaaaggttatgaatcaattgcaggatttcgagaatgattgtggaaattggctggacaatcttctttcctccgaaatgcagaaagcagaagctgccaaagaaataaaagtacacatcgatcaaatttcccgtttatgtaatgaaaatccgaacatcattgacgatcatgagattatggctcacggagcaatgatatcctctcttattttgtcacattatttagaagaatgtacgaaaaagaatttcatcttgaactcatgtcatttcatgcgactagggcttgatcggaaaccggatataaagtatgtgaaaaaaaatgtagaagaactgatgaaagcctgtcccgatgtccccattcttattaccccaagccgtttgtgtaaaaatgcatatgatgaagtggatttattcccacaaataggaaatgagtattatgccactgttatcggggctgtattccatgcggatgaaattataacatccttacgttctgatgaaatttgtttccgaggtatggaacatactcggactcttacatacggtgaagccgagaattttattgatagcggcattgcattgcttcatccggaatgtattccgctggcgcgcactgccggtatggccattgtattgataaaaacaccggaagatacattacggatatcatcagaaaaaacaggaacaaaagtaaaagctgctgtttcacgcagaggtgtggtctttgtcaaacttcgttcgttgggggttcttacttcttatctatttattggaaaagtatttgatgtgttcgagaaatataaggttcctgtctatttagcgacttcctctaatgtgagtgtttcattggctgtgaaatgtagcaacgacacattacgcctgatatatcgtgaattacataagtatgcggaaataggaatggaaacagaaatgtctgtggtcagcgttattggcgatctaaattgggaaaagcatacagggttggaagccagaattatagaaacgctgaaagagatgccggtatgcatgatttcatatggcagcagcactcacaatctttcagtgctggtacgggaacaagatagagaaaaggcattaatgacactgtgcaaagcctttctagatattccatcagaaaaatttgatgtaataaaacaaactcaattacaagactcttttgtcatgtgaccttcttgaataaacagaagcaacaaatttgcccgacaggtatttgttgcttttgtttttgattaaataattctttcccttataaacaaaacagacatatagttgattaccagtcctgaataaccttttaaaatagttgctgttatccattcttaactttaacacagaacaggagataataaaatggatttaaagcaaacaaagaacatctctgttaaaatactttttgtatatttgcaacaatacgttttatcgttaaaatagttgtaacagaaataatacacataaaagaaaaacagagtaaatagaaaatgaagcgagttattaacctggacaattggaatagaaaagagcattttaaattcttctcggctctcgatgaccctttttggggaattaccacgactgttgatttcacaagcatatatcaacaaagtaaaaatatggaagtttctttttttctttattctgtgcacttcctattgaaatgtatcaatgcgactactgcattcaaattacgtatagaaaacggagaagtagtagaatatgataaaatcaatatttcgcccactatcggaagagaggacggaacttttggctttggattttttgagtatgacacagatctttccttatttattgaaaatgcagaaaaggaaatacatagagtaaaaaacagtaccggactttctttttccaaggacacagcaagagcggatgtcatccgttattcggctctgccctggtttgccttttccgagatgaaacatgccggttcaattcaaacaggagattctatacccaaaatttccacaggtaagctgatacaagaaaaaaagaaacttttgcttcctatatccatcagtgtccaccatggcttggtggatggacgaaatgttgctgaatttatacagaacgtaaaagacggacaaaataatacattatgatatgattgctctctcttcctattctaataataaaacatgaaaaataaaatagaatttatcgcttttgatgccgatgacactctttgggaaaatgaactttattttcaagagttggaacacaaattttgtcatcttctgaggaaatattcaccggctccttccgtatcagaagaattgttcaagacagaaataaaaaatctgcatatctatggttatggactgaaaggaatgctgctttgcatgattgaaaccatttgcaaagttactaatggagaaggagacctcaatctcgtaaaagaaatcctccgatcaggtcaggaacttctgcaaagaccaatcacattattggacggtgtgcaagaagtcatatcagccttgcacgaaaattataaattagtattggccaccaaaggtgatttgttcgatcaaaaaagaaagatttctgcgtccggactacaagaatacttttgtcacatagaaataatgagcgacaagaaaaatgcggattataaaagattgcttgatcatttaggatgtaaggcagaaaatttactgatgataggtaactcgataaagtcggatattattcccatattggaactcggaggttatgcagcctatgtacctcatcatgtcacttgggcacacgaacaatatgaaggagaagtaacgcactcccactttattaagttgaataacattaaagagatacaaaactatctttagtttttgccatactccattctccacgtggtaactctttgaacaaaaataccacgtccggcaagactcaaaaaaggataagtcactctatacaacaaaaaagggttgtcaaaacgtggataatgctgtcgtttcgttcgtaggggcgaggttcgctcacccgaaaacagtttgctttgtgtcttcgggcaggcaaaccctgcccctacagttgacgattggatagtccggtttcgttttgacacttccttttatacacatttaaaacccaatacttaatccggctatcagataagttttgtcaaatgagggcgaaacaatagcctgtacaaacaaaggcaaagaaaaatgatctgtaatattaatgttcttggaagcttttaaagcaatatctgtaaaagcagcaccatcagcatcatacattcctttccagggagtgaaaccaacggaaggagtgagcgtaatttctgccgggcaagcaatattataagaagcattgatataagtggaataagcacgatcaccgtctttgttatcgtctcctcccgcaaacatggtagaccagctcaaggtcagaggaaagttctcgccgaaattataagctaatgttccttcaaaatgatgatcatgtttataatccccgtagggcatggtgatgccattccaccaatagtcggtcactgtaatacctaaaccgccaatggtataactcaaattgatgtcaaactcttgtgcaccgtctgtcttggtcaggctctgactcccccaagcagacaaagaaagattgccgtaagataatcctaatgtaggctgtacagagaatcctgaattctggtaagcgccacgccaaatgtaatcacttacaaaatccgccttagccgttacgttaaattcttgtgcttttatcactccaggcaacagtagagccagcaccaagaccacttttttcaaattctttttcatcttaaaaaattaaactaatcaatattcgtgttttacatatttatactatttccttcttattgtctgaaaggaaatatccattttgagtttttctgaatcaagatgcatcattcaatagggtgatgcacgtcaaagatcaagaatccatgttatcaaagcaaagaacaatacaatgatagccacagcttctagagccgacaggctctcggtatccaggaaacttctctttttcatgacgcacatcttcctaatttaatgactatatattttttattattttgccttttctaaagcagcattcagttttaatacattcaccttctctgtaccgaatatgcccataaacggtttttccacagctttatctacaatagcttttacagtttcctcactcattccgcgagctttagccacacgttgtacctgcacgtatgcgcaggccggagtgatgtcaggatccagcccggaaccgctggctgtgaccatttcggcaggtacttccttacggctcaagtaaggatgatgctttaaaaatgtatcaatccgcgcttctacttcagccaagtattctgcattggtagggcctttattgctaccggccgaactggttgcatcataaccatctccggcacatgaaggacgtccccagaaatagatatcttccgtaaatgattgtcccacattggcggcacctaccacttttccgttaagttccaccacctcggcattgccggaattaggtccggcaaattgagcgaaaatccataagactagtatatagcatactgagaaaaacacacaaaagactaaggtaagtctgaatgactttataaaatttttcattgtcgtttacttgttaaaagaataatcctactactaaatctattaatttaatacccacaaaaggagcaataacaccacctatgccatatatcaaaagattacgacgaagcaaggcggaagctcctatcggtttgtattgaactcctttcaatgccagcggaatcagaataggaataatgatggcattgaatataaccgcagacaagatagcactctcagggctatgcagccccataatattcaatgcagccagttccggaatggaaagcatgaacaatgcaggaacaatggcaaaatatttggccacatcattggctatggagaaagtggtcagtgtaccacgtgtcatcagcaattgtttacctatctcgacaatctctatcagcttggtaggatcattatccaaatccaccatattccctgcttccttggcagcctgtgtaccgctattcatggcaacccccacattagcttgggcaagggcaggagcatcatttgttccgtcacccatcatggcaaccagtttgccggcagcctgctctttcttgatatactccatcttatcctccggtttagcctcggctatgaagtcgtctactccggctttctctgcaatatatttggcggtcaatgggttatctcccgtcaccatgactgtttttacccccatcttgcgtaaacgttcaaaacgttcctgaatacccggttttatgatatcctgcaattctattactccggcaattttcttattgacacttaccaccaatggagtacctccattacttgtaatggtttgaatgatatcttccgtttcttttgggaaagggtttccggcagacaaagctatcttgcggatcgcatcaaatgcacctttacggatttctgttccatccttcaagttaatacccgagcatttggtttcggcggtaaattttatcatatgagcaccatcggtattcaaattacgcatccgtaaacccgattcacgtcccagttcaataatagatttgccttccggagtatcatcagatacagatgagagcaggcaggcttcgatgaaagcatgttcatccactccctgagccggataaaaacgggtagctttacggtttcctatagttattgttcctgttttatcaagaagcaacgtatctatatctccggctgtttccactgctttacccgatttggttatgacattggcacgcaaagcacgatccatcccggcgataccgatagccgaaagcaatcctccgatagtggtaggaatgaggcagacaaacaaggacagaaaagaagcaatggtaatgacagttcccgtataatcggcaaacggtttaagggtgatacacacaatgacaaagaccaatgtaaatgctgccaacaggatagtcaatgcaatttcattcggtgttttctggcgggatgcgccttccaccaatgcaatcatcttatccaggaaactttcacccggctgggtgcttaccattacttttatctgatcggacaatacttttgtacctcctgttactgaactcttgtcaccgcctgcttcacggattacaggagcggattcgcctgtgatggcactttcgtcaatagacgccagtccttcgatgatctcgccatcggcaggaattacatctcctgcctcgcatacaaaaatatcacctttctttaaccgggaactactgacagttttcaaagtcccgttcacaatcaatttggcaggggtttcctcacgagtcttcctcaggctatcggcttgtgcttttccgcgcgcttcggcaatagcttcagcaaaattagcaaataacaaggtgatgaacaggattacgaaaacccataaattataaataaatgagccttgtgaatcattaacgatagagtagagcatcaccaagaacataatagctgtacaaacctctaccgtgaacataatcggattcttaatcatcactcgcggattcaacttcacgaatgattgttttatgctgtcaatgacttgctccttctgaaataaagaagctgatttattatctttcatatcttctattaatatcgttgtctgttatcagaattataaactcaagtgctcggcaatagtgcttaatgcatgtaccgggaagaatgatagtgcggcaacaataaaaataaccgcaaatgtcatcacaccgaatgtcactgtatcggtttgcaatgtgccggcgctttcgggaataaattttttcttagccagaatacctgctatggccacttgacctacaatcgggacaaaacgtcctaatatcagcacaataccacaagagtagttccaaaaccatgtgttatcacccagtccttcaaaaccggaaccattattggcggcacacgaggtgtattcataaagcatttcactcagaccatgatatccgggattgttcagccagccaccttcactttccacaaatgcaggcgcatgaacaaacagataagcagccaatgccgtaccaactaaaatgataaacggatgaagtagtgccacaatggaagcaatcttcatttcacgtgcttctactttatgaccaaggaactccggtgtacggcctaccatcaacccactgatgaacacggcgataataataaatgtaaagtagttcatccatcccacacctacaccgccaaaccatgtgttgatctgcatgttcagcatttccatcatacccgaaagcggcattgttgaatcgtgcataccattgacagaaccattggaagtaaccgtagtagtaatactccacaaagcagtggcggccgagcccaaacgtatttctttaccttccatcgcgccattatcctgcgctatccccatttcgtcaatacgtggattaccacccatctcctgactcacattgatacaaactcctaccagataggcaaacagcatgacaccatatatactataacccaattttttacgtttcagatagaaaccgaatgcaaatgccatcgccataggtatgataaggatagaccaacattccaccatattggcaaaataggtagggttctccaatggatgagaagagtttacaccaaaataaccaccaccattagtacccaattgtttgatagggacaatagccgccgtagggccttgtgatacatattgtgtagctccttccatggtggtcactttcatttttccgtcaaagcccatcggagttccttgcacaatcaggataaagcctacgaccaatgaaagaggcaacaggacacgggtacaacttaataccaaatagttccagaaattgccaatagtctgagtagtctttgcagccagcgctttcattatacctgccatggcagccataccggtagcggcagtaataaactgaaagagcatgatgacgaatagctgagtaaaataagtcagcccactttcaccgctataatgttgcaagttgcagttcaccatgaaactgatacaagtattgaatgcctgatgcgcagtctgaccgacatttccatccgggttaagcggcagcacaccttgtgtaaccaacagtaccatcccccaaaggaaccaaaatagatttaccaccagcaaggctctcaaaaactgtttccagttcatctcctcattgggattgatgccactcagtttgaacataacccgttcaacgggcttcataaaatccgaccaagtcttttcacctttataaactttagcgatatatttgcccaaaggatagctgagcactaccattaagacaatttgcgctataacacctaaaacttcagtattcataactctttatttcttaacttacttttttaaaacttctccggcttgatgagaacatacatcatatagccgaacataatcaaactaactacaaataatgctgtgtacataacttgtttctcctttctttttttagatcttctcgaaccagtctatgcatttaaagaaaagccaaaagcaagctataccgctcaaggtacaaaccacaaatccgattgaaaataaatccataattcctttttttaattaatactattgttaactgccacgctatatgccaatagtgtgccattaccggcaaacaggagataagtaattgatttatatacagatataacaacaagaaaaaagagggagcaaaagaagatcttttcaaaatgaaaagggaagaatatcaaaacaggagaataattgatttatttgctgccaaactgcataattccccaatttattatatagctttgtataaaggttttaatacagaaaaacagaaaggaaaaatgaagaagataaatgttaccgtagccgatatcactactttaaaagtcgacgccattgtaaatgcagccaactgttcgttgctgggtggcggtggtgtagatggagctatccatcgggctgcaggcccggcgttgttagcggaatgcaaaacattgggcggttgtccgacgggggaaagcaagataaccgatgcatacaacctgccatgcaggaaagtgattcataccgtaggacccgtatggcatgggggaatgcatggagaagccgaaaaacttgcatcatgctatcataccagtttcatactagcgaaagagaacggcatccaaagcattgcattcccctgtatcagtaccggcgtatatcattatcccaaggaagaagcggcacgtatcgcattgaatgccatcggggaagaaatggcacatggctatgaaggagaagtgattgtatgctgtttctcggaggaagatgccgaagtatatcgaaagctcttgtcttgctgaagaaagtcacggatcatttctatatccggaatgtattgattccgtagccatctttgctgaaaccatcttgcaataatgctgcctatggtctttcgtgaagcagtagaatttgagtggggctgtttatccgtaaggaatacataaaagacttgggaaccggattcgtcattaaaaggtcttatccgtatccctaatcctttcctgctctatggttaagggttttcttcctgtttgttttatctccgcaaatctttggagttaactccataaccttgggagtcaactccaaagcttatggagataactccaaaggctatggagatagaatacatccgtataaaaagacttaaccatagggcaggaaagggttgatcaatgacctgcaacaactaaatgccgtactcctctatctttctatataaagtagtcaaacctattttcaataaacgtgaagcctcagccttgtttcctttagtatgttgcagaactttagcgatatgacgtttttccatagcggccagttcaaactctgaataattcttgccggaataatcttcctgccgggcattctgtatttcaatgggaagatcttgtaaggtgagctgtttgtcgcagacaatcatgctgcgttctatcacgtttcgcaattcacggatatttcctctccagtcggcagctttcaaagctttcaagaactccggagccatcccttccacctgtttccccagtttctttgaaaagagttggataaagctttccgccaaaagttcgatgtcttctttgcgctcacgaagaggagggaggtgtatctgaaaaacagaaagacgataataaagatcttcacggaaattaccttgttctatttcttttttcaggtcccgattggtggcggagataacgcggacattcactttcgtcggtttcgtgtcgcctatcttgatgtactctcccgcttcgagcacacgaagtaatttggcttgcagctcgaaagccatttcacctatttcatccaaaaagatggttccgttatcggccacttcgaacagccccttcttatctttcatcgctccggtaaacgaaccggctttatgaccgaatatctcgctttcaagcagatctttgctaaaagcagaacagtttacagccacaaaagcattctctttgcgaagactgttgcgatggatggcttgtgcaaagacctctttccccgtgcctgtttctccggtcagcaagactgtaacatccgttgccgaaacctttcgggccaatgctacggcttgttgcataccctctgacttcccttttatagcgtcaaaagagaaactttgggtctcttctgttttcactttttctcctacattctttttagcctgagccatagcccggctgattaacggaataattttattattatcatcccctttggtgatataatcaaaggctccattcttgattgcctgcacaccatccggaatgttaccgtgggcggtcaaaagtatcacctccaattctggatagagttttttgatggttgtaaccatatccactccattgccgtccggcaaaaacacatcacacaacaccacttggggattatgtaacttaagttgtttcaatgtagactggcaatcggctgcctggaatacttcgtaaccttccaattccatcatacgcgaaagaagtttgcgtatttgcggttcatcatcaataattaaaatactatccatatatttattctgttttgcgtgacaaagatagaataaaatgaacgctcgacaaaaggataatacttaatttctgttttatagaaaacgctttctgattagctttttttaatctcggactttctgaaccactcccgtagggagtaaacaataacaagctgtaaaaaaacatatttactgatcaataaaactcatcttataatgaacctttttatattttgtttcgttaaatataccggatgacatctcaatttacttccgtcaattcctccctattcttaattaatttaaactattatagactatgaacaaaatagaaataaaagacttgtatcttgttttcggtccggaaaagcagaaagcgttccggatgttgaaagaaagaaaaagcaaaaatgaaattttaaaggcgactaattgtactgtagcagttaaaaacgccaatctgacaatcaaagaaggagagttcttcgtaatcatgggactgtcgggcagtggcaaatcaactttattgcgctgcataaaccggttaatcaaacccacaaaaggacaagtactgattaatggaacagacattactgccgcatctgataaggaattgctggaaatgcgccgccgggaaatagctatggtgttccaaaattttggtttgttacctcatcgcagtgttttaagcaatattgcattcgggctcgaactccaaggagttcccaaacaggaacgtgagaaaaaagccatgaagagtatggaaatagtcgggctgaaaggatatcagaatcagatggtcggacaactttccggcggaatgcagcaacgtgtgggattggcacgcgctttggcaaatgatccggaaatattactgatggatgaagccttttccgctctggacccattgatccgcgtacaaatgcaagatgaaatgctggcactgcagtccaaaatgaaaaagaccatcgtctttatcacgcatgatttgagcgaagcaattaaactgggtgaccgcattgccattatgagagatggagaagtggtgcaagtcggaacttcagaagaaattttaactgaaccggccaatgactatgtggcaagatttgtagaaaatgtggaccggagcaaaatcataacggcaggaagtattatgataacccgtcccgccgtagcccgtctgcgtaaagaaggtcccgaggttctgatcagaaagatgaaagaaagagatattaccgtgcttcctgtgatagatgaaaatgacaagctgataggagagattacattggaaagtgccgccattcttcggcgtaaaggtataaaatcaatccaggaagccgtacaaagtgaagtacattccgttacggaggacacaaagattgaggatctgcttcccttaatcacgaaaaccaattctcccatttatgtggtgaatgaagaacgcgaactgaaaggcttggttcctctatcgtccatcgtagtagagatgaccggaaaagataaagaagaaattaatgaacttattcaaaacgctatcgaattatgataaacataggaaaatatatagaaacagccatcaactggctcacagaaaactttgcccctcttttcgacgccatcaatgttggaataggcgggttcatagatgggttccaaaacatattgatgtggatacctttttatgtaacaatagcattgctggccatcctggcttggtataaatcgggaaaaggagtcagcatttttaccattttaggattattgctgatttggggaatgggattttggaacgaaaccatgcagactttagcattggtgctttcgtctaccatcatcgctcttatcatgggacttcccttgggaatatggagcgcaaacagcaaacgatgtgataaaattctgcatcctatcctcgacctgatgcaaacgatgcctgctttcgtctatctgattcctgccgtactctttttcgggctgggaaccgttccgggagcctttgccaccattatttttgccatgcctcccgtagtgcgtctgaccagcctgggtatcaagcaagtaccgaagaatgttgtagaagcttcgcgctcttttggtgcgacacctatgcaattattattcaaggtacaattaccgctggcattgcccactatcatgaccggtataaaccagacaatcctgatgtcgctctccatggtggtcattgccgctatgattgcagccggagggttaggggaaatcgtactgaaaggtatcacgcagatgaaaataggtttaggtttcgaaggcggtatcgcagtagtcatcctggccatcattctggatagaataacacaaggacttggaaaacaaaagaaagggaaataagcatgaagaaaatactatattttttgtctttcctcctgctgcttgcctcttgcagcgggaaaaaagatgataagacaataagcattggatacataaactgggacgacggcatcgccctgacctatttgacggaagtgattcttgaacaacaaggttatcatgtcgttttaaagaatgccgatccggctcctatctatgcaacaatggcccgtggcaaagtagatttgctgatggatgcttggttaccggctacacaggccgattatatgaaacaatacggaaagaatctggaaatcttaggcaagatctatccggatgcccgtatcggtctggtagtcccagattatgtggacattcattccattgagcaattaaatgccaacaaagaaaaattcggaagcgagattatcggcattgatgccggtgcagggattatgcatgctacagatatggccatagaaaaatacaatctggattacaaattgctggagtctagcggaccggccatgaccgcagtactaaaaagagccgttgacgagcatcaatggattgtggtgacgggatggactccccattggatgttcacccgctttaaattaaaatttctggaggacccgaaaggtatttttggtaaagcggaaacaattacggccattgcccgcaaaggatttggtgagcaacacccgtttgtggcaaaactgatagaaaacatacatctgagcaccgaagaaatcagcagcctgctggatgatgtatcacaaaatgaatataatgaaaaagaaggagcggaaaaatgggtaaaagaacatcaggagctggtagattcctggattccccggaaatagaaatatctcacttaccttgagggccgcgcccaaggtaagtgagaaaacaaacgaactttgtatcagctcaactatgccatatattttgataagtttctcgaaaacaaaacctatctttgcaacataataaaacacatataaattatgaatgttatcaaatcaaggttcgtctatcacttaatggcaataatcactgtagttatctggggaactacttttgtttctactaagattctaatccaacatggattaagtccttccgacatcttcttttatcgtttcactctggcctatctttgcatgtggtgtatttcttataaaaaactatttgccaacagagtaaaagatgaattgttacttttattggccggattatgtggaggaactatttatttcattactgaaaatacggctctcggcatcacattagcctccaacgtgtctctgatagtatgcacatcacctgttctgaccacactgctttcttatttgttcagaagaaaagaacctttcacccgccatcttgtttacggatcgatcatggctttgataggagtggggctggttgttttcaacggcagtttcattctgaaaattaatcctttgggagatattctttcactgaccgctgcattgatgtgggcattttattgccttattctcaaacaattggataatcattattctatcgtattcattacccgtaaagtattcttctacggagtgctgaccattctgcccatgtttttattccgtccgttaaattgggacaatgtcttgatgatgcaacccatcgtgtttggaaatcttctctttttgggatttgtcgcctccatgctctgcttcatagcctggaatgcttgtgtcaaggaattgggagccgtaaaaagtacaaactatatttatatcgtccctttggtaactcttcttacttcagcggtcattattaatgaaaagataacttggatagcccttaccggctgctttcttatcttgtgtggtgtatatttggcagaacggaaaacaaatcctacatttgaggcgaaatcttaaagccctttaattatgaacgagatagacaaaatgcgtaacagtcagctggccgatatggagaaaccggaaatacaggccagtttcatacacgccaaaaaactagtggcccaattacggatgatgagtacatacgatgatggtttcagggaagtgctggaagaattagtgccgggtatcccttccacttctgtcatctgtccaccattttactgtgatcatggacacggcatccgcttaggagagcatgtctttgtgaatgccaactgtacatttttagatggtggatatatcaccataggagcacatacattgatagggcccaatgtacagatctatactccacatcatccggtagattacataacccgacgcgaacccaaagagtatgcatatcccgtaactatcggagaagattgctggataggaggaggagctattctttgtcccggagtaaaaataggtcatcgctgtattatcggagccggaagtgtcgtaactaaagacattcccgacaattccgttgctgtaggtaatccggccaaagtgattagaaaagttgattaaaaaaagaaaacagataattatgaaagttttggccccacataattatctgtttctcgtattcagccaatataaacattgacgctcagaaacaggcaatcgtctccgttagaacattcaaagtctattttattctctctggccagccaacctatagctgcattcaaatctctgtcagacaattctgaagctctttttaaatcacaataactccaccgtttattgtcattcagcagtttccaaacttttcctgcgtttactccaatttgatgtttatccattttgatgttcaattaaagaagttaataatagaatgcttagttttttgcggtaaatataaccttttattaaaataaaatagactctcctacataaaattcatgtaaaagacatgattatttaacatttatttctgtcaaatttcatgtaaattctctttttatgaagatatttattgccggatgagccatttttacaaatatttcctctaactttgtaagtcaattaatcctttgatatgaaaagaaataaaataaactggagagttcccaaaggtatggaactcacagagttagataaaaaggttctctattatcaagatagaggtcatttagtaccttcacgtgaactgatcaagacaccggaacagattgaaggaatacgccgtagcggtattgtcaataccggagtgctagaccttgtagaacgtgagatccatgcaggcatgagcacattggaaatagacaagctggtttatgaatatacgaaagatcacggtggcattcctgcaaccttaggttatgacggttttcccaaaagttgctgcacctctatcaatgaggttgtttgtcacggtattcccaatgaattcgatattctggaagaaggagatatcatcaatgtggattgtactaccattcttgatggttattatgccgatgcatcgcgtatgtttaccattggaaaaaccacacctcaaaaagaaaaactggtacgagtagctaaagaatgtctggagataggcatggaagctgcgaaaccatttggttttgtaggggacataggacatgccattgaaaaacatgctaaaaaaaatggattctcagtagtgcgtgatctctgcggacacggagtaggcatagagttccatgaagaaccggatgtagaacatttcgggaaaaaaggaactggtatgctattggtgccgggaatggtttttaccattgaaccaatgatcaatatgggaacatgggaagtcttcattgatgaggaagatggctggactgtagtcaccgaagacgaacagccgtctgcacagtgggaacatactttcgttatgacagataacggacttgaaattctgacacattaatatatataataaggtatagaaatatggatacaattatattaggtatagaatcttcctgtgacgacacatcagccgcagttatcaagaatggcgtattgttgtccaacgtagtgtccagccaggctgttcacgaagcttacggaggggtggttcccgaattggcgtcacgtgcccatcaacaaaacattgtaccggtggtgcacgaagccttaaaaagggcaggagttaccaaggagcaactaagcgccgttgcattcacccgaggacccggcttgatgggatcattactggtcggagtatcttttgcgaaaggtttcgcacgttcattgaatataccaatgattgatgttaaccacctgcaagcccatgtgttagcccatttcattaaagaatcggaagaagacaacaaccaacctaaattccctttcttgtgcctgctggtgtcaggaggaaactcacagataatattggtaaaggcctataatgacatggaagttttgggacaaactattgacgatgcagcaggagaagctatcgacaaatgttctaaagtaatgggcttaggttatcccggaggtcctatcattgataaactggcacgtcaaggcaatccaaaagcgttcactttcagtaaaccacatattccggactataactatagtttcagcggattaaagacttctttcctatactctttgcgtgactggttgaaagaagatcccgatttcatcgaacatcataaaaacgacttggctgcttcattggaagcgaccattgtagatattctgatggacaagctgagaaaagcagccaaaaatctcaagataaatgaagtggcagtagccggaggggtatcagccaacaacgggcttcgtaactcattccgcgagcatgccgggaaatatggttggaatatctatatcccgaagttcagctttactacggataatgccgcaatgatcgcaattaccggttattacaagtatctggacaatgatttttgcactatagacaagcccgcttattcacgggtaactatttaatattaaaaaaccgttttcaacatgtcagtagaaggtaaatttttaagtaaagagattaacgatttgttttggagagagggcctgacactcgttactgccgagagttgcacggcaggaagtgtggcggccgctattacagccgttgccggaagttcacaattctttaaaggtggaattatcgcctattccaacgaaataaaggaaagtctgttaggggtaaaccacgaaactttagaaactcacggagctgtaagtgaagaaaccgttatcgaaatggtaaaaggagcgatgaaatcgatgaattctgattgtgctgtagcaacttcaggtatcgcaggacccacaggaggtactcccgacaagccggtaggtaccatttggattgctgccggatgtaaagacaaagtgattacactgaaattggaaggcgacgaaggaagaaacaaaaacattgcaaatgcaacccaaaatgcactgcaactgcttcgaaagttgttccaaaacgaagaaaatgagcagtaattgcagaattatttgcaaaaactcttgttttatacaaataaaagtgcttattttgcactccgtttgaaataagtattgaaaaaaactataaaaataagatagcaatgtcgaagatttgtcaaattaccggaaagaaagccatgattggcaacaatgtttcacactctaagagaagaaccaaaagaacttttgatgtgaacttgtttactaagaaattctactatgtagaacaagattgctggattagcctgaacatctgcgctaacggcttacgtgtgattaataaaaaaggtctggatgcagcgctgaatgaagcggtaaccaaaggctattgtgattggaaaagcatcaaaattattggttaattaaaaaggagagatagactatggcaaagaaggctaaaggtaatagagtacaggtaatccttgaatgcacagaaatgaaggatagtggtatgccgggaacttctcgttacattacaacaaaaaacagaaaaaataccactgaaagattggagcttaagaagtacaatcctattttgaaaagagtaacagttcacaaagaaattaaataattataacccatggcaaagaaaacagtcgcaacccttcagacaggtaaagaaggacgttcttatactaaggttatcaagatggttaaatctccgaaaacaggagcttacatcttcgatgagcaaatggtacctaacgaaaaagttcaagactttttcaagaaataattcagtcggaatgactggtggaaagttcctttcatatattatggaaggaactttttttataccacaatgttatcatcataatacattatgaccaatcattgtgacacttttttttgtccgtgtaagagattagttatatctttgtagcataaacagataaatcagactccaatatgggattttttaattttttctcaaaagaaaagaaggaaactttagacaaaggattgtccaaaaccaaagaaagtgtatttagtaagattgcccgtgccgtagcgggtaaatcaaaagtagacgatgaagtattggataatctggaagaagtgcttatcacttcggatgtaggcgttgaaacaactctgaatatcatcaaacgcattgaagaaagagttgccaaagataaatatgtaaacactcaggaactgaacaagattctccgtgaagagatagcggcattattgactgaaaataacacggtggattcggatgatttcactgttccggaaggtaagaagccctatgtcatcatggtggtaggtgtaaacggtgtgggtaaaaccacaaccattggtaaattggcatatcaatttaagaaggcgggcaaaaccgtctatttgggtgctgctgatacattccgtgctgccgccgtagagcaattggatatttggggagaaagagtaggagtgcctgttattaaacagaaaatgggatcagatcccgcatctgtagcttttgataccttaagttccgccgtagctaataatgcagatgtagtaatcattgataccgcaggccgtcttcacaataaagtaggtttgatgaacgagcttactaaaatcaagaatgtgatgaagaaagttgttgcggacgcacctcacgaagtattattggttttagacggttctaccggtcaaaatgcatttgaacaagccaaacagtttactttggcgacagaagttactgctatggcaattaccaaattggacggaacagccaaagggggcgttgtaattggcatctcagagcagttcaagattcccgtaaaatatattggattgggcgaaggcattgaagacatgcaggtattccgcaaaaaagaatttgtagactcactatttggagagactgaataataaatgaaacgtaacacaatagatatcatcaccttagggtgttccaaaaacttagtagactcagaaaagctgatgcgtcagctggaagcaaacggttataaagtaactcacgattccgacaaaccgcaaggagaaatcgcagttattaatacatgtggtttcatcggtgatgccaaagaggaatcgatcaatatgatattggaattttgtcaggccaaagaagaagggaagctcaaaaaactatatgtgatgggctgcctttcagaaagatatctaaaagaattggcattggaaattcctcaagtagataaattctatggtaagtttaactggaatgagttgctggcagatttaggcaaagcatacaagtcggaatttgccattgaacggacattaaccacaccccatcactacgcttatctgaaaatatcagaaggctgtgaccgtaaatgctcttattgcgccattcctattattacaggacgccacatttcacggccgatggaggagattattgatgaagtgaaactacttgtatccgaaggagtaaaagagttccaaattatagcccaagaattgacttactacggcgtagatttatataaaagtcagaaattacccgaactcatcgaaagaatcgccaatgttcccggtgtagaatggatacgtttacactatgcatatccagcccattttccggaagaattattccgtgttatgcgcgaacacgataatgtatgcaaatatatggatattgccctgcaacacattagtgacaatatgctgaataaaatgcgccggcatgtaagtaaagcggaaacctacgaattaatcgaaaaattccgtcgggaagtacccggtattcacttacgtacaacattaatggtaggacatcccggtgagactgaagaagattttgaagaattaaaagaattcgtcaaaaaagtacgattcgaccggatgggagccttcgcttactcggaagaagaaggaacattcgccgctaaagaatacgaagattccatttctcatgaagtgaaacaacagcgtttggatgaattaatggcacttcagcaggaaatagccggcgaactgagccaaacgaaaataggtaaagaatttaaagtcattatagaccggaaggaaggagattactacataggcagaacccagtttgactctcccgaggtagatcctgaggtcttgataaaagctgatgacgagtacttaaaaataggtgaattctataaagtgaaaattacagccgctgatgatttcgacctatacgccagcattttatagaccttttcccttataaagtttggataatgtttgtttttttactaatatagcaaccaaattaacactttaagctttgaataacaaagaatttatatctgaattatcacgtaaactaggatatacgaataaagatacatcacaattggtatcctcagtcattggtgttatgacccaggaattgcaagatggcaacaacattgcaatccagggatttggtacgtttgaggttaagaaaaagctggaaagaatttctattaacccggctactcaacaacgtatgctgattccccccaagttagtgctgacttacaaacccagtgtaactttaaaagaaaagtttaaataaaatagtccttatttataatattatcatgagcgagaaagtaaccatacaagatatcatcgaacttttggctgagaaacacagcatgactaaaaaagatgctgaaatctttgtcaaaggaatgtttgaactgatagaggaagctttagttactgaaaagtatgtaaaggttaaaggactaggtacgtttaaacttacagaggtggagagtcgtgaaagtgtaaacgtaaacacgggggaaagaattgaaatacagggccatacaaaaatatcttttactccggattccagtatgaaagatttaataaataaaccattcgctcattttgaaacggttatattaaatgaaaacaccaaactggaagataccgaaacagaaatagaaggagaggaggaagatacctttgacggaaacgcgcctaagcctaaacaaacaattgcggctaaagaggttgagttcatagaagcggaaaatacagaagattctccaaatgagaatgccattgccgctgaagacactactccggttattgaggaaacaattattgaagaacctgcaccttctgttgaaattacagaggaagagatacaaattatagaaccggaaaaagaatcggaagatattgtcactgaagcagaaaaggatattgttgctgaaacagctgttccccaaacggtttcccctttagcagagacaatagaaggaaacgaggtaacagacaaacctcaagaagaagttatgactatcgccgatgcagccatactggctgctcgtaaagcttgtgaagaaaaaacatccttggaaacaatagcgtcagaagaggcaaccccgtcagagaaaacagtaataactcctgttacttctgattttgaaaaagaacagaagatagaggaaacaacagagacccaagaaatctcagaagagaaaaagaacagagtttcccggggagttattcttgctattattttgattgcctgcattgcaggtggcatatattggtatttgcaatcagataaaacttcggatttacaatcgccggctacaataaaaaacacccaagaacaattggaagaggatattcctgcaattccggttaatgactcattgatgcaaggtaaagataccgcaaacatatggacgaatgttgccggaaaagagaccatcagtcaatcacagcagactgtatctcctagtacggaaaagagttcaggcgttgcgacaaccgcaaatgttgcaaaagaaactttagccgatactgtagaatatgacataacagggactaaaactaattacacattacgagaaggagagagcctggtaaaattagctgtgaaattctatggtacaaaaaagctatggccctatatcgtgaaacataataaaaacatcattaaagatgccgacagagtacccatagggactactctgcgtattcctgaactaactcctaaaaaataagccttcttgcattttgcctgctttcggcataaataaagcaggcaaaatacaagaagtaaaaaaaagtgcgttcaactgatattctcactctacaaaccttatctttgtattttaaaattctttagcccaataacctttaaaaagtagagatgcactttacttttttaataaaaattagttgccgctgttaattaattagcgtaattttggctgcgttaaatgaacaaggctatttacaagcccgttattagatcaataaagaaataactaaataaacaaaattatggctgaagcaattgacattcgcgaactaaacgaacgaattgaaagacaaagtgcgttcgtaaccaacttaatgactggtatggaccaggttattgtaggtcagaaacatttggtagaatcattacttatcggtttactgtccgatggtcatatcctgttggaaggtgttccgggtctggcaaagactctggcgatcaaaacgcttgcatctttgattgatgccaagtacagccgaatccagtttactccggacttgctgcccgccgacgttatcggtaccatgatttatagtcagaaagacgaacaattcatagcaaagaaaggtccgatttttgcaaatttcgtattggccgatgaaattaaccgtgccccggctaaagtacagagtgctttgctggaagccatgcaggaacgtcaagtcacactgagcaaggaaacctttatgctacccgaacctttccttgtaatggctactcagaacccgattgaacaggaaggtacctatccgcttcccgaagcccaggtagaccgttttatgctgaaagttattatcgactatccgaaactggaagaagaaaagaaaatcatccgccaaaatatcaccggagagaaaatcgaagttcgccccattctgaaagcaacagatattatggaagcccgtaaagtggtgcgccaagtctatctggacgaaaagatagagcaatacatcgctgatatcgtattcgcaacccgtttccctgaaaaatatgacttgaaagaactgaaagacatgattggtttcggtggttcaccgcgtgcatctatcaatctggcattggcagcacgtagttatgcattcatcaaacgtcgcggttacgtgattcccgaagatgttcgtgcagttgctcacgatgtgcttcgccaccgtatcggcttgacttacgaagcagaagccatgaacatgtcttctgatgaaattgtaagcaaaatcctgaataaagtggaagtaccctaaggattgtgttctgaggcagttcttaattgcttgacagttagtaagaagacttggaaacaaaaggttgagtacagagttccacatgggtgggaccgccattccacccatgtggaactcccgtttcatctatgtgggactgccgtcccacctgggtggaacaccaaatgcatccgtttgaaaaaccattctcgataggagaaaaaacagaaaccgatgcaccggataaataaacaacatagtacgaacagtatggaaacaagtgatttattaaaacgggttcgccagattgagatcaagacacgcggactttcgaacaatatctttgccggacaatatcactctgcattcaagggaaaaggtatgtcattctcggaagtacgtgaatatcagtatggtgacgacgtacgtgacattgactggaacgtaaccgcccgctacaacaaaccctttgtcaaggtgtttgaagaagagcgcgaattgacggttatgctcttgattgatgtttcgaacagcttggatttcggtacggtgaagcagttgaagaaggatatggtgaccgagattgccgctacattggcattctcggccattcaaaataacgataaaatcggagttattttcttttcagaccggattgagaaattcattccgcctaaaaaaggccgtaaacatattctttatatcatccgtgaactgcttgatttcaagcccgaaagcaagcgtacagatataaagatagctgtggaatatctgaccaacgtaattaaaaaacgttgcaccacctttatgataagcgactttatagatgaaaacgacttccgcaatgctttgaccattgccaaccggaaacatgatatcgtagctatccaggtatacgaccgccgcatggcagagttacctgatgtgggactgatgaaagtacgcgatgccgaaaccggccacgagcaatggattgacacctcgtcacgagctttgcgtcgcgcacataatgactggtggatacagcgtcagggagtattgaatgaaacatttaccaaaagtaatgtggactctgtatctatccgcacggatcaggattatgtgaaatcgttgcttaacttatttgctaaacgaaattaaagaatatgaatatactgaatactagcaaaaagttcttgaaagctggagtttgtgcaattatgctgataacagccggacaggcacaggcacagcaggttacggtagacgccagcattgactcgctgcaacttctcattggcgaacaggctaaagtgaagctggaaatcagcatggatgccaagcaaaaactgcaacttccgttcctgcgcgatacattggtaaaaggagtggagatattggatatagccaagcctgatacccagatgctgaacgatggaaaacgtatgctgataaaacaggaatatacaataacctcttttgactcggcactttactatctccccccattcgaggtgatggtaaacggagagccttaccggtccaaagcattggccgtaaaagtatattccattccggtagacacgctgcatcccgaacaattcttcggaccgaagaccgttcgcgaagtacctatcacctgggatgacgtatcggccatcgtatggcttaccttgctgatgcttgctttgggcggactggcttactatctgtttgtacgctacaaggataacaagcctatcatcaagaagatcaagattgaaccgaagttgccgccacaccagcaggcgttgaaggaaatagagcgtatcaagggagacaaaaccttgcgtacagccgatccgaagacctattataccgagctgacggatgtactccgcacttatatggaagaacgattcggctttaacgctatggagatgacttcatccgaaattattgataagctacaggaaatcaacgacaaagaatctatcaaggatttgatgtatttgttccagactgccgacttggtgaaattcgccaaacattctccgttgatgaacgaaaatgatatgaatctggtaaacgcagtagacttcatcaataatacaaaagtggaaccagacccgaatgcaaagcccgaacctacggaaatcaccgtggaggaaaagcgaagcaaacagggcagaatgattctgctgggcagcatcagcatcattgttattgctattgtggtaattctgtataaggtgctgagtggtgtatataacctctggttttaacaaataaatactaggaacaatgatttttgcaaatattgaatatctatttctgctggttctgctcataccttatatagtatggtacgtcatgaagcggaagaaaaccgagcctacgcttcaggtttctaccacacgcatgtatatgaaggcacccaaaagctggaagatttacttgctgcatactccgttcgtactccgtacggtggctatcatcatggtaatcctgatcttggcacgccctcagaccacagacaactggcagaataccgaaatagaaggaatcgacatcatgctggcagtggacgtttctaccagtatgctggccgaagacttgaaacccaaccgactggaagctgccaaacaagtagcttccgagtttatcaacggccgccccaatgataatatcggtctgaccatctttgccggtgagagttttacccaatgtccgctgacggtagaccatggggtgttgctgaatctgttcaacagcatcaaaggcgatatcgcccagcgcggactgattgaagatggtactgccatcggcatgggcattgccaatgcggtgacccgtctgaaggacagcaaggctaaatcgaaagtgattattctgctgacggatggtagcaataaccgtggagatatttctccgctgacggctgccgagatagccaaacagttcggaatcaggatctacaccatcggtgtcggtacaaacggaactgctccttatccgatgcagacctacgcagggacgcaatatgtgaatgtccccgtcgagatagacgaaaagactttgaccgagattgcaggtacaacgaacggaaattatttccgtgccaccagcaattccaagttgaaggaagtctatcaggagatagacaaactggagaaaacgaagttgaacgtgaaggaattcagcaaacgcgaagaagaatatcaggtattcgcctggattgctttcttctgcattttgcttgaactcttgttgcgtaactcagtattaaagaaaataccttaaaaaaagaaagtcatgtttcgatttgcagacccgaactttttatatttactcatcctattgccgtttttggtggcgctgtatttgtattccaattatcaccgccgccaaaatattcgcaaatatggtgatccggcattgctgaaagggctcatgccgactatttccaagtatcgtcctgacatcaagttctggctgacttttgctgcgttgacattggttatactgatgttggcccgcccacagttcggctcaaagatggaaacggtgaaacgaagtggagtggaagctgtcattgccttggacatttcaaactccatgctggcagaagatgtgactcccagtcgtttggacaaatcaaagaaattgatttccagactggtagatacgttcaataatgataaagtgggattgattgtttttgcaggtgatgctttcacgcaattgcccatcacaagcgattatgtttccgccaaaatgttcttggaaaccattaatccgtcattgataaccacacaaggtacggatatcggtgcggccatccgcctggcaatgaagagttttactccgcaagaaggagtgggacgtgcaattattgtcattaccgatggtgaaaatcatgaaggtggggcagtagaagcagcccaagaagcagccgaaaaaggtatgcaggtatttgtattaggagtaggttcaccggatggttctccaattccagctgaggacggtagcaacaatttccgtcgcgataaggatggaaatgttatcgtcacccgcttgaatgagcagatgtgccaggaaatagccaaggctggcaatggaatgtatattcgcgtggataataccaactctgccgagaaggtattgaacaatgaaatcgccaaactgtcaaaagctgatgtagaaagtcaggtttatactgaatttgatgaacagttccaggctttggcatggctggtgcttatcctgctggtggtagaaatgcttattttggaacggaaaaatccgcttttcaaaaatgtcagactatttaaataaggaatgcttatgttacaaaaaacctatatcactctgttattcttacttgtggcaagcagtgccttcgcccaaaaaacagaaagagattatctgcgcagcggaaacaagctgtataacgacagcttgtttatcaaagcggaggtagattatcgtaaggcattggaaattaacccgaaatcaacagatgccatgttcaatttgggaaactcgctcttgatgcagcaaaaagcaaaggaagcgatggaacagtttgaatctgcttctaaggtagagaaggacaaggataaactggcacagatttatcataacatgggagttatccttcagtcgtccaagcagtatccacagtgtatagaggcttataaggaatctttacggaataacccgaaagatgatgaaactcgttataacttggctttggcacaaaagctgttgaaagaccaacagcaaaatcaagaccagaatcaggataagaatcaagatcaaaaacaagatcagaaagacgacaaaaaggatcagaacaaaaaccagcaagaacaggataagaaagaccaacaaaatcaaaatcagcagcaacagcagcaaaataaggatgaaatgtccaaggaaaatgcccaacaattattgaatgctgtgatgcaagatgaaaagaatgtgcaagacaaagttaaaaaacaactgcaaattcaaggaaagaagttggataaagactggtaatttcttaattttggcaaataaaaaaataattagatagcaatgaggaaagtaattctcttattcatattaataacatcggtgctcggagcatgggcagacggaaatgtgacgtttaccgcttctgcgcctgatgtagtagtaagcggggatcagttccggctgacttatacggtcaacactcataaagtcagggattttcgtgcacctaatatcaaggggttcgatgtcttaatgggaccaagccgttcacagcagagtagtacacagattataaatggtaatgttacttctaccagctccattacttttacttatattttgatggctgataaagaaggaacttacaccattcctggtgctactattgtggcagacggacaaaacaaaacttcaaattccgtacaaatcaaagtattaccgcctgatcaaacaaatggtgttggaggtggaaacaatagcggtggaagaacttcttcacgcagtcaggttgccggaagcaaaataaccaatcaagatttgtttattaccgcaacagcaagtaagactactgtttatgaacaggaagccatcttattgacatacaaggtctatactttggtaaacttgcgccagctgcgtggtgacatgcctaaactaaccaacatttatgtacaagaagtggaacttccccaacaaaagacattctctttggaacattataacggaagaaactataacactactgtgtggagtcagtatgtacttttcccccagcaatcgggaaaaatagaaattccggctattacctttgaaggggttatagctcaacaagttgcctcagacgatccttttgatgctttctttaatggtggaagtaactatgtggaagtaaagaaaaacattgtcactcctaagctgaccatcaatgtgaaagcattgcccgatggcaaaccggctaatttctccggaggagtaggagagtttactatcagttcgtctataagtacaaaagaactgaaaacaaatgatgctgtaaccattaagttagtcatttctggtacaggtaatttgaaattggtcaatactccggaagtagctttcccaaaggattttgaagtatacgaccccaagattgacaataaatttacattaactcgcgaaggtttgtcaggcaataaggtgatagaatatctagcaattccaagacatgccggcaatttcactatttcgcctgtcgaattttcctattttgacttaaaaagcaatagctataaaacaataaaaacagaagcttacaacctaaaagtggaaaaaggtgcaggaaatgcagatcaagttattgcagactttaccaacaaggaagatttgaaagtattgggacaagacatccgctacatcaaaatgggggaaactagtttaactcgtaagggagatttcttctttggctcaacaacatattatctatggtatatcattccattggttctcttcgttgttttcgtaattgtctatcgtaaaaaagctattgaaaatgcaaatgtagcaaaagtacgtactaaaaaagcgaataaagtggctgccaaacgcatgaaaaatgcaggcagattattagctgaaaacaaacaagaagcattctatgatgaggtgttgaaagcactttggggatacatcagtgataagttgaatatcccggtttctcaattgtctaaagataatatcgaggacgaattgaccaaatatggtgttgcccccgaactgattaaagatttcatcggaacattgaatgaatgcgagttcgcccgctatgctccgggtaatcagaatgaagctatggataaagtatattcttcggctgttgaggtcatcagcaaaatggagaatagtataaaacactaaatcaaaggagattataacaatgacaaaaatatatttcattttgatattcctgataagttttgtcacagtctgcgcacagaatgaatcagactctgcacaggttaccgcccaaacagaaatgccacaaagtgctgctgtgcaaactttcccaacaaaaacagaagctgatagtgcatatataagaaacgattttgcagcttctgtagagatgtatgagaatatattaaaaaacgagggggaatcttccgatatttattataatttaggtaacagctattataaaatgaataacattgccaaagctgtccttaattacgaacgtgccttgttgctaaacccaggaaatagtgatattcgtttcaacctagaactggctcgaagcaaaactgtagacaaggtaatcccttctagtaaaatgtttttcgttacctggactcaatcacttattaatacaatgagtgaaaaggcatgggcacatacaggcattatcatgtttattctgatgatattggcactgtctttatttattttcggaaaacgagtagtcttgaagaaagtaggatttatttcagcaatctttttctttctagtgactattttagcaaatatatttgcctcagaacaaaaatctgaattaattaatcatgataacgctattataatggctcctagcgttacagtcaaaagtactcctaaccaaagtggaacagacttatttattcttcatgaaggtaggaaagtaataattaaagataatacgatgaaggagtggaaagaaattaaactggaagacggtaatgtgggatgggtacctaccaatgttattgaaatcatttaaaacataatcaatggatatacaacagtacatagcagcagataaagaattactactgaatttgaacggaagccaatccttattttgggacggattcatgtgggtagctaccagtacaattgtatgggtacctgtagctgctatgctgttatatatcataattaaaaataacaaaattcaagaagcattattgactatcgttatgattgccttagtcataactttagcagatcaaatagcttctggtttatgcaaaccgtttttcgcacgtttccgtccaacacaagaccccaatattatgtatatggttgatattgtaaacggatatagaggaggacgatttggcttcatatccagtcatgctgccaacacatttgctatttctgtctttttatctttactaattaaaaggaaatctcttacttttatgcttcttttttgggccgtactcaattcctattctagaatctacttaggagtgcattatccgggagatattctttttggtactatagaaggttgtttcataggatatttgatttatctcctttataaatttattcaaaaaaaaatcttttataaaccacgttgcatttctaatcaatacactgccagcggttatttaattagtgatattaatttattctacataattctcatttctacttatttcttcattattatagcaggtatgattgtgactcatacactcaatctataatcagcaaattaaccattataaatttacatatagtcaaaaatagcacaaaaagatttgttttatgcatttttttgattaagtttataccatgatttaagtactcacttttataactaaatttaatacatcatgagaacaataacatttaatgaactgcgcagaatcaaagattcattacctagtgggagtatgcacagaatcgcagatgaactcaatatgaccgtagaaactgtacgtaacttttttggtggacacaattttaagaatggtaaaagtgttggaattcatttggaaccgggaccagatgggggactagtaatgctagatgatacaacagttcttgaaaaagcccttcaaatattgagagaaactgaagaaaaagtaacgcaagaagcgtaatataaaatcccggttgaatgcaacattcaattgggattttttgtttaacctgaaaatcacttaaaatatagaattatggaagataaattggtaaccttagcaatcctcacttatgctaaagcacagattttaaagaatgtacttgagaatgaaggaattgaagcgtacattcacaatgtgaatcttattcaacctgtcatatcttctggagtaaggctaagaattaaagaaagcgacctgcctcatgctttgcagattatagaaagttctgcatggctttcagaagatataatcaaaggtaaggagagcagctcagaaagaaataaagaaaaaagaaaagtacttatcccgatagacttttcaaactattctcttaaagcctgccaatttggtttttcttttgctaatgctattaattcagaagttgtgcttctacatgcttatttcagtcctatttatgtgcctacaattccttatggaactgataatttcaattttcagatcgaaagagaagaatctgtaaaaagtatgatagaaacagtgcacaacgagttgaataaactttccgatacaatcaaaaagaaagttgagtcgggagagtttcctaatataaaatatacttgtattttgcgtgatggtattcccgaagaagaaatcttacgatatgctaaagaatataatcctcagataattataatgggaacaagagggagaagtcaaaaagatatagacttgattggtagcgttacagctgaagttatagaaagaagcaaatcctttgtatatgctattccagaacatacaccactaaaaacattcaatgatataaaaaaagtagcttttgtgaccaattttgaccaaagggatctaatagcttttgactccttgataaatgcttttaaatcgtttcattttgctgtttccttcattcatttaagtacagataacgatgcatggaatgaaataaaactagcaggtattaaagattattttcaaaaacaatactctaaattggaactatattataatgtagtgaaagaagataacatactgagcaatttggacaactatgtaaaagaagaaaatatagacgtgatttgcatcacaaattataaacgaaacatatttgctagattgtttaatcctagcatagcaagaaaaatgatatttcatgctaatacacctatattagtaataaaataaagaatcaagaagggtagcacaagcaaatcacaatgtgttacccttcaacatattagggatattcagtaaatgtctctaaaaaataagatggcatatgaagatgatagggcatgaccatttcatatgccattcttattgtcatttt

SEQ ID NO: 3923 - DNA, 18179 bp, Unknown
  gut microbiota DNA sequence
aaatcccagtcatagctgaagatttcattggaagacttgtcaagccatttacgtttacggacatggagataagtggcgcgaccacgaatagggtagtcttggattatacggtactcaccaaaaccataggatatgatatccgggttggtcttatcttcttttagctgaactttttttcatcaagataaatatcaaaacggtcagcactcttgtcgaaattgacaatatcaaagttgtctataagcacatccggaaggatggcacgaaggagtcgttcgggtttcataaaacaaaggtaagcaaagatagctaattttaaaacttaccaaccagaaatttccgctgagccataaaatttcacatttatttttttccctttataaagcactgtcttttcacttccatccggcattcgaactgtaaacttccgctcatccagcatcccttcatagcagccacggcgtgcatcaatagtcaatgtccgcttggcatcattccaagtcatcggaatttcagtataagcaccgttttcgtaattatagttattgccttcatcctcataaagcacaaaattaccatcggcaccaggataaacacaaaccttgagattgtcccatttcttctcggtcacgtattgcacatcgggacctaacggcacgatgcttccagcacgtacataaagcggaatacgattgaacacagtcgtcaccttcagcttctgcccaccttctgccacttcgttcgtccaaaaatcataccattggctaccggcaggcaaatatagttccatttctttagattgagtaaaatcgacagacaatagagggatatcagactcctgcgctttgcagccccacccttcattctctttcaagatttgctgtgcctgcttaggagtgtattgggcatgtaatacaggtgctaccaaaaaggatgatccaaacatatactcactgcccatgttccatgtcttaggatcactgagaaaatccatgaatagtgcccgcataaacgtggaattacgatgacttacttcccaagatgtagaatagatataaggcatcaacgaataacggagttttatagcatcaaccaatgcatcatacaccggctcaccagctttaccatagaggaaaatttcgcgaggtgcatcagccccgtgactacgcatcattggacaaaatacaccgaattgcgcccaacgcacatacaattcatggaacataggattttttgtagccgttccacctcccaagctattgttataagaaccggcaaagaatccgccaaggtcagtattccaatgcggcattcccgtcagagaaaaattcaacccggcagtaatttgcctacgaaacatatcccatgaagatcctacatcgcccgtccatacatttgagccataacgttgttgccccaagaatcctgaacgggtcaagataatgacacgcttatcgcgagtcagagcacgctgatgatcagacactccgcctactgttacgagcggaaaagcgttccgtacgctacggaaggaaccggaataagtctgtcggtcgaaatccgaatctttggggttaaagtggtcaggttctgtcgagtccatccaccatccgtccatgccaagctgaaagatacctttgttcaagtaattccaataaatatcacgagccttcggatgatatggatcataaaccttcacgccagaaggataatcaaagttaggcggccatccttccacacccgattcgggccatgtagccatatccatcagcaacccttccttctcaagttccttgaaaggtttagtctttggaccaaaagaagaccaaatggaaatcatcatgtgtgcattcaagccgtggacttcatcaatcatccttttcggatcacggtactcgtaattcaggaactccattgcattccataaatagttacttccccaatattgccaatcctgaatgatacagtcaagcggtatgcccaattcacggtatttcttcacaacacttaccacttcatcctggctcttatagcgctctttgctttgcataaatccataactccacaaaggcatcataggaacagaaccggtcagcaagcgaatctgtgcaattacaccgtcagccgaaccgccatacatgaaataataatcgatacaatcgcctacatctgaacggaacgacgtttcctcttcattgtcaacatacatcgtacctgcataattatcccaaaatacaccatatcccttagtcgactgaaaaacaggagttacgtcttctgtattgccttgcaccagatacttctctattccacgttgcatcatctgtccgttttgaagttgtccaagtccataaagcccttcatccttatcggttttaaaactttggtaaacagaataagtagcccgccctacgtcattgacaggtatgaatgccttcacattctccaattccttcaataggggcatcccattacgtgtttcataaatcagaacacctgtttttgtgtctagtttcaccgtcagtaaacggctcttcattacaatattgccatcttccgacgtagaaactttaagaaccgttttttcaggtcttgcaataaccgaaagacttttcttatctaccgattgcccatgcggcattttcaacacgcgcagactattagcattaaaccattgcacttccacatctatctttttcccaaaaatagaagccttaatgcctgtttctgtccgctgatattcctgcgaccacaccaaagtggtcaacagacaacagaatgtaaaaataagttctcgtttcataaactctaactttatattagttatcaataagtattaattaaccttccaccaatccagcataaactatttttattctatctcctcaaagggataagcttatctatcatcattaataaaaacttccatagcaatatcaaaacaattgtctatatgctaaaaacacttacccttatcctatttcctcaacttaacccataccacaaaacctccgcgaggctggcactctatattcaattctttggtatcgaatgccgaattttcaatttttatttgtttcccatcagtagtatccgaaaacagttggataagctgaatagaatctttaataaactccaaattcacacgaaatgattttgtattttccgtaccattcaaaccggaaatataccaactatccttacttttacgagcaataacaacactttcagccggataaccggacagcagtctggtatcctcccatgcaaccggaagatacctgataaagttctgtacctctaccggttgttgcctatacccttcaggacgatctgccaaatgctgtagagccgactcaaaaataacaagtaacgccaattcatgcgcatcggtagtgatatgtggatgttgtgaattggtaaatgtacaaggcgtatagtccatcggacctatcacattacgggtaaaaggcaaggtacaattatgccaagctgcattatcagtcaatgtcggtttattattataccattcggccccatataccgcttccacactcatcaggtttgggtatgtccgttgccagcctctgggaatagctgccccatgaaaattgactaacaatttatgcctggctgcatcctccagcaaatcaatataataattcatcgtacctatagaatctccaccaaaaaagtctatcttaactccctgaatacctatttcttttagccattcaaattctttgtcacgcacttccggggtattcaaccgatataacggagtaggatcacaccatgcagtagaagaattataccatatcaaaggagttacatttttctctttacaatagttcattgcatcattcagatttcctccattccccattgcatcccattcccaatcaatcaacatatagggcaaatcaaagtctgcggcaaaatcaatatatttcttcactatttgataatccttagaaccatgattatatgcccaatatatccaagagaccaatccaggttttatccattgggtatcttggattttacatggttcactcacatcagttaccaaagtcgattcgacaatatcagctaatgttcctatgatagcgacacgccaaggtgaataccagccggatgggcatatcaaccgttcatccgataattttatcttatagatagaagaatcagctgcattagtaagataagctcctgtgttatcacgtaatatgttggcttcggttaatagtacaaaagcgctgtccgaaggttggaacaatgttggaaaactccactcacgtccctcattatctgcaacgccgtccgtatttggccaataaaagccctcataacctacagtaaatttttgtgtccaacgcttgatacctggagtaaaagcaaatgcagtgtactcatcaagaaccacaatctcttctttggttttaggaagatgataacggaaagctataccatcattataaacccggaaaataagatctacccgaagtcctttgacattttcaaaccgataagtacattcattagcctcattatggcaatgcctgcgtttaccagtcagcatttcataatcatcaactacagaagttacaggagttgagcttatcaatttaaagcaatcatccgtatccgacgtttttagacctatttcaggtaatgacatcattttaactttatcccgcccactatgataaataacagaaaaacctttttcagcatgatattcaatggctatcttaccgttaggagattgtaataaattgttttgcatcgtacatgaaatgcaggataagcacaacagtgcaatgatagtaaaatatttcataatcattaaattgttcaatgtaccttctattatattttaaggaaaaagagaatactttatcagcaccctctctttcctctcttttttaattattcatatagataaaacatacgttccatcatactccatttttctttagcaagttcccctttcctgcattgttggaataccgatacaaaatcttcccattcctgctgtcggggtaaagtcgcaagtttagccatagcagattcccaatcgaaatcaataggagtttcgacaatcatgaataaccgattaccgcatatatatatttccatttctaaaataccaactgaacggatcccctctctgatctcccgccacgacttctccttactgtggcactcccgatacttctctatcagctccggatcatccttcaaatccattgtctgacaatatctctttaccggatagccatatcttttcatttcatatccattttctttcatcttatcttaaacttaatcctgcttaattatatccctcattctgtttcagattcttatttacattcaaatcattttgaggaataggaaaatatcggttatggggtgcccatgtacgtttctcaaattgataatacatattttcatccaccggagaagcagtagccccactccctctataattacgagcttgaggatcatccgacaattttactccggtaaatgtatgattaagttctttctcggcaatgccccaacgtaacacgtcataatatcgaagcccctcgaatgccagttccacacgtctttctttacgaactgcttcacgaacaagttcctgtgtcgctacgtctgtcttttttattccaaccaatttcacacgatcacgtatatcattgatagtcaaatccaataaattctggtctactgcattcggctgcgattcatttaccgcttccagatagcttaatagaacctcagcataacgcataataggagtataagtgggagtagaacctaaattattagttatagacggatcacaacctttcttcggacaatatccattaaataaggcaaatttattatagctatctgcagtattagctcccttaaagcaatcataaattatatcattatacttagttccctcataacttcccaaaggaggtaaaaaaatagaagcatacaagcgcaaatcccgattaacataaggatcattctcatcataaacctcagaagtcttaatgtccttgccgtctgcacagaaatattctttcaccaattcgttatatggtgagaactgatgccaccctccataagcagcttcaggatataaatattgataacgtgaattagtatacaaatcctttatccccataatacaaaatattatctcagggctatattcacctcctatttgaaaaagtttctcatagctgtcctctccattacgacgatccaattcatatattcccgactcaatcacactacgtaaaatagtagcagcatctccccatctctcttgtgccagataaagacgacttaaaagtaccttagccgcccccctggtaaaccggccatattcctctgaagaatattggacaggcaacaagtctatagcagtcttcaagtccttctccacttgcgaatagacttcagtctgaggtgtttgagagatagaattcgcttcgtccaccgacagagttttcaaaggcataggaacatccttataataaaatgccaaatttaaaaagaaataagctcgtaaacacttcacttcggcagaccactgttcttttttagattcttccatcggacagtccgtaatattctctagaaaagtgttgtacttagctatttgcgtatatgcatttccccaataccaacgtaaattactgttagtagccaccgtattggaactagccattaaagtagaaaaattttccttttccgttccgtttccacctgcaaaatccaaatagagcaacccttgtggcgtagcaaaatcatcatgcgaccaaccagtctggaaacgataacatcctgtcaaagccaacatggcatccccttcaccagtccaaaaactaccatcagaaattgctgaaggtggctccttatctaataaatccgagcaaccagttgttactagtgatacagccaaagcacataaacaagcctttgtcattcctaatgtattatatatatttttcataatgattcttgattgaatgatttacttagaacttgaaattaaatccgaatgaataaatactattgaccggataataagagggagaatcccctgttcctatctcattttcaggatcccaacctttatagaaactattgaaagagaacagattttgtccgcttacataaacacgcacattttccaaacctatttttttagtccatgcttttgggaatgtatatcctatttgtatattcttgactcgtaagaaactagcattacggacccaataatcagaagtttgaagattagtgtcattcatattcaaagtttccaatcgaggatattcagcccatttatcaggattttcttccttccaacaagattcagcctgccatctctgtatctgtccaccgttgtagaatgcataagccatataagatcctatcaaacgcttatgacctcctaaaccttgtaataaagctgaaaaatcaaaacctttataagaagcggaaagattcaaaccataataaaacttcggggtagtacttcccaatacggtacgatcatattgcgcatccaccttaccatcgggaaccccgtcaggaccactaatatctttgtatttcacataaccaggtttcaatcctgacttacttaccaattgctcaggagccgcatctatttccgcttggtctacaaacagtccatcagtttcatatccatatataatacctatcggttgccctacaattctgttattattaatttcttcggtagctccgttcgccaatttctcaactgcattttttacccatgtaaaattaggagaaatactaaaccggaaatcacgtcctatttgtccgttataagtcagatttatttcaattccttcgttcgaaacagctccaacattagattgtccgacttcacgtcccataatactagacacctcaactggtgctaaaatgtccgaagcatatttataaaaataatccaatgttccactaaaacgtccattcaataaactaaaatctaaaccaatatccgttatagccgtcttttcccaagtaatttccggattattataggttttcatgtaagccccagactgaagagttgccggatttccaaaaggataatcatgtccaagttcataaatctgttggtaaggataaacacctatattttgattaccaagtacaccataggaagcacgcaatttcaaattatcaactacagctgaaactgccgcattcttccaaaaatcctcctcagaaattctccaccctgcagaaactgacgggaaaagtccccaacgatgaccgtccgcaaaacgtgacgatccatcatagcgcaaattagcctctaataaataacgatctttccatgcataatttatacgcccgaaaaaagaaagcaacgcatattcttccaatgaactatcattagtagctgttgatttatctccagaacctaattcatacaaataattattaggaaacgtatttctataaccttccaaacctttattattagattgctccacagaagtacccgccaataacttaaaggtatgatttttaatttgtttttcataagtagctaatgcttcaaaggtagtatacgtattatttgcagtccatacatttaaagtagcgggccccactgtcttactatcatcaaaataagtatcagcccggtacgctttatcatatttagtccagtaattcaccccagctttacctataaaagaaagtccgtctacaggagtattccatgtcaattgtccggaagcacttatatttctactcacattctgcacaaaagattcactcgccaaccacgcttccggactataattatcctgatatccaaaacttccatccgacttttgcccggcataaataggtccctgacgaacagcatatcctatcattccatcaatactttgtggttcgccattaggagcattatatttattattataagcattaatattcaaattaagcatcagccctttggcgatttcacttttcatagtaaacagtgcagtcattctttcattagacgtttttgccgtcataccttcctgatttctataacctactgataaattataacttgtcgtagcatttcctccttgtatgctgagattatgttggtgttgaaaaccagaaccagattccaacagccattttaagtgatttacattcggataattatccggatcagatccatctctatacttttgaatctgttcaggtaaataagcttcctgcttacccatattccgcatagccatattataatattccgcatattcccatgatggtaaaaaatcaggcaattccgtaggccgttgccaaccaaaagaattactatatgtaatagtcgttttaccttgtgcacccttctttgtttcaatcaagatcaccccattagcagcacgattaccataaatagaagcagaagctgcatctttcaaaaaagaaatgctctgaatatcattaggatctacatcatcaatgttacctgataaaccatcaatcaaaaccaatggatctgttccagcttttgaaaatgtaccagttccacgaattttaacagttgctccttgtccgggacgacctgaagtttgcaatacacttaaacctggagccaaacctgccagtgcttgagcagtactcataacaggcttactagccaagtcttcagctgaaacagcagatacggctcctgttaaattcacctttttctgtgttccatatccaactacaactacttcttccaacttttttgtatcttcttccattataatacgaagtaacttgttactttcaacctttatttcttgcgaaatataacctacataacttatctggagcatgtttcccatttcagcagacagagaaaatttgccatccaaatcagtaacagttccattggaagtacctttaaccaagatactgaccccaattaacggctcaccggaaaaatcagtaaccaaaccattgacattactctgtgtctgtgcccaagtagtatagctcaggcaacacatcaacaagaccaccaagaatcttattggctgcatacattctaatctgtttttcattattctattgattattgggttaattttcaagacataacaaaggcttaccgacctaaaaaagccgataaataaacctactttatgctatattcacttctttatcttaaatacgggagcaatcttattcaactgtacatcaggcatatcaataacaactccttgcgctgtacgagtaaaagatacctttccataacctaacaattcaattttagtaattttatcaggatacaactcacttcccgttgccagcgattgaatgacaacttgcttttcttccggccatgcaaggactgtagcatagagatatttcttggtttgagtaaaacggatttcagatgcagtggctttagtgtaagcaccttcattgaaaccttgggcattaatcttgatatcagcattggctatcggaccttctccgaagactttccacgggcgtgtatcataaatagcctctttattcatactcatccagtcaccaaattcatttaaaatggcttcttccttttcatcgaaagttccgtcagcccgaagaggaacactaagcaacaaattaccgttcttactgaccacatccactaatagtttcactacatcggaagcacttttataccagccgttctccgccagtctggtatcataatgccaaccgcctaaacaagaacaagtctgccatggctcttcataaatactattgggagatcccctttccacatcccataccaaagctttacgttgctcatcggtaagaattttaccaaacataacagcactgaaatcccccttacgaacaaccatgttgtgattataaaaatgtgcggcaatcttcaaacccgcatcactgataggataaaacggtacaccagtcacatcaaaataaatcaaatcgggattataacggtttattgcatcgactgtacgatcataaaagtttgtcacatattcttgagtaggaatacaaacaccatttccccatgcccattgacggtgaatcataccgtcagcccaacttccagcgcttaacgggtgattctgtgcataaagtttttgaggatcgtagccttcccaccacttacccttaccatcttctttagtcaaacatccatcgtagggtacacctgccttctcaccatgacggtcgtatcgttgagccggttcataccagctccacgcatggtccgcatggaaactgataccaaatggaagaccgtttttcttagctgcttcagcccagcccgccaatatatccttcttagggcctatattcacggaattccattcctgatattggctatcccataaatcataattatcatggtgattacctaaagcgaagaaatactgggcaccaatcttcttataaaaggaaaccaatttgtccggatcccatttctcggctttaaacaaaggcaatatatccttgaagcccacttcagagggatggccataatgttccacatggtgcttatactcgcgcgaaccttccaaatagagagaacgcgccatccagtcgccggacccttccacacattgcggtccccaatgtgcccaaataccaaatttggcatttctaaaccattcaggaactttatagttctgcaatgattcccaagtaggttcgaactctccctcctgcattttttcatttttctctgaaacaggtacctggtaagtctgagcctccaaaactcccgtccaaagcaacaaagccgaagccaaaagaaaatgttttgctttcatagtataattgctttatatgtttttcaattatcaatagtgcaaatatacagagttgaaaccaatttatattatccaaatgcgccattatgtaggataatatcgacttttacctgaaataattcaaaaacaaataccaaaacaggtgatttgatatgaaaatatcgatttcccattggattatatatatacttttgcttactttgtacaaaactgaatctttcattctaataccttaaggaatatgacacaatcaatcgaccaattacatttacttatattaaatgtaggactagccattcacaatgcagactggaactggaaaaacgtaagcagcccttttacccgactctattatataatggaaggaactgcccaaataatatttcccgatggaatgcaggaactaaaaccacatcatctatatctggtgccatcattcactacccatagttatcagtgcaattctcatttcactcattattatctccatatatatgaagaccatcaatcggaatccggcattctggaagattggaatttcccgatagaaatacctgcgggcaacctggaattaccacttattaaaaggttatgtgaaataaatcctaccatgcagcttcctcaatccgacccgacaagctatgacaacaaccccacattaatcagaaacatcattaaaaataaacagcgtaccttctgtgacaaagtcgaatccagaggtatagtatatcaacttattgcccgctttttaaaagacgccaaacctaaagtggaagtcaacgataaccgtatccaaaaagttttgtcccacatccgaaaaaatatctataaaacagtagatatagactcattggcagcaatctcatgcctctcaaaagatcattttatccgtcttttcaaaaaagaagtcggtaccacaccgctacaatatattaatcagaaaaaaatagagaaagcccaattaattctgattacagaggatattcccgtaaaaaacatagcctatctccttgcttatgaagaccattcttatttcaaccgcctattcaaaaaaatcacagacgttactccacagcaatatagagaactatataaaaagtaaccgtcttattatttttacgcaaaggtttacgtacttttttcaacctcttccaccatatacctaaaggttattcctctatttttgatgccggaaataaatctaaaaataaatagagctatgaattacaatgaaatcgggaaaaccggtatgcgggtttccaatcttagtttcggcgcatcttcattaggaggagtttttcatgatatccgcgaagcagagggtatcaaagctgtttacacagcagtagagaatggaatgaattttattgatgtatctccctactacgggcactacaaggccgaaaccgtattaggcaaagcattgaaagaaataccacgtgacaaatattatctctctaccaaagtgggacgctatggaaaagatggagtcaacacatgggattattccggaaaacgtgcaacggaaagtgtgtatgaaagcttggacagactccacattgaatatatcgatctgattaatgtacacgatgtagagttttcagacatgaatcaggtagtcaacgaaacattacctgcactggtagaacttaaaaagaaaggtattgtgggacatgtaggtatcacagacttgcaattagaaaacttaaaatggatcattgatcactcggaaccgggaacagtagaaagcgtacttaacttctgccattattgtctgaatgacgagaaactgactgattatctggattattttgaatcaaagaatatcggcattatcaatgcctcccccctttcaatgggcttactctcccaacgtggggttcctgcatggcatccggccccccaatcactggtagaagcctgtcggaaagctgttcaacattgcctgtccaaaaattatcctatagagaaactggctattcaatattctgtcagcaatccacgtatcgccaccactttgttcagttcggccaatccggataatgtattgaaaaatataacatatgccgaagaacccattgattggaaccttgtaaaggaagtgcaagaaattatcggagaacaaatgcgtgtcagttgggctaattcataatacaaaggaaaataatgatggattttaacataatagatgcacactcccatctttggctacggcaagatacggaagtcaacggattgcctatccgtactttaaccaacggacgttcgttatttatgggggaagaacgtcagatggttccgccctttatgattgacgggcggaatagtgccgaggtttttctctcgaacatggactatgcacaagtatcggctgccgtagtcactcaggaatttattgatggcatccaaaatgaatacctcgcaaaagtgtcccataaatacccagaccgtttctttgtatgcggtatgtgcgaatttcgtaaacccggttatctgcaacaggccaaggaattaataagttccggtttcaaagcaataaaaatcccggcacaccgcctttttctaaaagaaggaagagtcatgctgaacagtgacgaaatgatggaaatgttccattacatgcaagaaaaagacattatcctttccattgatttagccgatggggatacacaagtacaggaaatgaaagaaatcattcaggaatatccgcagcttcgaatcgctatcggacatttcggtatggtcaccacacctcattggcaagaacaaataaagttggcccgccataaaaatgtcatgatagaatccggggggatcacctggttgttcaacagtgaattctatccgtttcacagagcggtcaaagccattaaagaagcagcagatctggtaggtatggacaaactgatgtggggatcggattaccctcggaccattacggccattacttacaagatgtcttacgatttcatccttaaaacgactgaaatgacacaagaagagaaagcactttttttaggtaaaaacgccgaaagattttatggtttcaaaaatctcatatctcttccttacataaaaaacatgtcagaataatcaactgacacttataaatccataccatgaaaaataagaactattatgtaccattgatgctcatattctgcctgtttttcctatgggctatcagcagcaatctgctacctactatgataagacagctgatgaaaacctgtgagttaaacgctttcgaagcatcattcacagaaacagcctactggcttgcctatttcatctgtcccattcccatcgctatgttcatgaaaaaatacagctacaaatcgggaattattttcgggttattactggcggcatgtggtgggttactgttcttccccgctgccatgctgaaagaatattgggcatatctatgcatattctttatcattgccaccggaatgtgttttttagaaacggcagccaatccttatgtaaccgctttgggagatccgaaaagtgcgccccgtcgattgaatctggcacaatcattcaatgggctgggagcttttatagctgccatgtttctcagcaaactgattctgagtggcaaccactatacccgcgacaccctgcccacttcttttcccggtggctgggaaggttacattcaaacagaaacagacgccatgaaacttccttatctgctgctagctatgctactcattgttattgccatcatctttatcttctccaaattacctaaaatcaaagaaggaaatacgatggaaggagtagaatataaaggagaaaaattaattgatttcggagtcttaaaacgttctcatcttcgttggggagttattgcacaattcttctacaatggtggtcagacagccattaacagtttatttctagtctactgttgtacctatgcagaactacctgaaaatacagccaccacctttttcggtctttatatgctggcttttttggcaggaagatggacaggcacactactcatggtaaaattccgtccacaagacatgctattggtatatgcgctgattaatgtcttgctatgtattgttgtggtttgttttggcggttggacaggtctttatgccatgctgggcatctcttttttcatgtctatcatgtatcccactcagttctcgctcgctttgactgatttaggcaacaacaccaaaagtggctcggcatttctagttatggccatcgttggaaatgcttgcttaccccaactcacagcttatatgatgcatctgaacgaacatatctatcatatagcctatactattcctatgatttgtttcctgttttgcgcctattatggctggaaaggatacaaagtgattgattaaactgattaaaaataaataaaaaatgaaagcaattcaaattaccgctccttccgaaatgaaggtagtagacatcgagaaaccggtcttggaaccgggagaagttcttgtgaaaattaaatacgtcggtttttgcggctcggacttgaatacattcttaggccgtaacccaatggtaaagttgcccgttattcctggacatgaagtaggagctgtcatagaagctgtgggcaaggatgtgccggattctttaaaacccggcatgagcgttacagttaatccctataccaattgcggtaaatgtgcttcctgtcgtaacggcagagtaaatgcctgtgaacataatgaaactttaggggttcagcgcaacggagccatgtgtgaatatatcgcattgccttggagtaaaataatcccggcccatcgaattcctcctcgtgactgtgcactgatcgaaccgatgagcgtaggctttcatgcggtttccagggcacaagttacagatattgatatagtgatggtcattggttgcggaatgatcggtatgggagctattgtacgttcagctcttcgcggagctaccgttatcgctgtagacctggacgacgagaaattggaacttgccaaacggataggtgctcaccataccatcaattccatgacagaaaatgtacatgaatgcctgacaaagattacggaaggactcggtcctgatgtagtcattgaagctgtcggcagtcctgcaacctatgttatggccgtcaatgaagtcggatttaccgggagagtggtatgtatagggtatgcaaaatcagaagtttcttttcaaactaaatattttgtccagaaagaacttgatatccgcggatcacgtaatgcattgcccacagatttcagagcagttatccgctacatggaacaaggtacttgcccaaaagatgaattgatcagcaaagtagtcaagcccgaagcagcaatacaggccatgaaagaatgggcggcagctcccggaaaagtattccgtatactagtcgaatttgactaaccacatctatacaattacccaaaatgtgctcaaagtgatcgttttctacttcgagcacattctcttttttgattaaatcctacttgattggataatatcaattaatatcggacggaacccgctaacgaaacactctactgctattaccatcagaataagtcccatcaagcgcatcatcacgttatttccagtttcaccaagaatagaaaccaaccgggtagaagcccgcaatataagataggtgataaaataaatcaaaccaattattccgatcagaattcccttcatggtccaagtatttgcatcatccattaacattattccgttagctatagcaccgggaccgcaaagcataggaatagataacggggtaattgaaatatcattggcatacgttttaatttcttcatctttcaacttcgtattagtaaaacgtgcctgcaacatatcatacccaatcttcaaaataataaaaccggcagcaatacgaaagccattggtcgatattccaaagaatttgaataaaaattgcccggaaaaagtaaaagccagaagtgtaataaaggaaatgatagtagcacgtttcacaatatgacgccgttcttcattatccattcctttagtcatagtcaaaaatacaggcatggttcccaacgggttggttaatgtgaaaaaagaagtaaagcatagtaatgcaaatggtaataatgtatccattgacgtattatttttaggttatgggcaaaagtaatccataattgggagatgagcaatagtagaggtcacatttcacacgtgcgtatacaaaaaaaagcctccggaacttcttcaagtccggaggcttcaatcaaaacggcggctacctactctcccactgtgacgcagtaccatcggcgt

SEQ ID NO: 3924 - DNA, 37192 bp, Unknown
  gut microbiota DNA sequence
tattttttagagacatttactgaatatccctaaaataaaggcataactccttatcggttatgccgtatcaaattcataaattcctcacgtgttttagcctggttaaacgcaccagtgaaatcagaagtagtagtaatggcattttgtttctccaccccgcgcatctgcatgcacatgtgcttggcttcgaccactaccatcactcccagcggattcaaggtttcctgaatacattcttttatttgcagtgtcatacgttcctgtacctgcaaccgatgagaaaacacatccactacccgggcaatcttactcaaaccggtgatataaccattgggaatataagcaacatgtgcctttccataaaacggaagcatatggtgttcgcacaaagagaagaaatcaatatctttcacgataaccatctgactatactcttctttgaatttagctcccaacaaaatggcatgcggatcttgttcataaccgcgtgtcaatgtcagcatagctttggctacgcgctcaggagttttcagcaatccttctctttctacatcttcacccaatagggataaaatactctgataatggcctttcaactgttcaattttctctgctgaccattcgggatgcaatagttcttccatgttattagtccaggggaatattaatttgttcacgaacaatagatacttctttaaaaacaccggtagccttcagacggcgcatggcggcatccgcttcctcaatactgcggaaatcacctacacgacacagccaacgaggaggctggaaataggcatagacaggcatatcgggaaactcctctttcaccttggcagccacattattagcttcattacgagccacccgcgaattgtttcctgcatagacctgaacccgataccctctggctttcaacattttctgctcacctcccgtaacatttcctgtatagatactaccaatcaagcctgttattttaggatcttgacggatggttacagtaccttctccggcacggttacgctgcaagctttctactatgttctgctgtgccaaagcggaaagtccgagactcaaaaagagtaggataaaaatgtatctcatgtcgttttatgaatttaagtaaatcatcacagattactcagatttccacagacgattttatgattctttatctgtgtaagcttgagtaatctgtgatgaaattaattatttgaatgcatcgataatacctttgaagtcaacaactttcaaagcagcaccaccaatcaagccaccgtctacgtcagggttagcaaacaattctttagcattagaaggcttgcagcttccaccataaaggattgaagtattatcagcaacttctttaccatacttgtcggcaatcaaagaacggataaacgcgtggatttcctgagcctgttcagcagtagcagtcttacctgtaccaatagcccaaaccggttcgtaagccaagataatcttactaaaatcttcggcagacaaagagaataccgatgccaactgagcagcaactacttcattttgtttgttagcttcacgctcttccaatacctcaccgatgcagaagataggcttcaagttattagccaaagccaatttaactttttcttccaggatttccacagtttcgtgatagtaagcacgacgttccgagtgacccagaattacatattcagcacctgtagaagctaccatttcagcagaaacctcaccggtatatgcacctgatactttatctgcacagttttctgcacctacaccaattacagccttgtcaacaataggagtaacagaagccaagtgaataaacggagtacagattaccacatcacaattaggtttgtcagcagccaaagcttcattcaattcttttgccagagcaataccttcctgaaggttcttgttcattttccagtttcctgcaacaatgttttttctcattttgtttgttttattaaagggttaatgaaattattttgttcgattctctttcaatttctttttcctatgaaaatgctcccaaatgacatccaccatgctgaaaaacaacaacggaaagacaaaccatgccaataccagcaccactttatgactgaaagtcttttcattgatttgtgccaaaggcagtttttccagcctgtcggtcagcacatattcatcgggcagactattcacactccacttgtttataaccactccgttcttcagcaacatcagtccgggattagagcgtatcatggttttcagtgtaatgtcatccatcaggcagaaaggatactcggctcccgtacgctcctgccagtcttcaatatcactatcgggtgatgaggtaagacaatagaattgatatccatgctccacactataatcatacagttcatttatcaggtcaatggtactatcatccgcctggctcagctgatgcgccaccaacagaaaggtataattatcatcatccagtacttcatcggttatatcttccccgtcttcttgacgaataatggaaaagtcatgaataggcggttcgtatccttgttccttcaccatcgttttggaatccacaaaagtccatgtgctatcaggataattttctaatgtaaactctttctccactccatctttttgaagaataaaacgggtctcataaacagtaggcttctctccttccggaatttccatccctttacgtatatctgccccgatatgataagggcggaaatcaaagacaggcaactcacggtagcaatacaaagtcatccccgaaatatagagaaacgtatacatagccaccaaccaatcgaaacgcttggtcaccaaaggagttatacggtttccccatttaaaaacggacaccgccgctatcaacaaaagtacattcttcccaaaagtttcccaattagtcaaagtcacagcatcaccgaaacatccacaatccgatatcggattggaaagagccaaccataaggtgagcggagtcatcacccccatgataagcacaacaaacaaggtggtcattctcctgcggataccaaacaaaagatatactcctaaacaaaactcgaccattgcctgcaatacagacgccagaaacggaagaaaggcaggcaccgaagcagcccaaccgaaaacctccaaataatcctgaattttatattgggtacccagcggatctaccgctttgacaaaaccggaaaatataaatactgccgccagcaaaaaacggcaggcgtttgtccagattccaatgatactatgtaactgtttactctccaaattccaacttgatcaatccgaatacagaataattaatcatatccatatagttggcatcaatgccctctgataccaatgtagctccatcgtgaccttcaatctgcttggtacgatagattttcatcaaaatcaaatcagtatacgaactgacacgcatgctgcgccacgcttcgtcataatcatgatttttggccaacatcagttccaaagcctgtttggcataccggtcatacaattccaaagcacgctcttcagtcatgtcatccgtttcagcatatcccagttccaattgaaccaagccgattattccataatttacaatagcgataaactccgaacggataccttcatccaccatcgccacccctttggtttcaatgctacgaatacggtttgccttgataaatatctgatcggtaacagatgaagggcgcatgatacgccatgctgcaccgtaatcgtgcagttttttcgcaaacaaatcacggcaaatagctatcacatgttcaaattgttgtttcgtatctttcatcacactctatgattaggcggcaaagttacgcatttttctgcttaagcgtaaacaaaaaggcggaaaagaatactctttcccgccctattttatatttcttaattaactaaagcttaagaacatcttaacacttgtcccggacgaagaatagttctgcgggtaatgtggttcaacttgcataaagcatcaatagatgtacctgttttctgtgcaatgcggctcaatgtatccccacttcttaccttatggtaacggatagtaccatctgatgaagcaagcaaattcacattcttactattagtcctgttacgctggtatctgttattaccttttctgaacaaataagaatcggctacaatatcctgtttctcaaaatcaaataacaatgccggattaatggcctgtcccaagaaacgcgtttcaaaatgaagatgtgacccggtggaacgtccggtgtttccacccaatccgataggttctcctgcttctacgtactggttctcatccacaatctgctttgacaagtgaccatatactgtttccaatccattctcgtgacgaatcaccacatattttccatatccgcggcgttcatacttcaccatacgtacctttccactgaaagctgcacgaatcgtatcacctatatatacttttatatccaatccattgtgcatacgacgacgacggggaccaaatttagaagttatttttgtgtgttctgtcggcatacggaaaccggtcatatcaatacggaatgtatcaggaatagtaacagtattaccataagcgtgtacacgctcgttactccaattagggtagagactatatgcaggataagctgacttttccgcctttatctgacgaatcaatgcaacagaatctactgctttcaattttcggtcgataggtgcctggcgtgccaacagatcctgtcctgacacattcaggctaaccagggcgaaggctgccgctgcgactactttaacacatttcaaaatcatccgtttttttaggtttttctttttaatattcgtcattagcataaagggaaccgaacacggcttgcttatactcgaatatctcttctggtttaaaaaatcgtttaagttccacttcagcggtttccggcgaatcggaagcatgaactatattctcttgaaagctcatgctgtaatctccacggatagtaccgggagccgccagacgtccgttagtaggaccggttaatgttctcactacttggacagcgtccacaccttcaaagcagcatacaataacaggacaaaccatcattgcatctttcactcgctgaaagaacggctttgaactcaaatgagcgtaatgttcgctaagcacttcatccgtcaactgaaccattttcattccggctaaacgcaggccttttctttcaaatctattaataatctcacccaccaagcccctctgcagagtgcaaggtttcaaaataaccagcgttttttccatcataatattgggttcatttaaggtttatactgtgctttttccaaaaattcttccaaagataaagattttccttgagaaagaaggagcttctttaactctttttgtatgtaagttatatacaatgcttcgataaaatgttcagaaacctctataaataaaggggaaacaccacaaatatgttatgcaacatatatccttgcttttaacaatgcagtaacataaactaagagatagccgcccaatttatatttgttttacgcaatgcttgcaattgctgccaaagaatagcattttccggatgagttcctgcagggtcttcatctacaatacgatttgccacatcacggacatattgcaataattgaccgtcacgggcaatatcggctatcttcaagtcaaaagcgacaccactctgctgggttccctccaagtcaccaggaccgcgcaacttcaaatcggcttccgctatctcgaaaccatcattggtctgtaccattatttcaagccgcttgcgagtttcttcggtcagtttgtaagtggtgaccaaaatacaataagactgatcagctccacgtcccacacgcccacgcaactgatgcaattgtgaaagtccgaaacgttcggcgttttcaatgaccatcaccgaggcattcgggacattcaccccgacctcaatcactgtagtggccaccataatctgggtttcaccactaacgaaacgctgcatctcagcatccttctccgccggtttcatcttaccatgcaccttgctgacctggcaatcgggaaattccgcacaaatcagttcatacccctcttccagattcttgatatccattttttcactctcctttatcaaaggataaacaatatagatttgccgcccttcttctatctgtttgcgaatggaagcataaagactggcacggcgattgtcaaactgatggatagtctggatgggtttacggcccggcggcaattcgtcaataactgatacatcaagatcaccatacagtgtcatagccaaggtacggggaataggggtagccgtcatgaccagcacatgaggcggacaaacattcttgctccataacttggcacgctgagccactccgaaacgatgttgctcgtctataatcaccattcctaaagaagaaaagcccacagtatcttccaaaacggcatgcgtgcctataagaatctgaacatcccccgtcagcaaatccttcaatatcttctcacgcttctttcctttgacagatcccattaaaagttccacgcgcacatccatgccaaacaggaatttccgaatggtttcataatgttgggcggcaagaatctctgtaggagccatcatacatgcctgatagccattatccagtgcgataagcatggacatcaaggccaccaatgttttcccacttcccacgtcaccttgcagcaaacggttcatctgccgtccgcttcccatatcttttcttatctcctttatcacccgtttttgcgctccggtcagttcaaaaggaagattctgtgaataaaaagtattaaagatctcacccacccgttcaaaacgcaggccccgatatttacgctgcctgtctttactgtaacgtagaatattgagctgcacatagaacagctcttcaaacttcaaacgatattgggccttccgcagcaattcgggattcttggggaaatgaatattacggatggcctcatccaaagacattaaatgatgctcctccactaaccgagggggcaatgtttcagcaagaggttcctgtagcagggcaagcgcattcttcatcaacttctccagcccatgagagttcaagaaaccgcgcttcatcctttccgttgtgttataataaggctgcaaccccatcgtagataaggtaagttcgcctgaaggatccatatcgggatgagccacattgatacggccattgaatacggtcggtttaccaaagacaatatactctgtcctggtcttataatgctctagcagatatttaattccttgaaaccaaactaaatcaatgatgcccgtaccatcagaaaaatgaccgacaagtctgcgctgtcttccctcacctaaagtctcaaaactgaggatttcgcctttcaactggatataaggcatatttccgtctatttcatggatataataaaggcggctgcggtctacatatttatatggaaaatagtacaacaaatcatgcaaggaaaaaagattcaattccttgttcaagacggttgcacgctgcgggcctactccttgcaaatattttatgtcacgcgtagtgatatcgaacatttcaaattaagacttccgctattttcaaatcaaaaggggtggttaatttaatattttctctatttccctgcaccagacagacctccctgcccatcgcctccactacagaagcatcatcagtaaaggcatccgtatattcctgttgatatgcctctttcaacagctgcacttcaaagacctgaggagtctgaaccagtttatagtcattacgcggaaccgtttcacttcccggcttcgtaagatgacgcacggtttccaccacatcaattacaggaataaccgcttgcttagtctgcgctgcctcataacatccggctatcacttcccgggaaacaaaaggacgcacgccatcatgaacacctaccaagccttctcccttcacgtatgccaacccattctttacagaatggaaacgagtttcgcccccatcggcaatatcatgacgcaaagcaaaatgatacgtttcacaaagatctttccagtaagcctgctggctcaccggaagaactaatataatatgtatagaagaatcaaaagcgtaaaaagcctctatggtacgcatcaacacaggtttgccccctacaggcaaaaactgtttgggaatatcccctcccatacgcaaccctttgcctcctgcaactataatgacatgcctgttcattctgcaatcatcatcccttgcttcaattctgtcaccttttccgcaccgacatatttctcggcaatggcaaatgagaatgccatagcggcaccggggcctttaccggtaataaaattaccgtctttctctaccaaagcggccgtatactcagcaccttccagatacttttcgaatcccggatagcaagttactttcttacctttcaacaaaccacgctttccatataccaacggagcggcacagatggcagacaacggacgtccggcttcagcaaatgtcataatcaacttgcccaaaccttcgtgagcatccagatttgtcgctccgggcagaccaccaggcaatacaatcatctccgcatccccttcttttacttcttcaaacaccatatcggctactaccggaacaccatgcgcaccgtttacggtcagcacacctgttacggaaacagtcttcacaggcaaacctgcacgtctcaacacatctaccggggtcagcgcctccacttcctcgaagccttctgccaaaaatacataaattgttttcataagctacttcagtttaaagtaatatgtaatagtacctgtctggttattcactccgtccacttggttaaagcgtgctttacgggcggcctcttccgccgccttccgcaacgaagcgtttactgtattggtacgtttgttgatactggtacttatcacctgtcctgcgggatttacggtaatagtcactaccacccgtccctcatcctgcacattatagacaggcatcggcaaaccgccactacccaaagaacgtccgttgaggtcaaatgttccgtaaccgcccactccgccggacttcccttccgaagagtttcccgtcggactgccctccagaccggagcctgtggtaccggttcctttatttcccatttgagttcccttgccaaaagcaccggctatcttcttcgccgccgcttccgctgccgccctttcggcagccgctttcttctcagccgccgctttttctgcttcagcgcgtttctcggcctcagtcttctctttcggcttcaccgcctcctttttcggtacgtcctttttaggagtttccttcttgggtttttcttttttaggggtttcttttttaggttcctttttagggactgccaccgtttcctcttctgtctgcgtgatgatttcctctttcgcttcaacgggaggaaccgtttccggttcagatacatcgggagccggagcctcaggctcattcattatatctatatccgtcagcgtataagggtcggcattcccttgagaaagctctgtatttcccagcataacaggaacacccccctcttcctgaacctgcggacggcggatagcaatcaccagcagcaggataaggagaagtatatgcagtacagccgtaccaatcagtcctgttatcttatttttcttcatgcttacagcttaacgtttcttctcaggcggacgtgtagccaacaccatcttgaagtgattttcattagcaatattcagtacccttactatttcgcggtaaggcacagcctcatccgcataaagagccacatacatatcgggttccttctcggcacacctttgcaggaatgcgggcagttcttccaagtctatcggcatttcatcctcattgccgaaagcagtatagaagttcaggttcttgtcaatgattaccctcgtaagcggctttgccgaagtctgctgcctgccttgcggaagcaataccttgatggcattgggcgacaccatggtagaggtaatcatgaagaatatcagcaacaggaatatgatgtctgtcatagacgccatactgaagttaggtgatattttatgtcttcttttcagtgccatacgctattacttttgaacgggttcgttcagtaaatccatgaagtccatggtacgcgcttccatttgacttaccaccttgtccacacgggttaccagataattataggcaaacatagccgcaatacccacaaccagaccacccacagtagtaatcatcgcttcataaatacctcctgaaagcaacgtgatatcaatgttgttcccggcattggacatttcccaaaaagcctgcaccataccggttacagtaccaaggaaaccaatcatcggagcaccgccggcaatagtcgccacaacaggcagtccgttctccagttttgccacttctatattgccggaattttcgatagcagcctgcacatcggcaacaggacgtcccatacgggtaatacctttctcaatcatacgggcagaaggagtattggtgatgcggcaatagtttatagccgactttatctcacccgtgcggatataatcacgaatacgttccataaacaaaggatcatccttccccgccttgcggataaccgccatgcgttcaaagaaaatataaaaacagacgacagacaacaatgccagcacaagcatgatccatccacctttcatcgccatatcccaaagattcatccgagcctcctctgaaacgggagtcaatacgggattacccccggcaagggtatccgccaaagccgcctgtgcagccagtaaagtgatattcatcatgaacgaagacaatttttatattcttcaatagtttgttttaatcccatataaagcgcatcgcttatcaatgcatgaccgatagacacctcgtccagccaaggaatatgcgtatgcatatatttcagattcaccagactaaggtcatgacctgcattcagccccattcccaggctacgtgtcaccttcgccgcttctataaaaggagcaatggccgcttcgggattccgagggtacatcgtagcgtatggttccgtataaagttccacccggtcggctcccgctttggcggcatattctatcatctccttgtccgtaccgacaaagatagaggtgcggatacctgcctggccgaacgtatccatcagttcggtaaggaaagaaagattggtcttggtatcccatccggcattagacgtaatctgatcgggcgcatcgggcaccaacgttacttgatgaggtttcactttcagcaccagatcaacgaactccggtgagggatacccttcaatgttaaactctgtggtaagcagcggacgaagttcgtacacatcgctgcggcggatatgccgttcatcgggacggggatgtacagtgataccttccgcaccaaacgcctcacagtccaaggctactttcaccacgtccggattgttgcctccccgggcattacgcaaggtggctaccttgtttatatttacacttaactttgtcatcttggcaatatattattatctttgcagttctgatgtgcaaagttagcaggttttattaaaacctggtccattttgacaaacaaaagatttataaaattaactaatgaatatacgcccaatgaaattcgcccttttcggaaacacttatcaagccaagaaatcggctcatgtggaacgtttgctatccattctatcacaacataacgctgaagttcacatctgccgggagttctacgagtttctgacggacgacctcaagataagcatccgtcacgccggtgttttcgatggaaataattttgaagccgacatgatactaagtatcggaggcgacggcactttcctgaaagccgccagccgtgtgggttcacgcaacattcccatactaggtatcaacaccggacgattaggttttctggctgatgtttctcctgaagagatggaagacacattcaatgacatctacaatggaaactaccggatagaagaccgcagcgtattgcaagtatcctgcaaagaacaggaactgaaaggttaccctttcggtctgaatgagatagcggtactgaagcgtgacagttcttccatgatttccatccacacagccatcaatggagcctatctcaccacctaccaggcggacgggctggtcatcgccactcctaccggttctacagcctattcgctgagcatcgggggacctgtcatcgtgccacacagcaacaccatcgccatcactccggtagcaccgcatagcctgaatgtacgccccattgtcatcaacgacgactgggaaatcacattggatatagagagccgcagccacaatttcctgattgccatcgacggacgtagcgaaacttgccgtgaaggaagccggctcactatccgcaaagccgactataaaataaatgtagtaaaacgaaacagccatatctttttcaacacactccgcaataaaatgatgtggggagccgatggtagaggatgacattacaatccatcctcaaaatagtttaaatagtggttatcaaggttatacaaaacctttttatatctaacaaatttcttttttcaaatactatgattatatttgtgccacaaataaaaaaatcagaccatacgatagatcggtaaaacgcacaaaaacattacacggcatatgaaaggcacaatacaaaaatggaaactcgtgatacttctggatgcattactgttcttaagtaacatgacctttgctaaagacacaatcaatcaatatacagagggaaaccctatagacacaacagcggtttccatttcagacaaaaccaacatccccgaccggctttatgtagattccctgtcattgaaacgtcattttatccaccgtatcggcattgaggcacgtcccggatatattttccccaccagttcctttttcagaggagaaaatctgaattggaaacccatagagaattccctgtcgcttcacttgaagtactcattccagtttcatccgaacacctataacgaccgtatttacagaggggcctaccaaggtattggcgtgggctactacaatatgtatgagaagccgcaattgggcaacccgcttactgtctatttatttcaaggagcgcgtattgcccgtttcaaccaacgattgtcattaaactatgaatggaatttcggcgcttcatttggctggaaaccataccacagcgatttgaatccatataataaagtgataggttcgaaagtaaacgcctatctgaatacaaacttctatttcaactggatgctttctcccaaatttgatttcacaacaggtgtggcagtaacgcatttctctaacggtaataccaaattcccgaatgcgggactcaattccatcggactaaaggtaggattggtttacaatatcaatagaaaagaagaatgttttgcaaagcccttgtatcaatcacccgtacctaaatttccccgtcatatcagttatgacctggtattgttcggttcatggcgcagaaaaggagtaacgattggagaggggcaaatggttgcttctcctgaaacttatccggtactgggatttaatttcgcgccaatgtataatttcgggtataaattccgtgcgggtatttcattagacggggtttatgacggcagtgcgaatgtgtatagcccggacggatacggcgatgagctcctcaagccgtctgccggcaaacaactggcactgggagtttcgggacgtgccgagtacgtgatgccttacttcacagtaggaataggattgggtacaaatgtgattcatgcaggcggagatttaaaatctttctaccagatattggcactgaagatagaagttacgcgcaactcattccttcatatcggatataatttacaggatttccatgatcccaactatctgatgctgggattcggattcaggttcaataataagtatcccacttttcacagacggtaaatgctacgtctaatttgcacagacacattctacaaaatatactaaaattatcggaatatatatcgcaaacaagctacatgtttgtggaatgatacaatcatatttgtttaccattaaaaccgaatctgtttatcccaaagctagacctttttgggggaacttcggcatttttaccggacagctataaaatcaaacaagatattcctataccaagaatctgcaaatcctgctacaagattccgaaaaacttgctacaagaattgcgacatcttgcgacaagttttcaaagtctttccaccttctttttgatatgcgtatccatcttttgaagagaaatacccctctcttgaagaatgcccccaaaaatccttcagaagtttcagcctctccgcaaacgtcctgttcatcggcattccggctgacagattgatgcaccgagatccttcaaccgcgtagttctttctttcagccgtagtcaataaatgtataaaggtaaatccgaataccgatagaaaaccaaccaatacgacatcgcttaccctgtcacgctgaaagatctttttcggctgaaggattttatcgtgtatatccttcagccgaaaagccgatgaacaggacgtttgcggagaagctgaaacttctgaaagaaaaacaaggtattttgccatgttatgcaatacgagtagaaaagcatcaaaaacatcctgttgtttttgaaaaagctcctgttcttttttaaaaagctcttgatctttttaaaaaacgtccttgtctttgatatggaatttccggtgtaatcgtacagttataacattaatacaaaatcccatcaaaaacaccggtccgattctcataagtaataagtaaaaacagtattcaatatggagacaaaaatcatatttttccctcacttatgcctgtaacgcctctgttcctaaaaacacatcagacatagcgcatcagtcatcccccaacgggacagccgagaaactcttatattccctggtctgccccatcacaaccacaggattctcaaaggtttcatatatgctcaatactgaagaactgatcctgtcaatctgccagtagcagtaatccagaagaagatatctgttattgggagtgataaaatcatatcggaaataatgtacatgctcttccacttcctcgccatcacacgtcgtccgtgatttacaggaagccttaccattcagcccgaactcataatgttcacagacttccgcatccctgccatcctcagtacgtatctgaaatgttctctcccatgcataaccggtcagattggtaacaatggtattgctatcctccccgtaatgttcatcaatacaacctgcaagaaacagtacacatataactgtcgagcccaataatccaattaatgtttttttcatagtccgtcacttttttattttattgtcatctgtaatggagtacaatccttatattggtcccatcacctgcaccttgctccttccgcttccggtcttcaccacctgcacctgcgcagggatacgttccatcatctccgccacatgggaaatcacccctatcttacgcccttgcatctgcaaccgctccaaagcatccatcgcaatgcgcagagtgtccatatccagcgatccgaaaccttcgtcaataaacaacgattccacattcatccggttggaggacaaggaagacaagcccaatgccaaggcgagagataccaagaaagattccccgcccgaaagggaatggacactacgcacctcacccatcatatcaagatccacaatctgcaaggccagcgtatcagggatgcgttgcagttcgtaacggggggcaaggtcttgcaaatgcctgttggcataaagcaaaaggacatcaagcgtataaccttgggctatttccttaaacttggcgccagtctgggaaccgaacagttcgttcagtttcgcccaattctcgtagatagagtttttttcctccaactctttctcgatgccggctatgcgttccttaccttttatatggttctgtatcgtcacctctatttgggccaaacgtccggtttccatttctttagcagcagtgcaggcagtcaatgtttcaatcagcgactccttgttttccgtggtatccggtttcagaggagcttgctgatgctcctcccttttctgccttcgctccgcaaggatcgcctgaagagtggtttccttctctttcagtgtgcccaacgcttgtttctcagccagtatccagcttttgtctttggaaagcaattgttccaactcggcatacgtttccttttgaagcgtgagccactcgtttattttcaattcgtcttgttgcaagacagcagtcagacggactaattccttttccatctgtgcggtctgccctttgtaagattccgcctgcacagttaaagaatgatgcaagttcatggctttttccagttgttgttccagttccttttgccgtcttgcatgggttgcaaccactgtttcggtggattcaccattcagcagggaagaccgcagacgagcacgttcgttcaattctgcctgctgtctttcttctttttgtttcttttcttcgtacaaaccaatggcattggcttcttcttttttcaaactatctctttgggctgattttgaggtaagagcctcttttatttcggtctgctcttgcaaacgggcattccattgcctgccgaattgctggacataatgtttcaatgtgccctgctccaacaaatctttccaattgggaataatggatacgtatgtttctacttttttcagcgtatcatcaacttgcgccacataattttcaatcaatgcagaaagacgggccatctccagttggcgggcattcagcgtgtttttcagttgttccgtttctttagcaacctgttctttcgcacggttcagttcctcttcctgcaaggattggacattggtctgttccctcatcggatgatggaaactcccgcaaaccggacatggctttccttcctccaactgctcacgaagcaacagcacctctgccggcaacagtcggttcagacgctcggcttcctgttgtaccgatttcaaccgctgttcctccgcttcactcgctttctttactttatccagcagttgacggttcgatacgctttgcgcccttgccatttccagattggtaagcaagctggtaatcagttcaacggcaggaatcaattgggaataagcggtatatcgttcaaaccaggtttgcaaggcggtttgcttctccatcaacaaacttatatccttctctgtcttacaaacggattgatgcagattatctttagcctgcaatgccaaagccgcttctttctgactttccgctaattgctttctattttccaccaactgcacatccaatgctctggctttatccaattgcggttcttgctgcgacaaataggtcttaaattccgccagttctttctgagcggcttcccactgcacgttcgcggaagtctgtaaagccgcattctgccggatggcaacctctatttcgcctaaccgggaacgaccggcatctatctgcttccgggcgttacgctgttccatatacacatcgcggatatcctgagcctgctctatacgggccaacagttcataacgtggacgggcggcttctatttcttttctgatgccggaaagtgattcttccgcctgtatgcatcctgtattcaagcgtccttcttcttccagccatttcaacttgccggacaacgcctcctctttcttcttcgaaacggacaagcggacttgtaattcttccttttcagccgaaagttgctgtaattgctcatctgtcagcaactcaatgcctttgatacgctcctgcaataatttatattcgctttccgcccgcttggtgcgttcatagatggaagcagagatacgcgagtaaatttccgttccggtcagtttttccaagatttcggctttatcaggctgacgagccttcaggaaggtagcaaaatctccttgagccagcaacacagagcggttgaactgttcgaaagagagtccgatcagttcactgatgcgggataataattcggtcttcgtcccttgctgttccactccggaggtaaggttggtcaacgtcatttccactttttgcaaggaaccgctaaccttcccacgcgaacgtcgcaccgtccaacgtgaacggaacacctctcctgtcaaagcgacgaaatccacttccgaatacccctcggcagtaccccggcgaaggatggaacggctatcgttctgtgcaattcctctgtcggcaacatccatgacagagacgttattctctttcgccttgttcatacgtggcgtacagtcaaacaaagccagacacaaagcatccagcaaggttgattttccggctccggtactgcctgtaatggcgaatatacctgccgagcacaaaggttcgacggtaaagtctatcataaattcaccttccaatgaagccagattctttcctcttatcgctactattttcatactcctgcctccttgattacactttccagcaattgtttcatggtatcgggcatctccgtccctccatatttccgtttaaagacatccagtgccatatccagcggacggatggtttgcaactcctcgtaggaagtggcgacaatgccgcttgcctttttttgtggaagcatagcggcgatgcgtgccaggcggactgcttttcctttcaacgcttcctctatcttatacttataagaaggttccggctcggtcatcaaaatctttatttccagatagggcgaccgcaacgtgacatccccatcgggcaaatcgccgatggcttgcagcacttcttccagcggacgggcctgacgaggaatactcatcacgccggctagcggttcaaatgccaatctctctatgccggtaccctcagcacttatcgttatcatgaccactcccgaagcattgttcctctcagcaaaagacatgggcataggagttccggaataacgcacattctcccgatgggacacacgctgggagcgatgcagatgccccaatgcagtataggcgatagcctcatcaaaagcatcgggggatacacattccaagcctccgataacggtacgttccgaacggtcgtcctccgagatttccgagccggtggcttgcagatgtcccatggcgataacgggaagtcctttctccttcacttcattgaaaagctgctcataaagcagttggactccttttgagtaattttcagccgaaggataatccccctgacgcagataggggacggcaaggcaataggcggtcacttccccttctgtgtaaagggggacaatcaggtgttgcaagtctatatcaccttccgcattgcggcgcacgacaccgcgaacggtgacattcatatcctccaacaggggattgggagcctccaaacgggctgccgagtcatgatttccggcaatgatgataatttgcaaagaagggttttcggacgtaacttctcttagaaaacgataatacattcgttgtgattccgccgaagggttcgggctgtcgaatacatcacctgctatcaacaatacatctatttcatgctgtcttatctgctgtttcagccattctagaaaatggagatgctcttcccgccggtcgtattcataaaaagtctggcccagatgccagtctgctgtatggagaattttcattagctgttcggtttgtttcctgcaaaaataggaaaactaaatgaaaaaaggtatttcttttaggtacaacctctaaatgaaaactatttttcatgcagaaaacaagcagacatgccaccttttcgctatctttgccatacgagataaataataagaagaaaggagaacgtcatgagtacaatcacattggaatcaatacaaaacgaactgattcgggaaatcttggacatcaagaatgtaaaggtgttggagtctgtaaggaagactcttgttcatgctaaaaaggaaatggaatctgtttctaccatggtggcagaggatgaagaaccctacatgaccaaaagtgaaataatggacgggctgtccgaggcttgcaaagacatcaaactgatgcgtgaaggaaagctgaaaggccgtcccatagaagaattgctcaatgaactataaaatcaaagtatatcgccacttcgaaaaagaagttaagaaactttccaagcgatataaatcattgaagcaagacttgacaattttagccgcagaactcatgcagaaccctgacatgggtactgatttaggcaatggcctacacaaagtacgcatgagtatagcatcaaaaggaaaagggaaaagaggtggagcaagagtgatcactctcatcgccactctatccaaagaagaaaaagagattggcttacatttcatttatgataaatcagagcgtgagaatatcactgataaagagttacaagcggtcttgaaagacaacggaattatctgaaaagacgaaccggtcatgccaactgaggcatggccggttcgtatatctatcatcattcagccaccagccgcacctcataaatatgcggagtcactttctcatttcctttaccgatctttatctccagttgctcattggattgcatagatgcaggtacatcaaatatcccaaccgatacatccgaaaccggtttaccagccaatcgtcctacttcctgcccgtttatccatacttttgcatccttacgaatctcggaacggaaccggatacgcactttattgacctgctttccgttcgtcttcatacgataactgaaccaaccggccgcctcacgccagtgaatcccttcatcatcccccgtacgggaattctccatccggatgaaatggtcgctttccggttgttgttccccacaaatcactttatcggcggtcataccatccaatgcggcacgctccttttcctcttttgccaactgttcctgccttgcctgcaactcctgtacggacagcacaggccaatagaccatataccggcactcatataaacggaaaaacggttccacagtcataccctcatagcgttcgggataaactccggacaatgtaaatgtcaacggcttaccttccacttttttcagatgagaaagaagattgttcttatcccccacaatgacaggcatcgtttgtaaaggcagacgcggtccggcagcaatgtgtccgccacgactgtcatcggcaaacatgccatcctgattttgcttgcccaaccgggcggccagcacaatcggtccgtataagatggaatagttggcagaaccatccggcagtgcaatggcacgcaaatgcatcggcagttccagccttactttgtcaccttttgaccaagtacggttcaggctaacatatccctctttgaccgttacgttctgccgtttaccattaacagacaagcgtaatgcttccggcttcgtccattcgggaatacggaaaagaagggtaaattctttctttcccttttccggagaaataacaagagtactcccctcctcatcgggaaaagccgtctgttgctcaatttgggtatctccccagcgcaaggtagacggaatgaaaagattgacatacagattattatccttgtgtccataaatcatttcaccataacgggcatgattttccatccccgatcccacacaacaccagaaactggtctgaggctgcgaatagaccctgtaatgaccggcacgcatcggggtaaaataaacaaatccgccttgcacaggatcttgcgtggaaaggatatggttataaagcgcccgttcgtaataatccataaaatgaacgtccgcactcgtttcatacagcatttttgtaaggcggagcatattgtaggtgttacaagtctcaggcccctgctcgctggtgagcatactgctgaaatcatcagccggatgaaaatgctcacgcacactgttacctccgatggtgatgcttcgatggtttaccactgtttcccagaaatagcgggcggcctcgctccaatctcggttgccttccaaatcggcaatacgtttgaaacctatcactttcggtatttgggtattggcgtgcataccagtcagtttatcctcctgtctcaacaaaggctgcaacacggtgtgatgagaaaattggtgagccagtttcaagtagcgtttgtcgccggtgatagcggccacatcggcaaatgtttcgttcagccctccatgttcgctgcgcagcatatcctgtatctgttcatcgctcaacttggataccagacgaatcatccagtccgtgagtttcaccaacatttcctttgcctcccggctatcggtctgaagagttgcatcacgaaggccggcatatattttatgaatattgtaaagaggaacccagcggtcgttcaatccgaaaccggacgcgcgaatgtttccttcctctatttctttccacattttgcgcccgtttggaactccacacagataaccgtcaccggcggcatcctggcagcgtttcagttcacttatcatataatccagacgcgccttgatctccttatttcccgtagcggcatacatataggaaagggccgataaataatgtccgccaatatgaccgtccagccctgtattttcccaattggtataattttcggctttaggggaaagaccagcttccttcaaataaggagctaacagacggtcggggtctattcccagcagataacggatatccatatcctctgcgtgtttgaaagggctggcggtgagccgcacatccctgactggaaaactttctacttttgcgggtagctgagcatgcaaagctacagaagctatagcaaaaacggaagtggataaaatggttttaagtaaattcatagtattatcactcttatgtatttttatgattcaaagatacaactattcggctgttccggcaaaacaagtttcagccagaacaaccgaatcaataaaaagaatgctatatgtcaataaccgaaaccggttgcttttacatacaccttataatctttaatcatgccgggagctccctgttccgcacgtggcagaatacggaaaccggtcacgttatattctttgccgagatctatcaccacctgatgaggataagccgtattatctaccgtctgccagaaagtactttcttgcaggtcataaatcttgtcggctgtgcggttaccgctacgggtttcctcgctgtcggcataaacaatcttccagttttcacgagagattttctctcctttctcatccaacacatcaaactccgcaatggcggcaatgttggtattatcaaaagaagacagcccttccagacagaagtaacgtcctttcgtaacaggaactttcacttcttgccaaccgttacctggtttgaaagtaccggcagataccggtgtttccttctccagtttgatggtctgcccctgtttacgatgcgtttcaggaacagccacacgaagcatatccaggataggtttgttcaatccgacaatggttgcctctttcgggcctttcaagtcaagaacgatgatttcattcactccttttttcagccaacaacccggcatgaacagggtttgttgaggaccgatttcccagaaacgtcccatggcatgaccgttcacccataccataccttttccccaagactccatgttcaggaatgtatcagccaccttatccaaggtaaaagtagcgcgatagtaggccggaacactttcatcatttttctctatgccacaggcggcagacgagttcatatcctgaaagttccgggaagatacaaattcataatctacgggaagattataaacagtccagcctttcaacgtttcagcattcttaccgttcaccagttccactttctcggtaattcccttgcggtcgtgaatggacttgtcaaagttcacacgccccatggcttccaccaataaatcaagctgtgtaccggcttttaatgcaggcagtgtaagttcctgttctccaccacggcgatccagacgccccaacagtttcccgtcggcaaaaacctgtgtccagtcatgctgttcggtgattttcagaacggttcccgctttcacatcttccggcaaatgggtacggtacaggatacttccccagccttggtcaaatttctccatcggctggatttcctctgtctgcttcggttcggacagattgtcaaccaacggagctatttgagtgaatttaatggcagggatttccataaccggtaaagcttcaggaacttcaggcaatgtctgtccttcgtccaagtagtccttcaacatatcacgtaaagcaaaatacttgtcggtggtccagcctgcttcgctgataggagcgtcatagtcatagctgctgcacatagccgagtaagccggattattggcaccaccccaccagccaaaggtcgttcctccgtgggtcatgtacaaactgaaagaaatacctttgtccatcatctctttcaggccatccaccatgatttgtccgtcacgggtttcgtgcttgcgcccccagtgatcaaaccatccgctccagaactcgctgcacatcaacggagcgtcgggacgtacttctttcagtttggcaaactgcttgtcgatatcagctcccgtaccaaaatttatagtccaaagcaaatcatccaaaccattattcaggaaattagaactccagtcacattggaacaaaggcacttcagtaaagcctgcggcacgtaccgtatcacggatggcagacacatagggcttgtccgtgccatacgaaccatattcgttttccacctgcaccatgatgatgttaccaccacgggtaatctgcaaatcctgcaactgcttgcccacttcatgcataaaggctcccacgtgctgcatatagaaaggatcgagagtacgaagctgcacgctgtcgttcttcagcagccaccaaggcagcccacccatttcccattccgcacatacatacggaccgggacgcacaatgacgtacataccatgcttctgagccaatttacagaaagctgcaatatctttattacctgtaaaatcatacttaccgggagtttcctcatgcaaattccaaaaaacatacagacaaagcgtattcatgcccaatgctttacacatttcaatacgatgttcccagtattcacggggaatacgcggataatgcacctctgccgctttgaccacgaacggtttcccattcagcagaaaggtattcttacccgcttcgaatgtcccgggcttattgccggcacatcctgccagcagcaggaccgccagcaacaaagtcagtaattttttcatgtttatttatctattattatttttcattcttatttatccggattaccgtaaatgaataagccggcaattcatacccgaatttctcgcttacctctattgtaccggatacaggacgaacctgttggtctgtcggttttcctgccaaaaccgtctttacggcagtggtgttcattccttccaaagaggggagctccacttgcgcattcaccgctaccggcagcagattcaccagtttcacgatcatatttcctgtctttccgtcgcgaactaccgacacgcctatccgtttcttcaccgcatcttgtgcattatccaaagtcacggaagaagcgatgtattcactgcccgcattttgtccgtacatctgctgcgcatagtaacctacggtgggttttacctccgtattattgaaataaatcaaatccggattccactgggtatgtccctccttagccagtaacggagcgtaagaagtcatggtcaccacatcggcattacgctccacggaagtcaggtacaaggcctcggccaaagctgtttctatattgttgggacgtcccggcaaatgagccgcatactctcccaaatacactttcgccttgttacggtcataacggtcatagaaatcctgattgttgataaaccatcccggggtgttataataatgttcgtccaccatcggaatacccatcttagtggcgaatttccagccttcctcataatcactgccctcatagaacggacctaccgttccgataacggtcacttcgggatatttctccttcaccgcattgaaaatcatggtgaaacgttcttcaaagatatcggtaatcaaatcctcgttaccaataccgatgtacttcagattgaaaggtttgggatgtccggcttgcgcacgcttctttccccacacggtcttcttcgcatctccattcgcatattctatcaaatccagtacatcctgcacgtactgcggcatttcctccatcgggattccgccttgctgaccgccgcaacccagttcgcctaccgagtgatgactgcaagtacccgaattctgacaaggcactccggctgccactacaggaacaggttcggcccccatatcctcgcagaacaaaaaatattcatgatatcccagaccgcgggtctgatgatacccccacaaattgcgcagaggcttgcgttcctccaacgctcctatagagcctttccaatcataaatattgtccacaccatctccgtgagccacacatccgccggggaaacggacaaaacggggatgaaggtccgccaaagtctgtgccaaatcggcgcgcagcccgttcttcctgcctttaaatgtattctgtgggaaaagagaaaccatatccaaggcatacttcccagccatctgcggacaaacggacaacacggcatccgcagcatccgccgttgccgtcagtacagccttttgttttttccactctgtagatgaaacccgaatagcagcctgcgcaatctccttgccatctttggtagtcagcctcacaagcacttttccacctttcgtatcatccagcactttggaaaacacagagaagtcatacttctcaccttttttcacggcaataccgtcaaaaccgttattcaccaaggcagcacccgggcggtgtacctccaacactgcataatgagcattgttagcatggatgggactgtcctcactgacagacagttccgcatcagtaccctgtatactccacgcatacgtgctgttccagttcttatctcttgcaccgtctttggcagaatattcaaaatcacggttctgaaccagctccgcataaagtccaccatcggctccataattgatatcctcaaagaaaatacctatcagatgctcactaataggcttcacccgtccggcatccacccggatggtggcagtgaccggtttcagtccggcaaagcggacggcatcctgttcggtacgctcattattctgtatatcgcggaatttcttatgctcagcaaaacgaatcaactgttctatatccgcataaggtactttctgcatataaccgttcaaggtatctttatcaaggacaatctgccgggcagtgaccagtcggggcacggcaggcttctccgcattgacatattgttgaggagcccacttcaacaagtcggaagaatgggaagtaccccatacttttccgctgggggtaagctgccaccggcaataccaacgtccatcttccgctttttccagaagaggtttaatcattctcttttccgccccccaacgcccgaaatcacatttcagataggcaaagccgtcggatacactcagccacttgtcgccatcgggactccatgcgaatttcagtccgctgcgtccctcgtcttccggatgggcgtaagagaagatgtagaccgaatcgggctcattatatactttttccacggcagcacagacggattggcctgctgccaatgaggcgattgccagagataataaggtctttttcatggtatatgctttattgtcatgtttcttttataacgtgggaacaaccttcctgatggttccatccggattaaattccatacggtctatacatacttcacgatgcacgccaggacccttctcacgatctataaagttcttattaatacgatgatatacaatgtaccactcatccgtacccggaatttgtaggactgcattgtgcgcaggtccatagatttcctttgcaggatcctgaatcagtaccaccggtttcttagcaacctttataggacctagcggagatttcgacgtaccgtatgccacatgatagttgggcgaaccggtatcatccaccgaccacataaagtagtaaagaccattacgatagaacacatatgccgcttcacggaaagcgtaatctttcagacttcctcctttcggtgtcaatacggtcaaggtattctttttgatggaaaccatatcctcattcagttcggcgcccgccatataaccattgccccagtacagataggattttcccgaaaccggatcggtaaacacatccacatcaatctgctgtccgtggcccacgggagattcagtaataatgggatgtcccaagtctttgaacggaccaatgggtgaatcggctaccgccaccccaatctgcttgccgcctccggctacaggattaccactgaaatagaagaaatatttataatactttccatccaccattttctcttcaatgcacggagcccatgcgtttccatccgcccatgccacctgatcggatttcaaatcaagcatcaccccttcatctttccagtccttcagattatccgaagagaagacactgaaataccatccgccccatccgggctgtccgtcggtggtggaatagatataatattttttagtctgatgagaatacaatatctcggggtcagcatggaaaccttgcagcacgggattgttgggaatcgtcatattgcccatttcctttgaaggccatttgtcggtgatgcgcttcaactcggcacgggtaatggggatgatagttccgtgacgcggatgaaaattcatcttcacctcactgtctatcactttaaagtttttcaaatcggtcgtttcggtaaactggtatttacctttcatatagacatcatacatcaagatgtatttattctgacctatcagtttgaaagttcccgcaccttccaccgcttccggggtctgctgcttgtagtcgggttcttcctcccattgtcccgaagtcagtgaacgggtagttgctacccggatgccgtttccatgtccttcggttttataaaacaggtggtagattccatctttatatacgatatcaccgtctatgcaagatttcttgttttcagggatgaaaagcggtttcggttcaccttccaggtcggtaaattctttattggcataagcataataaatcacatctgccccatcaccatatttcattgaccaataaaccaagtattttccggcttccgcatcgaagatagtctgaggagcccatacccgtttcagtttttcctggccggcataacatttctgcatattgatgacagaatggttccagttcaccaagtctgtagatttcaacaacaccatggcacgattggaatcccatccattgtcagaaaccatatcggtaaccaccatatagaatgtctttccgtcttcgcaacgcaggatatgcggatcgcgcacaccaccggtagaactgatgattttggaatcaatgacaggtttgttgtcattcagtgcccaataggtatatccgtccgtacttaccgcatagcatacggcttcctcgctgatgtggttacctgtaaaataggtaaagagataagctatgtaatctttttcggctacattgttttgtttggaaataatctgctgcgcccctgccatccaaggtagcaaacaggcaaataaggtgataaaaaatttgtttttcatataattagtcctgaatttgtttgatgcaaagatatagtataggaacctattttcaggtatataaatctttcaaaagagggactttattcggtcaaatggaggaaaaatggaagtttatgaaagactggcatagaaaaaaacaaaaagttcttccctattaaactacagtttcagtaaaagaaaaaagcaaaagaatcagctacacaataaattctgattattcattataaatgataactattagcgaaatatattcagttttcatcacaccttttgagaaagatacaaaaataatccttagaaaggacatatttaacatttctatccatatgaatttcattgtttgatttctcaagcaatatgtaccattctacttcctcgctagatacaaaataacaagaataacccacaaaaaactacagcaggttagtcataacctgtaatttattaagaataacaaaaaaaaataaaagaaaagatagcgttatattcttataaaataatacatttgcagcaactgaaatagaaagggaataagatccctaaaccaaactatttactaatttaaccttattaatctatgcaattctaccagaaaagaagggaaaattgtgtaaagacacacgtaattttgaaaaaagcctctttttatgcgtgtcttacactatttgccggaatggctttcccaatgcctttgtgggcttcgcagtcaactgccatcgtgcaacagcatgtcaaacaaattacaggtatcgtaaatgatacaagcggagctcctgtaatcggtgccaatgtagtagaagtgggaagcaccaacggtactattacagatgtggatggcaaattcacattaaatgtatccgtaggggctaaactgaaagtttcgtatatcggttacaacgaccaacaaattaccgtaggcaacagcaacagttacaccattatcttgaaagaagatacagaatctttagatgaagtggtagtagtaggatacggtactcaaaaaaaagtaaacctgacaggttctgtggcaaccatctcatccgataagctagtcaaccgcaccagtgccaatgtcaccaacatgctggcaggacaaatgccaggtgtcaccattatccaaaataccggtcagccgggagctgatgccggagtactgcgtgtgcgtggtctaggaactatgggagatgccagtgccatggttgtggtggatggggtagaatctaccatgagcagcgtggaccccaacgatattgaaaacatctctatattaaaagatgcagccgcctcagccatttatggtgtacgtgctgccaatggcgttatccttatcacaaccaaaaagggaaccaaaggacgtaccattgtatcatacgatggatatgtaggctggcaaagtgcctcacgtatgcccaaatttttggattcttacaattatgcagtgctgatgaatgaagcttacaccaatgacggtttgaaaggtccgtatgacgaaacagccctacaaaagttcaaagacggaagtgatcctgacttttatcccaattccgactggctgggtacgctattaagtgaaaacggcctgttcaacaaccatcacttgagtatcaaaggcggtggagacaaagtaacttactcgctggcattcaactatcatgataaagacggattgatagtcaataccaactacaacaagttcaatgtacgtgccaacattgacgctcagataaacagtcgtctgaaactgactacaaatatggcggtataccgcagtaatatgactgctccggcggcaggtatcagcaacctgatgcactatgctttccgtgagactccggttactcccatccaattgagcaacggcaactatgctttattcaaaaacgagcacaactccgtagcctatgcacgtgaaggaggaacctacaaagagataaacagcaatttccaaggtaacgtaggaatggaactggacatcatagacggactgaaactgagaggagtcgccgcctcgactttcaacctgaccgacaatcccacccacgtcaatactatgacattctatcaggcaggttcagacacaccggtaaagaaaaccactaactccatcacagaatatgacatcaaaagtatggaactgaacttgcaagcttatctggactataataaaaccttcggcaaacacacaataggagccttattaggttactcacaaatttataaacagacacgctatctgcaagcttaccgtaagaacctgcccaactccaactcactggaccagatcaacgccggtgaagtgacaggacagacaacatacggtacagaaatagaatacgccctccgctcagctttcggacgcgtgaattattcatacgatgaccgctatctgctagaagccaacctgcgttatgacggcacttcacgcttccccaagaacaaccgcttcggcgcattcccctctttctccatcggatggagaatctcggaagaagagttcttcaaagccgattgggtggataatttgaaactacgtgcatcatggggattgctaggtaatcaggaaaccgtaaactcggacaacagttctaactattatccgtatcagaacacctatctgttcggttatgactatagtttcggcaacactttgactccgggtatttccatttccaacccgatggctaaccaagatattacgtgggagaaaaccgatcaatggaacgtaggtgtggacgccgcttttttgggcaataaactgacattgggcgcagactggttccgcaaggaaacacgggacatattactgcaacttccagttcccaacatgatgggagtcagcgctccgatgcaaaatgccggcgtagtgcgtaataccggtatcgaactgcaactgggacataacaaccgtatcaatgattggagctattctatcggagccaatttcagctatgtaactaccaaaatcatggatttgaaaggcggtgacacaccggggcaatccgtaggcgacccactgtgggcatattacggctacgtatgcgacggcatcttccaaaacgaagaagagatcaagaatcatcctacacagagcatgggtactccggttccgggtgacttaaaataccgtgacctgaacggagacaaagtagtagacagcaaagaccggcaagtattgggttcctacttcccgaaaatcaacttcggtctgaatctttcagttcaatataaagacttcgacctaagtgcactgctgcaaggtgcagctgatgtaaagagtgctcctgtagctgaaatcagatatgccttctacaatggcggtaaagtaacggaacagcatctggaccgttggactccggaaaacccgaatgccacttatccccgattatccatgagtgactccaaaaaccgcgtgacttccagtttctggatgcaggatgcctcttatgccaagctgagaaacctgcaagtaggttacagcctgcccaaacagctgatatccaaatacggaatcagccgtctgagagtgtattgcagtatcgacaatctctttatgatttccggcttcgacggtgtagaccccgaagccatcagcggcaactattatccattgacccgaaattattccttcggtctgaatgtaacattctaaacactgacaactatgagactaaaatataactttataggattaatattggcatgcggccttggtctgagctcttgcaatgacagttttctggacagaaatcctaaagaccaattatccgatgcatctttctggaaaaacgcagaagatgcccagaaatttgcaaccggaatttatctgtatctgatagaaccggaaaaccatactatcatgacagactgctacacagataatgccattcctgtacatgtcacagccgaacagggacagttatctgctggtacggcaacttccagcaacccacatttcctacaattatggaaaaatgcctatcaatgcatccgcagatgcctggtattttacgaacatataggcgatgtgccgatggatgaaaaagaaaaagcgcaactgacagccgaagtacagtttctcgaagctttctcatacgctaacatattaaaatatatgggtggcgcctccctgctggatcatccgttggaactgaacgagaaacttccttcacgcagttctgaagaggagacttataatcatatagtaggattattggataaagcagcagccagcttgcccgatatccgcagcaacagtgaccacggaaaaccgagtgccggagcctgctacgcactgaaagccagagttgctttctacgcacacaaatatgatgtggcggaagccgccgcacgcaaagtaatgggcatgaatgtgtatggactgtatgataactatggtgacttgttccaacctgtagcagagttatgtaacgaaatcatctttgatcgcgaatatctagaaaacccgaaaaactccaatgaaggcagttatataggacagttcttcgctcccgtcatgatgggaggatgggaagctttatcacctactcaagacttgatagactcctatccatgcaaagatggcaaatcaatcaaagagtctcctttctataatccggaagacccgtttgccgaccgtgacccccgtctaggcttctctgtactgtggaacgggtcacaaatagcaggaaagactttcaacctgaacaatatgggagatggcagccatacccgtacaggatatagcatgaaaaagtatatcaatccggacaatgacggtatcaataattatgactggaccaactttatctatatccgctatgcagaagtgctgctgaccttcgccgaggctcgtaacgaaaatctgtctgctccggatacggaagtatatgatgcggtcaatcaaatccgtcagcgtcccagcgtaaatcttcctcctctgccttccggcttatccaaagatcaaatgcgcgaagctatccgtttggaacgtcgtttggaatttgctttcgagggaatgcacctgtttgatacccgtagctataaaacaactgaaaaggatgttactaaaccagtatacggggtaaatgcaaaaggagaaagcatttttattgaaacccgcaagttcaacgccaaccgtgactatctgtgggctatccccttggaagaggtagacctggctcagggtgcactgaaacagaatccgggttgggattaacccggtcatttatttggagggacagactcataaagctgtccctccaactctttctacacatctcttttcattgaaggcaaaagtaattacctttcctctcgaaaaaagataaagcactttcaaggaatatatggttttcccaccaccaatttatctctggaaaaatcgacttcaaacaagtgaggaatacgaatataacgcccgtttacatctttatgactatgtacagacatcaaccatttaccgtccaaggtctgaaacaacatcccatgaccgaaattgggaggagtaatcgggtctttctcctgtatccatggtccatccaaggttccgctttcagaataagccactccctgagtgtacacattataaatccaactagtccaaatcataccgagtctacctgttcctgtacggaacagatacggaccgtcagtgactttattcggtttgtccttgccatccgcatctttttcacggctccacggcgattcgctggcacggaacagcaatttcccttcgcctatggttccacttaagtcaggcttcagttctattttctctatcgtaccgtccaaggcttgcaaccattcataacaatataccatataaggctttccgtccttatccacccagaaagtcccatccaaggttggtttatcagcaggcaggtaagtggaatccttcatcggaacgtaaggtccgtccgggttatcgctcaccaaaacatgactggcacggcgctctattacattcccttgtaccgtatcaatcttcaccgcctgattggtgaaagtggcaaaataataatacttgcccttatacggatgtaactcggcagcccaaatcattggtttcggtcccatccacgaaccggaatcagtctttgccacatgaaacggtccttcccaaagtttcaaatccttgcttttccaaagcataccgccggttccggtcatataatacatagccgtcttcctgtctgccaaaatgcaagggtcactcagtacaatagaatccaaaggcacttccttccgtctttcctgctgacgttcttggcaagcagacaccagccacgaaagagaaaaacctaacaacaaaaacaatccaatctttttcatgcatattctattttaagtttcacaaattcgacattacaaatatacgaacctagaaaggtaatgaaaacagaaaggcacatttcctcacgaaatatgccttcaattctaacttaacctaacctaaaattctattatcacatcacagtatgttaaccttcttcctaaaaacctatctttaatacctattatctctttttaccgatagcaaagataaaaaatctgattgacaaccataggggtaaaatcgagcaagatggatgcaataatcagtcaagaacagactattgcactattttccatccttcagactattttcaacagggattactgaaagaaatccagtgtccagttgtccatccactccacgtatggaattccttccttgaattgaacaggtaaccaaatgtaacgggcatcactgggatgctccggacgccagatatccgccataaatataaaggcgtctttcttcccctccactttcagaatataagtgctctgtccgccaaacgtaagttccgacttaggtcccacacaagggttgggatgctgagaccacggtccgaagatggaagaagacgagaacatacgagcctcattgggagcccaaccggtacaaccggaagtgatcatccagtaggttccgtcttttttgaagatagcaggtgcctcattgtgtcctgccggagccacacgcacataattccctgtgtgtgaaagatagtcatcgctcaattccgctatttggagtgtgaggttttcttcggaagagtaaatatggtaggctttaccatcctcatctacatagggatattcagtaaatgtctctaaaaaataagatggcatatgaagatgatagggcatgaccatttcatatgccattcttattgtcattt

SEQ ID NO: 3925 - DNA, 5295 bp, Unknown
  gut microbiota DNA sequence
atgttcattcagttcactttccattcaatcacccctcccgaagctcctttctgcaattgtgctgcaattttaagcccctttgttttgacaggaagaagaagaaaataattatacacatatattactgcatattttattttaagcttggcatgtgaagatgttaatatgagtcacccggtattgttttatcgtaaacggataaaactaccatggacaacaccccactcccgaacgcaattcttatcttattatctatccatggacgacctgaccagcggattcaacatcggcaccaattacacgctgaatccacaattcaatgaaatgacaggattcacagaaaaagatgtacgggatatgctggagtattactccacaacatgcccattcaatcattcggtagacgagttgatagaactgattgcttttctacttcggaatgctgaccatcagcggaatgcataaaggagaaaccaaactcaccatccctaaccaggtggtacgtgaacaactctttgcctacattctggatacttatcatgaaaacgacttgactttcgacagttatgaaaagaggaagcttgtctcagggctggcttatgatggcaaatggaaaccttactttgaatacattgccggatgcctgcaccgttatgcctcgcagcaggacaagcagaaaggtgaatattttgttcatggttttactcttgccataaccgcacaaaatcctttctatcgtcctgtgtccgagaaagacagtcaggaaggatacgtcaacctgttcttgcatccgttattggatatttacaaagacatgagccactcctacatcatcgaactgaaatatgccaaaggaaaagacagtagcgaacggatagaacaattaaggcgacaagccattgaacaagctgaacgctacgcttcgagcgagtctgtgcagaaagcgataagtcctaccatgctacataaaatcattgttgtataccgaggcatggaaatggttgtttgcgaagaattgtaatcgataagaggcagtgtctgcccttacaatggaagcattcattcgtccgttctatccacgttttcatcgaaagtacaaaattgttcatttgtaattacaaagataagatgccattttttcgatgatttttcgtatcagtttcttctgcatcagcacattaccattccaaatcatgaacagtatattactgtaaatcaacgatatactgtgtaaatagattctaagtccccttgaaacggtttgccattctccgctgtcaaattcggcttgacgtatacaggttgttttaattcctgtgccatagctgtggtcgcttccttgcaagagagcatagctgtggcatattttgtctggctgcgttcgttgcttcgcctaggtgaagaggcgatttcactttagtgaacagccattttcactagggtggaatagttgcttcacttaggtggaatatcaaacggaacggagtgaagatacgatagaaacaggttcttattacatacgcaacaaggttcaatagccgaaacaaacagtatcctgtcagatatgaactatgatgcccacgagtagccgggaggcagtgaggggctgactctacatcttgtccgctggtattcccgaatgcgagcattcccaaaaacggatttgtttccccaccgacataccaattgaaggggatttgagagacttttacaccggaagtgattagtaatgtgcattttactgtgacagagcgtttttgtgctttatgtatatccttatgctaaaaccgaaatttaagtaagaataatctatcagaggctttgtttcttcttattacgaataacagacatatcacttttatcagttcgaaggaatccctgtcctgtttctgttaaggaaagctgccaatgtattcctgctcactttcaatttcctcgccatctccgccttactggttcccgcctccagcatagccttaattttttcttcttttcccgtaagtttatatttcgagttatgtcctcccatgggacgtcccaacttttgtccggaggcgattctgcgtgcaagtccctcacgggtacgttgggaaatcaagtcgcgttctatttgtgcggaaagggaaaaagcgaatgccaatatttgagattgtatattatttcccagctcatatttctctttcaccgtgagcaggatgacatttttcaacatacatgcattcagtatactcattacttccatcaatcttcttcccaaacgagagatctccgacacaatcaatgtatcccctttctttattcttttcaatagtacgccaagctttctgtctttggctgaccgtgttcctgaaaccgtttcttccacccacacatcaatttggaaatccctttgtttggcaaaacgatttatctcgaaccgctggttctctacagtctgtttatcagttgaaacccgaatatacgcatatatcatagctgcatcattaagttttttattgaataaggaacgccaatctaatttatattatcagagaaggaaagtttcaccggatcttattgaggttttctaagaagaattaagtatctccaactattcaagctcaaaaaacagacaaatctgcttaatccttgcctttacaagataaaacgattgtccaatagaatgaaaaaattgtctataatgatagtataaatcactgataatcaatgttgttatattaaaaatggattgatcatctttaagacgattttcgcagtataatagatttttcttttatctacttaatggtttgttcacttactttgcatctgttgacatagttgatactgaaataaaaaacacagatatagtatgaaaaacaaattgcaaatagtatggagcagcattgctataataagtgtatgcgcatgtagcacaccttatacacaacctgatgctcctatcaaagaagttcctttcacccaagttcatttagatgataatttctggtcaccgcggattgaaaccaaccgcaccgtttccatcccatccgctttcaaagaatgtgaaaagaacggccgattcgataactttgccattgcgggtggtctgatgaaaggcgagcatcgcggtgacttttctttcgacgataccgatccctataaaattatagaaggagcttcctactcgctggccgtaaaatatgacgggaaactggatcattatctggacagtgtaatccatatcatagctgccgcacaggaaccggatggttatcttactacttgtgtaaccaatcaatgtacccgtttatccggttggtggggcacgcaccgttgggaaaaaatcaacagccacgaactctataacagcggccatttgtacgaagccgccgttgctcattatcgcgccaccggaaaacgtacattattggatgtggctatcaaaaatgccgatctggtatgtcaggtcttcggacccggcgaagggcagatccatcgtcccagcggtcatcctatcgccgagatggctcttgtcaaactatataaggtgacaggcgatgagaaatatttgcagacggccaagtattttgtagaagaaaccggcagaggaacagacggacataaactgagcgaatacagtcaggatcacaagcccatcctgcaacaagacgagatagtaggtcatgccgtccgtgccggatatctctactccggagtggcagatgtagccgctttgactcatgatacagcctatttcaatgccttaacccgtatttgggaaaatatggccggcaaaaaactctttatcacaggcggaatcggttcccgcccacaaggtgaaggattcggtccgaactatgaactgaataatcacacagcctattgcgaaacctgcgcctctatagccaatgtgtattggaatcatcgtatgtttctcgctacgggagatgccaaatatacggatgtgctggaacgtgcgttgtataacggagtcatttcgggcgtatcactcagcggtgacaagttcttctatgacaatccgttggaatccatggggcagcatgagcgccagcactggttcggatgtgcctgctgtccgggcaacataacccgtttcatggcttcagtaccttattatatgtatgccactcaaggcaatgatgtgtatgtcaatctctttatccaaagcaaggcggatattgaaacggaaagtaataaaataaatgtggaacaaactacaggatatccgtgggacggaaagataagtattgccgtcactcccgaaaaagaacaggagtttgctttgcgtgtgcgtatccccggatgggcgcaagatgctcccgtacccacagatctctactcatttacagacaaggctcaggcttatagcatttctgtaaacggctccaaagtcaatgcgaagcaatatgatggttatgccacccttgtacgcaactggaaagcgggtgatgtggttgaaatcaatcttcctatggaggtacgtcgtgtgaaagcaaatgaccaagtagaggatgaccgtggcaaactggctatagaacggggtcctattatgttctgtttggaaggacaagaccaagccgacagtactgtattcaacaaattcatccccgacggtactccgatggaggcttcttacgatgccggtttgttgaatggcgtaatggtgctgagcggtacagctaaagaaattgacaggaatggtaaggtaaaagatgttcccttcaaagcaattccttattctacatggaacaaccgcggtgccgaccagatggctgtatggattcccgaagcggccgagtatgcccgccccactccggaagctactattgccagcaaagcacgtactctgatgatacaggctcctatacagaaagatgctcccgaatcggcttcggtggaaacatgggcatggggggtaaatgaccaatgggaacctaaacgctcatcggatatctcgaaaccttaccactattggtggctgaagaacggtactgtcgaaacactggcttatgaattcgaccagccttataccgtatcgaacgtacaagtgtattggttggattttgaccattatgacggggatttccgtgtgccggaaagctggaaactatattataaagaaggcgaaagttggaaagaggtagaggcgttgactgaatatactgtaaaaaaagattgctataatagtttggatttcaaacctgtcaaaacaaaggggcttaaaattgcagcacaattgcagaaaggagcttcgggaggggtgattgaatggaaagtgaactgaatgaacat

SEQ ID NO: 3926 - DNA, 9816 bp, Unknown
  gut microbiota DNA sequence
aataaggattttctcatatctttatgtattttatatagttaatttctctttaagttagggagtgataatactccctaacttaaagagaaggatttattgatttggattttatcaatttgtgttgactattatttcagatattctggtgtttgtacaatattagaattagcattaatttctttttgaggaataggtaatattgtacgataatagtttctgtcgaaatccatagatgttttttcgtcagcgaaatgcactacctctttcatcatatcgtctgtttcgttaatacgaattactcgtaagttattacgtaataagtcaaacatgcggtgcccttcaccaatgagttctttcctgcgttcttctagaacatcatcaagggtaacctttgcgggcatcgtatagtccggatttcctcggagtgcaatggctttcaggtattttgcagcttttgttgcatctccgtttttcacggctgcttcggctgcatttaagtaagtttcggaaagacgtactataggaatattggcatccataatattttctccaggttgtggttgatacttattcaaatacattacttttttgtcttgattaactaataacttaatgcgtacatcattaggcgtttctaacagatggtgataaaaactgactgtaatgcacatatcttgatatccttttggagaagttagatatcccatactttcattgccggggctttcggtagtagtattgactatttcgaagagaatttctcccggatttgcttcggaggcttccgtaccccatacagtgggatattcttcggtattccataattggtatttattggcttccgatccttttattgcttcttctgcagcttgtaaagcttcactgttcttccccatatacagatatgcccgacttaacaaagttaatgtggcccatttactgattttacctttcttatttaaggataaatctttttgattcaaactagtacctgaccatgaatatgtgggtatcattaaactagccgcattctttaagtctttgattatttgatcataacattcagctacagtgttacgtgaaggtttactgtcggcagtggctgatgctgaagtgatgataggtactcctaaagaggctccgttatcttttaaataagtatatccgaagaagcgcgtaaggtcaaaaagggccagaccacgtattgctaatgcttgtccttccaaatcattgcggaagatatgctcatcttcatcgtttggaagaatttcgatattgtcaatgccgtctaaaattacattacagttttgaatgatggaataaagatatgaccagtgtgtacttggtccatttgcaggtaaccaatccatttggtaatagtgagctgttctacaagttgattgtacagcttgcatgtcatctcctgttacatctccgtagtagattaaacgcccggaatacgcataggcattacgcattgtcgcataaatggcgtttagtgaataatcaatgtcggagagagatttgatactcgtttctgttggaatttgtgtggacggttctaaatccaaccaatcgtttccacatgaagtaaacaatccgatggataagactattgataaaaaattatgtaatgttctcatattgttgttttttagtggttaaaaattgatgttgagaccaaaagtaacggtttttaaaggcggtgtggtttgagttgcactaccggcactaacagcttcaggatcataattgtcataggccgcccatgtccataaattgcttgctgatgcataaaaacgaacatttcctatattgattttatttgtccattctttaggtaacgtaatgccgaatgtgatattttttaagcggaaataatcagtactgtggatacggcggctacttgttattttatgcattgatacagaagatgatttacccggcatatatacttctatattggtttgatcacctggctttttccagctatcacgataataagtcggaatgtttgcataggaatcgtaaccgccatgttctgtcttttgtgcccaagtatcataagaatatcctccgaattgataggagaataagaaatttaaatcaagccatttataacgcaatgaattagagatacctccgttaacagttggttctgcatgtttataaggaatgaattgtgcatttttagagttctcggtaatttcttttatataatttccgttctcatccaattcattggtatagaatagaggatttcctgtttcaggattgatgcccgcaaattcttgtacatagaatgtacgataagaacttcctactttgtgtatttgggttccactgacaatttgtgtctgttcgccatctaattttacaactttattggagttatgacctaaattgaaagttgtattccagttaaagtcttttattttaatattagtggaattaatagttaattcaatacctttatttttcacttcacctatattcattaaataactactaaatcctgttgtcatggatacaggacagtccattaataagtttttagttgtacgggtataatattcaatcgtgaagttcagacgatcccaaaaaccaaaatccaagccaatattcatattataattggtttcccatttcagattaggatttgcaatttgggacatttgaataccgggttgctccaagtaaccaccactaatggagcttaatcccatatagccgaaataatcagaaggaagagtaccgtttacaccgtatgatgctcttatacgcaagtctgtcaaccaatcttttacaggttgcataaattcttcttcaatagtacgccatgctccggatacagaccaaaatgttccccaacgattgtcacggtgcaaacgtgaactgccatcaacacgaaaactagctcctagataatatttatttttgtaatcgtaattcaaacggcttaaataggataccagtctgtaccttgaatcacttccccctacagatactgttttcattccattactaatggcatgtttgtcgggagttgtaaaattgtaagcttcccctgataaatagtcattgtaggtatcatcaatttcatatccggcaagaaagtccaaatgatgaatgttgttgaaagtagttaaatagcttaaggtgttactccataccatttttttatattctcttatgcgttttactacttctccattttcatcttcaccgttggaagtacgtgggtcataccatttctcaccttttacagtagtgtaatcataactgaatgttgttttgaatttcagattttttatgatttcgtattcggcataaagcgtattgaatgcgcgtagcattttttcatgtttataatcgtattcagctgataatttggggttgcggtcattggctttacgaataaatttacgattccaactgccatcttcattgtagaccggatctgaaggagtagcccaattacgtgaggaatagaaaggagatgtataagtgaatccttcgtcataaacactctgatttacatttgagaaaagtatcttggcgcctacagtcaatttgtctgttgcactgaaatctgcgttcaaacgccctgttacacgttccaaaccggaaccttgtacaataccgttctgcttcatatatgataaagaagagtaatatttaaatttatcgctgccaccggctagtgatgcttcataggtagaatgatgtcccttttggaaaagctctttattccagtctgtgaaaccacaccatggaattggagcatatttatcgatttgcccatctgcataagttttactttgtgacattagctcttcctctgatatattaggatttttatcagctagtttacgttgttgatataatatcaatccattgtaaatatattcacgtcgttcttctccccccataactgggcgataatccattgcgaaatcattgctaccccagtctgcttttaatgaaatttgtgcttttccgctttttcctttcttggtggagattaaaataactccatttgcagcacgtgaaccataaagggaggctgctgcagcatcttttattactgtaatattttcaatatccgagttgtttaatgtagacattatgtcaaatccggagtcggagctggtagcagcaacagaaccggattggacgggaacaccatcgattacgtatagtggagaattgcttgcattgaaagaacccataccacgaatacggatagaagtggaggcaccaggctgacctgaactggaagtgacttgtactccgggagcattaccttctagcaaactggagaatgaaactacgggtaaatcttttaattctcctgtcttcacagtagaagcagaacctgcgtatgccgatttcttgaaagtaccataaccggtaacaaccacttcttccataacattattatcaggagccatgactactttcagtatctttccggcagtggcttttatttcctgcttgccataacctatataggagataatcaaagtggcaggtatacggtctacatctaatgagaagtgcccgtccaaatctgtagtagttccattcgtagtacctttgactaagatattcgctccaataataggttctcccgtctcatccagtactgtaccggttaatgttgttttctgttgaggaacagcagactttttttcttcaatttgcttgatagcaataacgccgttgtgaactgaataggtcaaaccgctattcataagacatttatcaagcacattggctattttttcgttatttacatttaggttttggacttttatttgttttacatcattggtgctgtatacaaaagtaaagtcggtttgtctttggatttcccaaagaatttcactcaacgtggcattcttgaatgaggctgtgacagtggcttgtgcaaacactttgttggcagcctgcataaaacctgtggtaatgatacagaaaaataggaacgtaatccacaaacgtttactacttttaccgtgattggtgtagttgtgttttttgtccataatacatcatttttattagttatagaatgtgattgttttgttattgacttttacgtgtactttttgagtctcttccaacaaacgtacaaatggagtgatttccgaataccgatctacattgcatccaaagcgtaggtcttttattttctcattggcaaaaattacttccatgtcataccagcgtgatagtattttcatgatatcttccaatcgctggtctttgaaatgaatttttccttttatccatgaaatataaaatccggcatctaccatgcgtatctgtatgctgctgtttccgaggctgatggtagcttgctgggaaggctttaaaatacagctttctccagtttctgtatttactttgacagaaccgtttaccaaagttgtctgatactcttcctgtggataagcagagatgttgaatgtggttcccaacacttctacttgcatgccttgagtgcatactataaatggttgccctgttttgcagacttcaaaataggcctcgccttccagttccactttgcgtggaccgttatcaaatgtcacaggaaagcggagactggtcattgcgttcagatgcacttttgttccatcacttaacaatagagcatattctccacctcgtggagtttccactttattatatacaggcttgttttttggggctgtttttgatgttacttggtaattcagcattgtagagtccatgtggactcgggctccgtctattttctcaagcagactctctgtttctttatttatatggattgtctggccgtcctccaatgtcagaatagcttgggattccccaggtagaatggattgtgcgatgaactgtttgtccgaaagagaaacgggcgaggtgaatttcatggaaatacttacaaaaaggacaggtaacagaatgattgcggcataacttactattttgatatatctgcttctgttattatttcttttgattcgcttttccacttctttccatccggatgaaggattgaatgccgtatttttccggaaatgttgcttttggttttcttcatcacaaattttcttgaataaaatctcgtgcgctgtagattcttctctccaagcagttagttttattgtttcttccggggttatttcttccgacagataccttgctatgaggttggctatatagaaatcttgttttatcatattttgacctgttttttatctcttttataataaaacaggtctgtttgaaatttgggtgaataataaaacgactttttttgaaaaaaaacaaattaatgtctttttatataaagaacaagaggaagtaatagtagtctttcaaattctctctgagtttcttgtaggctattttctttaatgtatggactgtttctgtagatatgtttagtctgtctgctatttctgcgttttttttcccttccagagatagttgcataatggctttcatttggtcaggtaatttatttatggcttcagaaacgatacgataagtttcctcttcaacgattgcatcgtgaaaaaaggaatcctttttcttttcgatgacattttgagcgtattcatatactacttttgaatgctccagttcgttgagtgctttattgcgtacagctgtatataaaaatgcttttacctgatgcagataaaaaaaatcttctcttatttgccatagtttggcaaatgaatcttgtacaatatctgctgaagtttcttggttttctgtatattgattggcaaataagcatagagttacataatatttattgaaaatatcatgaaacccttgctcattaagcttaatacttatagttgtatgagaagttcccgctgccacctttgcttttaattttctctaattttagtgcgaatatagagaaaattaattaaaaatagcctcttattctattaaaatattattttaagtctactacagtaatacctgccccaccaaattgtacgtgttcatcttgatagtgtgctactcctggaacacttcccaaatagctgcgaatcagggtgcgtagtatgcctgtacctgttccgtgaaggatacgtacacggtctattcccaatagtatggcatcatcgataaaataagttactgcctgtatcgcttcatcgccacgcataccgcgtacatcaatatcttgtttgaaatttagtttcttttcatatacccgatcttgtgtttcactgctgacgaaggtactttttaccattgttttctgggtgggctgtattggtgtgctacgttccagcttatccagttttacattggtttttatcattccgaacataactattgcatttttgccattaattcctagtacttctccgacactggattgacctttgatctttacagtgctacttacagtgataggctgttctttgggtattgacagttgggaagattccgtcttggctttatcctttttgttttttttccgctcttgtttttcacggagtttttccattttccggatgatttcatcttccttgttctttttctcgatatcttctatctgatttttaaaatcagtcagttcctgacgtgccgattgtgtacgttctttgtcggcttgtgcttccttgatgatacggatggtattttcaattcgggcatttgattcctgtatcaatctttccgcatcttctttggcctttcgcaaaatctctttacgacttttctccagttcctgtagttcttcttcgtatttggcgatggtttcttccatctgtttttctcgtttgcggatgttctgacgcttggtttcccaataacgtttgtcacgtacgatatcttgtagatatttatcagcattgatatattcactccctacaatttcggatgcgtcggctattacttcttccggtaaacctattttcctagctatttctactgcaaatgaacttcccggatttcctatttgtaattggaataaagcttgcattaaatgcctgtcatataacatggcaccattaaccactccttcgtgatcttcggcaaaatgtttcaaattttgataatgagtggtgataacgccgaatgtgcccttttcattgaaacgtttcaacacagcttcagctatggctcctccaatttgtggttctgtacctccgccgaattcatcaatgaggataaggctgcgttcgttacagcttttcatcattgttttcatgttggtaaggtgtgaggagtaggtactcagatcgtcttcgatactttgttcgtcacctatgtctataaagatactgccgaataatccggcatggctacgttcatgcatcggaaccggcataccacattgtaacatatattgtagtaatcccacagtcttcagacaaacggatttacctccggcattcggtccggatataattagaatgcgttgatttttagttagttctatatctagaggaacaacctttttattatgcttggccagcgagagttgcaatagtgggtgtatggccatggtccagtccaaaatctgtttgtcttccaatgatggtttggtggcgttcgtctgaatggaaaaatgggctttggcacggatgaaatcaatttctgccaaaaattcgtatgactggaggatggcggggacctgtgggcggattatgatagagaaatctgtcaggatacggatgatttcccggcgttcttctccttccaattcccgtattctattgtttgcttccactacttcggccggttctatgaaaactgttttgccggtggatgattcatcgtgtacaattcccttgattttccgttttaatcccggtgcgacagggatgacgagtcttccgtcacgcatggtaggagttacatctttatcaacataaccttctgcttgagcgttgcgtagaattgcattcaaactgcgtgatatgcttccggctgtcgaggccaactctctgcggatgcgtaataattcggaagaagcattgtctttgatttttccgaatttgtctaagatgttgttaatacgcgtgatgagttgaggaaacacgataatatctcctgccagtttttgtagggcagggtagggggagttttcttgttcttcgtcattcggggtcagtgtcagaaaatggatgatatcacgaattgtttctaaagaacggcgtaaatcaaacagttcttgctcatccaaatacataccttctacgcggatacgttttagtgatggtcgtacatcaaaaaaatattggtcgggaaaactgtcttcctcttgtatgatgcgcatgaattccatcacctgttccagccattcattaatatccttaaaggattctgagaagttcatttcatctactctttcttgacctaatgtgctgagacatttctcttttagtaaatgacggatggaatcgaaacctattttctgttcgaaattctgagggtatatcatgatttatttctttcgtttattattcgtatgcaaaaatacgatttgaaaattttatagcaaaaaaactggtaaactatttgcttatttaaaataaagtcgtacctttgcagcgatttcaacggaaagtacttttgaaaaaagaagtcttggagaggtggcagagtggtcgattgcggcggtcttgaaaaccgttgtactgcgaggtacccggggttcgaatccctgtctctccgctggaaagaattacaaaacaaagaaaatcccctgtaaattaatactttacgggggattttttgtttttggtgcatggcaaataagcatatcacttgcaacggacttta

SEQ ID NO: 3927 - DNA, 6497 bp, Unknown
  gut microbiota DNA sequence
atataaaaaacaaattatggataacaagtatattggaattctgacttccggaggggatgcttcaggaatgaacgcggctatccgtgccgtgacccgcgccgccatttttaacggatttaaagtgaaaggaatttatagaggttacgaggggctgattgccggtgaagtgaaagaactcacgacggaagatgtaagtagcattatccagaggggaggcaccatactgaaaacagctcgctccgagactttcaccactcccgaaggacgcaagaaagcttataaggtcatacagaaagagaacatcaatgctttgataattatcggtggagacggttccctgacgggagcccgtatctttgcggaggagtatgatgtgacgtgcataggattgcccggcaccattgacaatgacctatatggtaccgattttaccataggatatgatacggcattgaacaccattgtggaatgcgtggataaaatcagggacacggcaacctcccatgaccgtatcttctttgtcgaagtgatggggcgtgatgcgggcttcctggcacaaaacagcgcaatagcttccggtgctgaagcggccatcatcccggaggacaggacggacgtggaccagttggaaacattcatcgggcgcggattcagaaagacgaaaaacagcagcatcgtaattgtgaccgaaagtcctgaaaacaagaatggaggtgccatatattacgccgaccgggtaaagaaggaatatcccgggtatgatgtcagggtttctatcctgggccatctgcaacggggtggtgctccgagtgccaatgaccgtatactggcaagccggctgggtgaagccgcaatccaggccttaatggaaggccagcgaaatgttatgataggcatacggaacaacgagattgtttatgttccttttgtccaggcaatcaaaaaggacaagcctattgacaaaagcctgatccgggtccttaacgaattatcgatctaaaataaccgttaatatgtcagaagttgctcctttaatatcggatcttgccataattctgattattgccggtattgtaaccgtcattttcaagtggctgaagcaaccggtcatattgggctacattgtagccggtattatggcgggtccttccgtttctctggtcccgactgtttccgatcctgccaatatcaaaatatgggcggacatcggtgtcatttttctgctgttcgcgatgggactggacttttcgttcaagaaattgataaatgtgggcattacggctatcgttgccactgtcactattgtatgtggcatgatgttcataggttatacagcggggaatgcaatggggttctcccacatgagcagtatttttctgggtggaatgttgtccatgtcgtccacggccatcgtattcaaggccttcaatgacatgggacttctccaacagaaattcactggcattgtcttggggattcttgttatcgaagatctggtggctgtagtgatgatggttgttctttccacgttggcggtaggcaaacattttgaagggaaggagatgctggaaagtatattgaagctggccgctttcctgattttctggtcggcattgggtatctatctgatacctaccctgctgaagaagatacgccgtttcaccagcaacgagattttattgataacctctctgggactttgcctgggaatggtgatgattgcgacaaaagcgggattttctgccgcattgggagcctttgtcatggggtccctgctggcagagaccgttgaagcggaaaaaatcgtacatatcgtacagccggtaaaagacctgttcgcttccatatttttcgtgtcggtaggaatgatgatcgatcctgccatgatgtgggaatatgccgtccctattctcatcctgacattgctggtactgtccggtcaggtactgttcgggagctttggtgtcttgctttccggccagccgttgaaaattgccatacagtccggcttttcactgacacaggtcggtgaattcgcattcatcatcgcatctttaggcgtcagtctgaatgttacggacaagtatctctatccggtcatagtggcagtatctgtcataacgacttttcttaccccctatatgatacggctttcggaaccagcataccggtttatagacatccacatgcctgaatccctgaaagattatctcgtacactatacgtccggggcaatgactgtaaaacaccagggtacttggcataaactgatccggtctatgctggtgtctgtcacactctatctggtcgtatgcgtttttctcatcactttatatttttcctatgtgcatcctttgattaggaaaagtctgccgggaatggaagggaacttgttgggcttcatcatcatctttcttgtcatatccccgtttctatgggccatcatcatgaaaaggaacaattcaaccgagttccgtaaactctggacggacaacaagttcaacagagggcctttggtatcaatagtacttgtcaaaatactgatctgcacgattatcatgatgagtatcattacccatcttttcaatgttgccttgggagccgggttggtagtctcttccattatcattgccgtcatttatttttccaagcggatcaagaaacggtcgctgactatagagagacaatttatggcaaactttcaggggacggacgggaatggactttctacagaaagtgatacaggctccacctttggcagcaatatcccgttcaaggaattacatttggcggatttcacagtatcccctgattccatatatgtgggcagaacattaaaagaaagcagcttgcgcaccttgtttcagataaatgtgatttcaatcacccgtggagaaaaacgcctagatataccacaaggggaagaacatctctatccatatgacaaggttacggtcgtaggtacggaccgacagttggaaagcttccggacatccatggagcaaaagaaggtagaaaggaacgggaacggaacatcctcgcaggatgagatggaaatagggcaatttcctgtcgaaggaggttcaccattgatcggaaagacgatccgggaggcagacatatcggatagcatcattatcggaatagagaggagtaccgtgaatattatgaatccagaccctgatacaattttcaaggagaatgatacggtatggattgtcggtaaacgaaaaataataaaaggactgaataaagattaggacttatttaattaaaatgtcatggaatattcaagttataatgtaaatacccctcagtggagggagattacagtaggttcacatcttcctgcagaactgcgaaaacttgcagaaatcgcacataatctctggtggacatggaatgatgacgcaaagaaactgtattgtgatttggattcggaactttggaaagaggtggaacagaatccggtattgtttctggagcggataaattatgagaagcttgtagcgctggcacatgatgagaactttgtctataaaatggatgccgtctattccgccttcaaaaaatacgtagatgtggaaccggatcaccagcgcccgtcaatagcttatttcagcatggaatacggcttggatgaagtccttaagatatattccggcggtttgggaatgttggcgggggattacctgaaagaggcgtcggacagcaatgtggacctttgtgccataggacttttgtaccgttacggttattttgaccagtcgctttccatggacggccagcagacagtcaattataaagcgcagaatttcgggcagctcccgattgaaaaggtaatgcaaccggatgggaaacaactggtaatccacgtcccctatgccgacagttttgtggtacatgccaatgtctggaaagccagtgtggggcgtattcccctttatctgctggatacggacaatgaactcaacagcgagtttgaccgccctatcactcaccatctgtatggaggcgactgggagaatcggctaaaacaggaaatactgcttggcataggcgggatgataacgctgagagctttaggtataacgaaagatgtatatcactgtaatgaggggcatgccgcactgatcaatatccagcggctttgtgattacataaatggcggcttgaatttcgggcaggccatggagctggtacgtgcttcctcactttataccgtacatactcccgtacccgctggtcatgattattttgacgaagggcttttcaataaatatatgaagggatatcctggcaagttgggtataacctgggataacctgatggatctcgggcgtcacaatccgggagacaaggaggaacgtttctgcatgtctgtcttcgcctgcaagacctgccaggaggtaaacggtgtcagcaagttgcataaatcggtatcccagcaaatgtttgcgccgatctggaagggatacttcccggaagagaaccatgtgggttatgtaaccaacggggtacatctgcctacctggtgtgcggcagaatggaaaaagcttttcaaggacaattttgatgagaattttttctgcgaccagtccaatcagaaaatctgggaggccgtctatggcatcccggatgaagagatatggaatacccggttaaaacagaaagcaaaattgctggactatatcaaaagcaaatgcagcaaggactggctcaggagtcagattgatccggcattgagcgtttccatttttgagagattcaatcccgatgctcttctaataggcttcggacgccgttttgctacatataagagggctcatcttctgttcacggatatagaccgacttgccaggattgtgaataatccgaaatatccggtacagttcatctttgcaggcaaagcccatcccaatgacggtgccgggcaggggctgatcaagcaaatcgtggaaatatcccggcgtccggaatttttaggtaaaatcatattcttggagaattacgacatggacctggcacgccatcttatctcgggggtggatatttggatgaacacccctacgcggttggcagaagcttcgggtacgtcgggcgagaaggcattgatgaacggtgtgcttaatttctccgtgctggacggttggtggtatgaaggataccgtaaggatgctggatgggcactgactgataaaaggacttatcagaatgaacagtaccaaaaccagctggatgccgaagccatctattatttgttggagcatgacatcctgccactgtattacgagcatggggggaagaactattcggaagactgggtcaagtatatcaagaactcaatcgcacaaatcgctccccattttaccatgaaaagacagttggacgactactatgacaggttctataacaaactgtcagagcatttccacattctggcagccgacaactttgcgaaggcgaaaatgatggctgactggaaagcaaacgtccgaagcagatgggatgccatagaaatcaaatccatagaggcagggaatgggctgaatgccacggttgaagccggaaaggaatatgaggtgacggttgtcgttgatgagaaaggcctggatgacgcaatcggaatagaatcggtcattatcaggcgtgaagacggtcaggatcacatatatgaggttattccccttttgccggtttccaagaatgggaatttatatacctttaaggcgacatccggcattttcaacgctggaagcttcaagcaggccttccgtatgtatcccaagaatgctttgttacctcaccgacaagatttctgttatgtacgatggttttaatgaacagtaaaaggatatgcaaaaacaacgtatgagcgggcaaaatcaaaaaacagataaacggatagcatggccgatcatcatcatgaacttcacgggagtgtatgactacgaggcgtttgcccggaacaataaatttatatggctggattgtcgtcatctttatggtacagatggctactgtgacagggagggggctttggctttgaaggggatgattgctgattatccggcggagggagtccatttcattgattcaggcaattatcattatttgactaaattctggacagacaaacttgaaactccgttttcgctgattgtgttcgaccaccatcccgatatgcagccaccgttgtttgacaacatactttcttgcggaagttgggtaaaggatatattggaccataacaacaactgcaagaaagtaattatcgtaggttcttcagacaaactgatacaggctgtgccgaaaggatatgaaagacaagttcggttttacagtgaaactacgctcatgcacgaagagggttggcagaacttttcttccggacatatcaacggaccggtttacatttccatagacaaggatgtcttgaatccggcttcggcagcaacaaactgggatcaaggttctctcagcttatgggaattgga

SEQ ID NO: 3928 - DNA, 54068 bp, Unknown
  gut microbiota DNA sequence
gcgtcacagtgggagagtaggtagccgccgttttgattgaagcctccggacttgaagaagttccggaggctttttttgtatacgcacgtgtgaaatgtgacctctaccgttttttccccgtgggtgtgggtacgtttcccacagaactgtccggaaggctccgccttgtcctttctccggcggaagcggttccggaaaccctcgccgggtactcatgttttaggaatatttattgaatatccctactttaagtataaattagttggctaattttatgatatttattgtatctcccactttagaagatcagcgggagatgcactttttctttttcattgagctgaaaaatcttgctgctatgctaagcataataatacaaaggagttaggaacagtacagttctctttcttatttatgtgtataagctagtgctgctcccaatgccgtgcgatactctgcatattcaggtatccaaaaatggcattggtacatttcttccataactgggaatatttctttacattgtggcattttggtcaaattacctattaggacaaaatctttaatgtggctattcagtgctgctaatatgacagattgtcctattgattgtaataccatatgaatgattcccgctgctacatcttccatagaggcgtttgaacttgctttgccaaatgtggaagcggtggcatccagaggcagtccaggtagaggggtattgcaaatatccttgatttgcagatcaatattttctattacacctttctctgccatctttaccacttgatgaatattctgtgtttttaacaacaggcgagatagtccttgaatggttcctccgccaatacctataccacctatgtgagatatgtttttacctccttccacttttacaaaagaggtgccggtacccatgcttactacaataaggtcttgcaattgggagtcatagtgagctccaagaccgtttgctagaaactcatccgtatgatcagtagagagtccatataagggttggtttacgtaagcacttcccactcctgtcaacatgactttatcaatgtcgtttaagctgattccattatcatatatgtatttgccgaaagcaccgaataacgaagtgataggatcttcggcttttacaatcataggatgttttatgccttctttatccacacctattatcttggtggtgcttccgcctacgtctatacctattaccattcccattgtttttctttgtttattttaaaatagtgcaaatatacaggaattatctaagtggctattcatatagcttgcaataattaccaattatctgttcggaatggagctacaggcaggcctgatgctccgaataaggtaccatcagtatggttggcccaattgtatcttacggctacaggatgaggtacatcgggtgattgtacaattatttctttcttttttacagttactgttgccggataaaaaatccgatctgtacctgcgattataaatccgcgtactgggtcgggatgcaagaatccttttcctaagttttcaaaatggatgcgaagggtatttccttcgatgctgtagcctttataaaccggatattgaggcatttttctttttccgtaagtttgctttaaagctaactgtgataggcgaagacctgtttccagagtactttggaaggtattgcttttttctttcccaatatcggtggttatcaccatgcctgtatgattcaagtgtaaagcctgtgcttgtgcttcacgcatggccgcccagtctgaatcatcttgtgcttcttcttttttctcatgattgggcagttgcacaaagtagaaaggcatttgtggtttttgccatttatcgcgccagtcggctatcaatgacatgaataagtctgcatattcatcgctactttccaaattactctttccttgataccatataacaccttgaagggggaaagaggtaagcggatgtatcattgcattgaataatcctgtaggatacttagggttactttctggtgaaatgggtacaggggggattccacttaatgagagaccggataggtatttccattctcctgccaatgagataggatctttgccttttacactcagcttcatgtcttctggacggccatatattcctcctttgcttttgtaattggtcacacgtatggtcagtacagcttttccgcgttttaccagcttatagggaattgtgtaatagcgggacgcatcggctttcgtgtttcgtcctatttcagtcccgttataatatacgatgctttcatcggcaatgttccctaaatttattgtgacattttttctagcccagttacgtggaatatctatcgtttttctgaaccacactactccatcgaagtctttcattcccttatcttcccagtatcccggaagttccattgttttccagttttcatccgaataatcaggttccgcccatacttggtggtcatcgcaccatcccatatcgtgttcgtaaagagcttgataccactcttctctttgacgggcatattctgcttctattttttcaggattgaaccccaaggattcaagcatttcagtttctttgttgtaacttggcaggttttctaacgcatcataactggcccatgcttctgcaggagtatctttccaggtacaacttattatacctatgggtactttcaggtttttttgtaactgacaggcaaaaaaatatccgattgcagggagtccggttatggtttcagatgtacattctttccaaccttcttgtgtagcatgcaaatctttcttgggaactaaagagatttctttttttgtctgaaacagacggatataaggttgggagggtatatctatgggagtttctgtttcacattctcctgtatacaaccatatttcgccaatcagaatattttgcagtatgtgctcatccccgtccgaaatgataatttcataaggacctccggcagatggggtaggaacttctattttccaatttccttctttgtcaggtgatgtcgtatagggatgcttattccatcccgtttttattatcacttctttttttgtagatgaatggccatgaaaaatgacattcgatttttgttgtaataccatattgtctgtgaataatgcaggcagtgttactttggcctctgccatacaaaatgccattaacattcccaataagatcatttgttttttcataagtgccaagtttgttgtgttattaagtttatagtatttatttatgttgtataagtccccggtctttgaatatgagttgtaccaggcggaaagccaaatcagtaagcaatattcccaaggccgcaccaatgatgacatcaaacagccagtgacggttattcagaatgcgggtaaaccctgtaactatagctgctgcgtatgctactaatcctacccaatatcctttgaatccatattccttatacaatagggtagctgccataaacgctgctgccgtatgtccggaaggaaaagagaaataatttgtggcatccgggcgaagcacccctgtggtgagttttaatccatttactaccagctgcgtcagtacgactgacaagactatgaaagtgaacagccgtttccatccgaaattacctcttattcctcccaatttcagtccgaatagaagtatgagtggaaaaagttgcagataattgtcataagtttgatggaaagccggagcatgtacattacgcaaattacgtatgtatagatttgcattttcgaaaaaatgggagaatgttccgcttccgtcttgcaaatacactgcaataacaagtaatacagctacgtaaaacgtgatgattgccatcattttaatttttcctatcataagtcagtttattctacggatgaatgccccgaaagtactcattttctcttttatctgttaatgcgttaatgataaattttgttcaaaataagtttctttaggaatcttatggtttagtcggttcttccttcatttctcccttgctatatccgctaggacttattttatagtattttttgaatacctcgcggaaatattttacatcattaaacccggtcatatctgatatttcggatatattatactgtccttcggatagtaattgcgctgcccgtttcagccggatcaggcggatatagtctgccggagcttggtctgtcaatgcttttagtttattgtagaaactggaacggctcatattttgtgaagtacagagtgactccacgttgaaacctgaattgtctagattttcagttattgtttcttttactgcttccaggaactgttgatccaatgtgttgctataatttatggaaatgctgtcattgtgtagttccatttctgcatatttgctacgaagtagtgcacggttagtcagtatattggctatggatgcttttagtatttctatgttaaaaggttttatcaggtatttgtccgcacctgtttccaacccttcaacgatattcttttcgtcatttaatgctgttagcagaattacagggatatgagacgtcagtatattattcttgatagcagaacacaattcgtccccccgcatttcgggcatcataatgtccgataatactaaatcaggcttaaattcggggatgatttttaaggcttcttttccattggtacatgtttccacttgataagcttcggataaagtatgagacagatattcgcgtagatcgtcatggtcttccacaaccaggatgcgctgtgcattttgaacatgctgccgatactgatctttataagtgtggggagagactgcactaggggatactggtaccacgttttcttgttgtaccgtttttgtcggaacctgttgacttcggaattgtttttgggggaagataacctttacgcgggtgcctttattctctacgctttctatgctgatctttcctttatgaatacgtaccagtttccacactaacatcagtccgattccactgcctgtaatttttgcattgatggcattgctgcccctgaagtgtaacttaaataactttttctgttctttggcaggaatcccgatgcccgtgtccgtaatctccagactccagttgtccttgtcatggcgggtgataatgtgtacctcaccgtgggcgggagtatatttgatggcatttgaaatcagattttttgtgatcgagtccatcttttctttgtcgaaccatacattttgatattcaaagttgcttttgtagtcgagtttgatctgtttggcttctgcataactataaaaggcatggtatattccttccatataggtattaagttcgtgttccgatatacgaagggaggatgagtacacattggctttgctgaagtttatcagattggtggtgaggcgtatcaaagtgtccacgttcttcatggctgtaagcatattggcctgactttcttcacttaaattttctttttgttgaatttcttccaaaggtgcctttatcagtgtcagcggagtacggatatcatgcgctgtattgataaagaaccgagttctttcatccgaggcctttttttctctgcgcatggaatgaaggcggaaaatgacgtatgttgctaaaatgatagtcaggacataaatacaaatagcccaaaaactgagccacacgggatgtgctacagttattttcaatatccgctcctgcaacacgtgtttattatcctctttggaaacagaacgtacacgcagtgtataggtgccgggagcaacattagtaaatcggatagttccttcgtcactgggagtagtccagccatcgtagaatccttccaactgccaggtatatagtatgtccgacggataatcgtaattgatagaggatactcggatggaaaatgtattttgcatatatttcagattcaatttctctatttggtcgatatctttagtcagaggagagtttggatcattgggatatacagtttggtagaaaatacggaaatcgctgaatatcatatgtgaatctcctgttttgggcatctctatgtttggggggaattccagtgcaccgtctgtacttccgaatacggtgttcccattggcacgtagtacgccggagccggcattgaaacaggtggacatcaacccttgtccgcgagtccagttgcggaactggcggttggtaggcgagaaaatactgataccattttcggtactcatcaagatattcccgtcttttgtgggtagaataacataaatgctgtttgatactaacgggctgtttcctgtatggtaatgggcgctgattgattcttttaccggatcataagtaaatagtccggaaccactggtgccaatgtagagtaaaccattgtcttcttggtgtaacgtataaatgtaggttgctccaccgggcagaggtatttcatggtatttgcccgaattccggtctagtagaaaaagattggtggaggtacctatccacatagatgtactgtccttttcttcaatggcagtaacagaacctagtccgggataaagacgtccttggcgtgtcttcagattaaagcatttcagattataatatcctccggaccatatacacccgtatctgtcctttttaatgtcgcgtatgtatttgtcggcacgtacattcagatggaaggattgggcaggggtgaggtattctatgtttccgtttttcttggtaatctggaaaatgcccgatgcatatcctcccgcccatataatacccggagagacttcgcataaagtaataaaaatgcggttctgatcttttagtccgtgattgaaagagcttaggaaagaacgccattgcttttgctttgaatcgtataagctgatgccgttgcttgttccaaaccacagatccccgtcactgtcttctataatggagtttacttggttgtttactagtgactgccggttgccaatagagtgctttatccagttgtagttggtatattggttattgcggacggtaattcccgtaggatagttggacagccagatacgctgctcgttgtctacatatacatcattgataatgtttccgtccatttcgttgtaactaccatagttcgcaatgatataaggatctgtttcataggtgtctatgtttaacttgtgtactcctgctccttcagtggctactaataattcctttgtgttcaaaggactgatccgtgtaatattcacatctgtcagttctacttcgggacgtacaattttctggctgttcaagtcatatatatagactcccttttcaaaagtgcctataaatagtttgttggctgtacggtgtagatataattcatgtacgtgcatatccatcattcccagtttgccgcaggagagctcttttaaattcccgttttccagttttgccagatagattcttttgtctgtacctataaagaaatgttcactgtttatctgttctatgcaggtgatatttcccagtcggttagagatttgttgcttttgtccggattctatgttaaaaaggtggatagccgatttgccgcacagccatacgttatcctcctggtctatgtaactatatctcacgaaagcatggtagtccttattccagtaattgtacatattgtatatctgtacaaaacggtcgtggcctgaatcataacgaaaaattctgccttgttttcctgtgaccagtagtgtacctgttttatctaaaaaagtccagtttatattcaataacgggtctagttccctgttaccttctcttaatttataatgttttatttcttttccgttatattggtctatccccacatgagtaaggaaccacatatatccacgagcatctttctgaattttgtatattttctgattgcttagtccttcttctatgccaatgtatttataagtctgcgatgagacggttaatgacagtagtaaaaaaatgagacttgtgatagtagctttcataaaactctttattctaaatcttttcttttttcaaaaaacagtaacaaaattaagataaaaaaatcataggattagtaatttgagatgagctaaatttcggtaaaattatccctttgttcgcctatggctcgcttgtgtgaatataagaaatataaatggaagaaggtttgtaacataactgtcagatgattatgttttcttaacaaaacttcgtgcagcattatggtatggcctgcatttttttcaatagaaaggacttataaactagaataattaactaagtaaagaaaagcacaatgaaaaagttttttggttttaataaattgcttgcgtctgtagcggtacttgcttctgtgatgatctttcaatcctgtttggatgatgatgataatgattattatagatatgcgttgcccaatgcactggttactgtgaaaccggtggccgacaattcattttttatgcagttggatgacagtacgacactgttacctgtcaatatgaaaaattctccctatggtgagaaggaagtaagggcccttgtaaatttcgatccggtgaatgagtcaagcggagagtatgacaaggctgtacatatcaattggatagacagtatcttgacaaaaccgattgccggtgatttaggagataagaatgatgaagtatatggtactgaccctgtagatatgattaacgattgggtgacaattgccgaggacggttatttgactttgcgtttcagaaccatgtgggggaatcgcagtcaagctcattttgtcaatttgttgatgagtaaagatgctgaaaatccttatgaggtggaattccgtcataatgcttttggtgatgtatatggtgaacctgccgacggactggtggcatttaatttggattccttgcctgacactgaaggaaaaacagtgaagctgaaattaaaatggaaatcatttaacggagagaaaactgcggaatttgattattgtacccgtaagtcaactcctgcaaacagtgcagccattacagccggacgaagtgtcttgagattaaaataaggtttaataactgaggtgcaatttcaatccctcctgttctatgtggtatagagccggagggatatttttttgctttattcgctcatccatatccctagcattactccgaggatacccaataccacactaccgatgatgtaggtgaaaaaagaggggtagagtcctgatttcagtaattgcagactttcgttgctgaaagtggaaaaagtagtgaagccaccgcaaagtccgatagtgagcatcagtcttatatcattgttgatatgaatgcgtgaggtgagggtatagaataccccgatcagtatgcaacccaaaatattgactgcgaaagtaccccacggaaaattcgttgttccctggcgataaatgcttatggtaagcaggtagcgaagtacacttcctgtacctcctcccaagaagatgagtaatagtgatttcataaatgctacattttaatgcaaaaatagcaatgattattcattcagagccaaacttttttcgtaattttgcaccctaaacgaaaaatacgcaaaaaggaatgggtggtttttttggaacagtctcaaaggctgaatgcgtcaccgacttattttacgggacggactataattcacatttaggaacaaaaagaggtggtttggctacgtatgcccaaggagagggatttatgcgttctatccacaatttggagagttcttatttccgcacgaagtttgaatctgaacttccaaagttcaaaggtagttcgggtatcggcattatcagtgatacggacccgcagcctatcgtgataaactcgcatctgggcaagttcgccatcgtcacagtagctaaaatcaataacattacggaattggaacgcgacttgctggcagctaatatgcacttttctgaaatgagtcttggcaagacgaatcagacggagctgatcgcattgcttattgtgcaagggaaaaattttgtagatggtatagagaatgtctttaataaaatcaaaggatcatgctccatgctgatattgacggaagacggtattatagcagcacgtgacaaatgggggcgtactccgattgtgataggtaaaaaagagggtgcgtatgctgcgacaagtgaatcaagcagtttgccgaatctggattatgaaatagagaaatatgtaggaccgggcgaaattattcgcttgcgtgccgacggaatggaacaaatgcgcaagccgaacgaaggaatgcagatttgttcttttttgtgggtatattatggatttcctgtttcatgctatgaagggaaaaatgtagaggaagtacgttttatgagtggttataaaatggggcagaaggacgattcggaagttgattgtgcctgcggtattcctgattcgggagtaggtatggcattggggtatgctgaaggcaaaggaattccttatcatcgtgctattgccaagtacacacccacctggcctcgtagttttactcctgccaatcaggaaatgcgttcactggtagcaaaaatgaagctgatacctaatcgtgcaatgctggaaggtaagcgcgtgttgttctgtgacgattctatagtgcgtggaacccaacttcgtgataatgtaaaaattttatttgattatggtgccaaagaggttcatatgcgcattgcttgtccgccattgatttatggatgccctttcattggtttcacttcttcaaaaagtgatttggaattgataacccgccggatgattaaggagattgaaggcgatgaaaataagaatctggaaaaatatgcaacgacagattcgccggagtataagaagatggtgcaaatgattgccgaccgcttcggtctgagctccttgaaattcaatactttggaaactttggtagaagcgataggattaccaaaatgtaaggtatgtacccattgttttgatggttccagttgtttctaataacaaaataataaaatattaatgaaaaagagccgtgatttgtttggcaattcacggctctttttctatttttacaggcaagtatgaatattaaaacaaaaagaaaaatgacggtaatagaacgatttttaaaatatgtaagcttcgacactcagtctgatgagaatagcggggctacccccagtacaccgaagcagatggtgtttgcacaatatttaagatctgaattggaacaattgggctttcaggaaatttctttggatgagaatggttatctgtttgccacatggccggccaatacggataaaccggttcctaccatcggatttattgcacacatggataccagtcccgatatgacgggtgcgggagtcaccccacgcattgtctatggttatgacggaacggatattgtattatgcgaagaagacaacattatactttctcctaagcaatttcccgaactgttggatcataaaggggaggaccttattgtaaccaacggcaaaacattgttgggagctgatgacaaggcgggtattgctgaaatcatttcagctatggtatatttgaaagaacatcctgaaatcaagcatggaaaaattcgtgtgggatttaatcctgatgaagaaataggcttgggtgcacataaatttgatgtggagagattcggatgcgagtgggcatatacgatggatggtggtgaagtaggggagttggagtttgaaaactttaatgccgcttctgcgaaagtgattattaaaggacgtaacgtacatccgggatatgcaaaggataaaatgatcaactccttgcgtgtagctaatgagtttgtgtctttactgcctacggacgaagtgcccgaatgtactgatggttatcagggattctatcatttgattggcatgacgggtgaagtagagcagactaccatctcttatataatccgtgatcatgaccgtgccaagtttgaggcatgcaaggaaaatatgaaaaagtgggcggaaatcatcaataagaaatatggagaagacaccgttacattggaattgaaagaccagtattacaatatgcgtgagaaaattgagccggtgatgcatatcattgatatcgctttcaaggctatggaagaggcgggcgtgacacctaaggtgaaggctatccgcggtggaacggatggtgcacaactttcattcaagggattgccttgtcccaatatttttgccggtggcttgaattttcatggcagatatgagttcgtgccaatccagtctattgagaaagccatgaaagtggtggtgaaaatcgctgaattggtggcaagataagtaatttattaaccttaaaatagtaaagtaataacatgaaaacaactccgtttaccgaaacacacattgccttgggggcgaaaatgcacgaatttgcaggttataatatgcctattgaatattcgggaattattgatgaacatcttactgtatgtaatgccgtaggtgtttttgatgtatcccatatgggtgaattttgggtaaaaggttctaatgcgttggagtttttgcagcaagtgacttcaaacaatgtggcgactttgcccgtcggtaaagcgcaatatacttgtttccctaatgaggagggaggtattgttgatgacctgttggtatatcactatgaatccgaaaaatacttgttggtggtaaatgcggccaatattgagaaagactggaactggtgtgtcagccataacacagtgggtgcggaattggaaaacgcatccgaccgtatggcacagcttgctattcagggaccgaaggctatggaagttttgcaaaaactgactccggtcaacttgtctgaaattccttattatgcttttaccacaggtgagttcgccggtcagaaagatgtgattatttcgaataccggttataccggtgcaggtggtttcgagctttatttttatcccgaagccggtcaggctatctggaaagcaatttttgaagcaggtgctcctgaagggattaaacctatcgggctaggggctcgtgatacattacgtttggaaatgggcttttgcctgtatggtaatgatttgagtgataccacttctccgttggaagcaggattgggctggattaccaagtttgttgaaggaaagaatttcacttcacgtgctttacttgaaaagcagaaagccgaaggattgaaacgcaagctgattgcttttgaaatggtagaccgtggtattccccgtcatggttatgaactggtaaatgctgatggagagaaaataggtgaagtaactagtggaaccatgtctccaatgcgtaagattggtatcggtatgggatatgttcagaccgcttacacggcattaggtactgaaatatttattgatgtgcgcggacgcaagctgaaagctgtagtagtaaaggccccgttcagaaaataaatcgaaagccggaaaagagaacgctgataacaaagaaaacgcgaatattcaagaaatctggatattcgcgttttctttatatggctgatatacatttacggttagttccttttcataaaaacagcttttaatgcaaaattaataataggatgaagaatatgataaatagataattcttaattttgcaatcaaaaatttattagctatgtctgaattggctccattgataagtgatttggctttgattctgatctgcgccggtgtcatgacgctcgtctttaaacggttaaagcaacctcttgttctcggctatatcgtagccggctttttggcaagtccccatgttcctcttactccgtcggtcattgatgtggccaatatccatacatggtcggagattggtgtgatattcttgttgttcgctctagggttggaatttagtttcaagaaactggtgaaggtaggggggacggcggtcattgcggcgtgtaccattatattttgtatgatattggttgggatttttgtagggtggtctttcgggtggcaacgcatggactgtctgtatttgggaggtatgttggccatgtcctccacgactattatctataaggcttttgatgatttgggattgaggcagcaacggtttgccggcttggttcttagtattttgatattggaagatatattggctattgttttgatggttatgttgagtacaatggcagtgagtcagaatttcgagggcagtgaaatggtatatagtattgccaaattattattcttccttatattgtggtttgtggtaggtatttatatcattcctacatttttgaagcgttcccgcaagtggatggcaaatgaaacattgctgattgtttcgctggcattgtgcttcggtatggtagttgtggcggccaaggttggattttcggctgcgtttggagcttttataatggggtctattttggcagaaacggtagaggccgaaaatatagagaagcttgtggcccctgtaaaggatttgtttggagccattttctttgtatctgtgggaatgatggtagaccctgccatgattgtagaatatatatggcccattgtgattattacattggccattctgcttgggcaggttatttttggtacaggtggtgtgattttgtcgggacagccgttgaaagttgccatgcaatgtggtttcagtctgacccagattggtgaatttgcatttattatcgcttcgttgggggtaagtctgaaagtaaccagtgatttcttatatcctattgtggtggctgtttcggtcattaccacatttctgaccccgtatatgatacgtttggcgatacctgcttatcatatagtagagaaacgtctgcccggcaaatggaaaaaaatgcttgagcgttattcatcgggatcacaaacggtgaatcatgaaaacaattggaagaaattgttggttgccatagctaggatcgtagctgtttattctgtattgtgtatagctatgattacactttcattccattttattattccattgttccgggctagtctgcctgtcttttgggccaatctggcaggaactgtttttactatcgtctgcatcgcacctttcttgcgtgccattatcatgaaaaaaaaccactctgtagagttccaggcgttatggcaggatagccgtttcaaccgggctcccttaatttctaccattttactccgtatagtgatagctgtcatgtttgtgatgtttgttatagagaaactttttcagacttccacgactttgctgatcggtatagccgttgttttggtaggtatgatgatgttctcgcgatggctgaagaagcaatctatattcatggagcgtacttttattcagaatttgcgtttcagagatgtgcatgctgagttcacaggtcagaagcgtcctgagtatgaaggacatttgttgtcccgcgacttacatctttcggattttgagatacctgcggattccttatgggcgggatatacgttaagagagctgaatttggggcataaatacggagtacatgtggcatctatcattcgtggaatgcatcgtattaatattccgggggcgaatgtacgtctgtttcccggtgacaccatacaggtaatcggtacggatgagcagttgggcgagtttgcccgtcaggcagaaagagtatcagccgccgctgaagaggaagatttggaaaggcgtgaaatgaatctgaaacagttcattatagatcgtaactcatttttcttgggtaaaaatatcaaagaaagtggtatccgggatgagtacaaatgtctggtggtaggcgtcgaaaaagaagatagtacgctgatgacccctgatatcaatgtaccttttacggaaggagatgtggtatgggtggtaggcgaacgggatgatgtgtaccgtttgttgggtaagaaagaaaaagaggaagaataattaattttaatacataagaaaaccatgaaaagtgatcctaaagattgtctgtattgtcagaacaatgagacattgcacaatttaatgattgaaatagcgccactgagtgtttcacgcgtattcctgtttaaggaacaaacctatcgcggacgttgccttgttgcttataaagatcatgtaaacgacttgtttgaactgagtgatgaagaacgtaatgcatttatggcagatgttgcccgtgtgacccgtgctatggacaaggctttccaccctgaaaaaataaattacggagcatatagtgacaaactttctcacctgcattttcatctggctcccaagtatgtggacggacctgattatggaggtgtatttcagatgaatccgggaaaagtttatctgactgatgcggaataccaagaaatgattgaagctataaagaaaaatctgtagtagtgaaatgattaacagatagatagtagttaatggctagtgattaatagcagatgcgtacacctacaatcactaaccattaatcactatctattcttgttcttcgaaatcaaattcaaagtcgaagtcatcatcaccgaaatattcaggagtaatgaattcttccatgctgcgacggtccttcttggtgggacgccctgttccgcgggcgcgatcaacaaaaccgctgattctgctcatttccagtaattcatattgctccggagtcgttacattctccagaatttcaggaaccaatttggcacctatacgtttctctattgcctgtaaaactttaaatgagtacgtgacaggcggtttctttacctgtatcacttctcccggctttatcattctcgacggcttcacctgagtaccgttgatggaaacccgtcctttcttgcatgcttcggcagcgatagtacgggtcttgaatatacgtgaggcccacagccatttatcaattcttgcttcagccattactttttattgtattggttcattgttatactgatgcctgccagacaaaaactcttaattatgtcgcaagccgttgctacacgttcgtccatggtcttcaaatcttcatcagtgaagtgacctaatacaaaatctatttgtccgccacggggaaaatcgttgccgataccaaagcgcagacgggcataatcctgtgtacccagcgtagcagctatatgtttcaaaccattgtgtccggcatcgctgccttttcctttcaggcgtagtgtaccgaaaggaagggcgaggtcgtccaccactatcaacacattttccaacggaatgttttctttctgcatccagtagcgcactgcatttccactcaggttcatgtaagtagacggtttcagcaggataagctggcgtcctttgagcgagagggtggcagtagccccataacgtccgtcggtaaaaacaagattggacgcctttgcaagggcgtccaatactgtgaatcctatgttgtgacgggtatttcggtattcttcacctatattacccagtcctgtaatcaaatatttcattgataaggattaaaaggttactgattatttgccggcagttgcagcagcaccacgagcggcacgagtcaatttaactgcacaaacaacggcttctttagcgttaatcaattccaaaccttcatagcttaattcgcccactttgacagtcttgcccagacccaaagaagttacatcaacaaccagacgttcaggaattacattgtataaagctttcactttcagtttacgcaactgtaatgccaatttaccaccggcacgtacaccttctgccaaaccttccagctgaacaggaacttccataacgatgggtttagcttcatcaatctgatagaagtcaacgtgaaggattgcatccgttacaggatggaactggatatctttcaaaatagcgtttactattttaccgtcaatgttcaagtctacaacatagatgtgcggtgtgtataccaagttacggagtccttcggtgggcacggagaagtgagtagctacgggcaagccgttttcgtctttctgtactccatacaatacacaaggaacaccattgttcttacgcaattcgtgagttgctttctttcctacgtctgttctgacagtacctttaatttcaattgatttcattgttttttaattttttgtgttactctaaattaagttgatcttattgcttaattcgccatcacacgatgtggtatatcacacgatgagcttgaaaaagcggtgcaaaattactgcttatttccgacttgacaaaaagaaagcacaatttttttatcattgtgctttctttatcggttggaatcagaaatcgatatctattttaatttcattcggactaagcggcttgtgagcgtcttcggtcgtttcctgttcttcattttcagtgtgatgaggttcaataggaccttgctcttcggcaataaactgtatagcctgttgtaaaccgttcatgaacttctcaaaatcttctttatatagaaaaatcttatgtttttcgaagcttacttgcgagtcatcaccttctcccgaaacaatcttcttgctttcggtaatagccaaaaacatttcatcttttcggtttttcttcacatctaaataataaatacgtttgccggctttaattgcttttgaaaaaacaatttctttgtcaccatccactacacttttctttttataatcttccataacttaagtatctttataaatcggcttcaaaattggacattttttttaaatgggcaaagaatttgcggataaacttcgatgaaaaaagcgatttagatagctctatgtaaattttacattaaaaaatgtaattatgttatgtaaaatcaatgaaaatacctacttttgcaactccttaataattttatgtgaattatgataaatagagttcttattcgtcttaagatagttcagatagtctatgcttattatcagaacggaggcaaaaacttggatacagcggaaaaagagttatttttcagcctttctaaagcgtatgacttatacaactatctgctgcttttaatggtagaggtaactaaacaggctaacaaacgactgaatgctgcgaaaaacaaactggtccctactaaggaagaattgtttcccaacaccaaatttgtggaaaaccgctttattgcacagctggaggtaaacaaacagctgctggagttttcgaacaatcagaagaaaacttgggagaatgaagctgatttcgtaaagactttatgtgataaaatcttagaaagcgatatatataaggaatatatggccagtgaaacttcttcgtatgaggaagaccgtgaattgtggcgcaagctatataaaaatattatttttaataatatcgaactggatcaggttttggaggaccaaagtttgtattggaatgatgataaggaaatcgtggatacctttgtgttgaagaccatcaagcgtttcgatgagaagaatggtgcaaaacaggaattgttgccggaatttaaagatgaggaggatcaagacttcgcgcgccgtttgttccgtcgtactatcttgaatgccgattattatcgtcatctgattagcgaaaatacaaagaactgggatttagaccgtgtggctttcatggatgtggtcattatgcagatcgctttggctgaaatcctgagttttcccaatatcccggtcagcgtttcactgaatgagtacgtggaaatagccaaactgtacagcactccgaaaagcggtggctttattaacggtactttggatggaatcgttaattcattaaaaaaagagaataagctaacaaaaaattaatatctttgtttgttattgaagaataacggtattataaactaaaaaacatagaaagtatgaacttattatttgtatttctgcaggcagggggtggaggagattattctttccttattatgatggtagccattttcgctattatgtacttcttcatgattcgtcctcagaataaaaaacagaaagaaattgctaatttccgcaagaacctggaagtgggtcaggaagtgatcactgcaggtggtatatacggaaagataaaagaaatagaagataatacggttgttttggaaatagcgtcaggcgttaagattaaaattgatagaaattctatcttcgctaatgctgcatccaaccaacaacaggcaaagtaaatgacataacaacatgttcgacaaaaggaacatacgtatttactatttaaagactttagagagaatcagaagcttcctgcttagccgtaatagcagggagttcctgattttcttgttttttgtatttgtatctttctgcttttggttgcttcaggtgttaaatgatgattatgaaacggaattctccgttccgttacggttgaagaatgtacctagtgatgtggtgctgacctccgaacttcctgatgaactgcgtattggcgtgaaagacaggggaactgtattggctaactatatgctgggacagacattctatcccattgttgtggactttaaggactatgaggataaaggaagtcgtgtccggattccggtttcagctttaatgaaaaagatttcggtccagttgaatcagacaaccaaattgctgaccatacggccggatactgtggagtttatttatacaaaagggaaggcaaagaaggtgcccgtgaaattgcaaggcaaggtggctttggaccgtcagtattatatctcggatatcatttactcgccggattcagtgatggtttatgctcctcaagagattttggataccatcacggctgcttatacacaggcattgaactttgaagatgtggcagacaccgttcgtcgcagggtgaatctggccgatgtacgtggagcgaaattcattccctcttttgatgatgtgactttattggtagatatttacgctgaaaaaagtgtggaggtgcctatacgtggcatcaattttccgcccgataaagtacttcgcacttttccctccaaggttcaggtgacttttcaggtaggtctgagtcatttcaagtccatcacttccgaggatttctttatcggggtgacttatgagtctttgttgaacaataagggggagaagtgtccggtcaatctcaaatccatcccccgatatgtgaaccacgtccgtttgaatcccaaggaggtggattatttgatagaacaacgaattaaattcaatgattaagatagcggttaccggtggcatcggcagtggaaaatcatacatttcccatttgctggagaatatgcatatcccagtgtataatgcggataatgaagcgaaacgccttactgtttccgatgccggaattcgtggggaactgattgctttgttaggtgaggaggtttataaggatggtctgttaaacaagccgttgctggcttcctatctgttttccgatccggcgcatgtgctccaaatcaattccattatccatccccgggtacggaaagattttaccgtatgggtggaacgtcaggaaaagtgtgagatagtgggtatggaatcggctattttgtatgaggccggttttcaggatacggtagatgcggtaataatggtctatgcacctgtagaactgcgtatacagcgtgccatgtatcgtgacggagccagcgaggaacaagtccgggcacgtattgctgcccagatggatgatgaagaaaagcgtcggcgggccgatttcacggtggtgaatgacggggtgcaattgctcataccccagttgaacagaatagtagaacaattaaaaaccgaaaaattcatactataaatttgggagtttcattggtgaattgtacttttgcttcctcaaaccataaatataaaatagaatagtatgttaaagaccattttatcaatcgcgggcaaaccgggattatataaattgatttctcaaggaaagaacatgttgattgtagaaacagttgacgcggctaagaaaagagttcctgcttatgctcatgacaaagttatctcattggcggatattgctatgtacacagatgcagaagaagtgcctttgagcgaagtgctggaagcggtaaagaagaaagagaatggagcggttgcttctatcaattataaaaaagcatcagccgatgagttgcatgcttattttgcagaagttttgccaaattatgatcgtgaccgtgttcataacggagatatcaagaaactgatttcatggtacaatattttggtaaacaatggtattactgaatttgtagaagctccggcagattctgctgacaaagtggaagaagctgctgctgaataattgaaataaagcgaaagggaaaggcctgtcaagtagattgtaaactgcttgacgggctttttgtttaccggcattattggtaaaaaaagtatgtgtacttcattggcgaaataacaccacttactttgccgatgaagtacacatactttgtctatgaacatatattacctttttcagtgggatacggtcgtttataatgccctgtagagaatatcctgaaaaatccttcataagcttcagcccctccgcaaacaccctgcccgtcggcattccggctgaaggattgaggttatggaatccttcagccaagtggaaatgtttcagccggttttattttcggaggagtggttgttctgaaggatattttccggctgaaacatttcgtgaggtatatccttcagccggaatgccgacgggcagggtgtttgcggaggggctgaaagatctgaaggaaaaataaggcgtttcggcatgtagataccgttatggaaaaaaacaacaggtcaaattttaaaaagctcttgttctttcaatgaaaacgtcttgttcttttttttaaagaccttgttcttttcagaaaagaacaggacgtttgagaggttagtaacctgcatgccggaaggttagtaacgtgtggggcgacacgttactaatgtgtgggctgtaagattagtaatgttacaggtgaaagattatatatcttacaagtgatacatatcatacaggtatgaagtttcagtatatgtttgataataaaacagtaggttatctttttttacgattatccagttcaatgaactcttttcggatgaataagtttcttatgtttttcaatattgtaaaaatataccagtctacacaggctgttctgaatcttgccgtatttcagttttctttttcttatacaaaaatgaaaaaaggaagtagagatggctgattaaactgttttatgagcttattgccgttttttagctattggaaacatattggttaaggaaatattcaaaatattgcagatagagggctatagttaacgaaaaaaggggtgcatgatgaacaccccttttgcttagtaaagataagaccttatctttactggttgtttgtaacattctagttgcggaattttaatccgtcacccgctgtttctacgataatcggtttgcttcggtccacttcctgtgacaatagctttttggacaaatcattcagcaaatagcgctggatggcacgtttcacgggacgggcgccgaattcgggatcatagcctgtgctggcaatgaaacggacggcctcatcggtcatttccaaagtaatgccgttgccggccagcatattcttgataccgttgatttgtaacatcacaatctgttctatctcttctctgttcaaaggcaagaacatgattgtttcatctatacggttcagaaactccggccgtatcgtttttttcaacatggacattacctctttcttcgtctcttcaatcaccacttcgcgattctcgtcattaatcttttcgaactggctttgaatgtatgcgctgcccaggttggaagtcatgatgataattgtattcttgaagtttaccgtacgtcccttgttgtcagtcagacgtccgtcatccaaaacttgcagcagaatattgaacacatcgggatgtgctttttctatttcatcaaacaataccacagagtatggtttgcgtcggacggcttctgtcaactgaccgccttcatcgtaacctacgtatccgggaggcgctccgatcagacgggatacagagtgtttctcctgatattcgctcatgtcgatacgcgtcatcagactctcgtcatcaaacaggtagtcggccaatgctttggcaagttctgtcttacctacaccggtagtacccaggaagatgaatgaacctatcggacgtttcggatcctgtaatccggcacggctacggcgtacggcatcggatacggctgctatggcttcatcctgacctaccacacgcaaatgtaattcttgctccagatgaagcaatttgtcacgttcgctttgcagcatcttgttgaccggtatccctgtccaccgtgaaacaacatcggcaatgtcctcagcggtaacttcttcctttatcatggcactgtcaccctgcttgtgtttcaggtcttcttgaatatctttgatctcgttctctaaagcctgtaattttccataacggatttcggctactttaccgtaatctccctcacgttccgctttctcggcttcaaatttcaattgttctatttcctgcttgttttgctgaatcttgttgaccagttccttttcactctgccatttggctttgtaagaggtttcctgttctttcagttcggcaatctctttattcagctgttgtaatttgggctcgtctttttcacgtttgatggcctcacgttcaatttccagttgtttcaggtgacgtgagatttcatccagttcttcaggcacggaatcacgttccatacgcaatttggcagcagcttcatccatcaggtcaatagccttgtccggaaggaaacgttcggtaatgtaacggttgctcaattctacagcggcaatgatggcttcatctttgatacgtaccttgtgatggttttcgtaacgttctttcaatccacggagaatggagatggtgctcagcgtgtccggttcggctaccataacggtttggaaccggcgttccaatgccttgtccttttcgaagtacttctgatattcgtccaaagtagtggctcctatgctgcggagctcaccacgggccaaggcgggtttcaatatattggcggcatccatggcaccttcacctttaccggctccgaccaaggtatggatttcatcgataaacaggatgatgctgccttcggctttgattacttcattgacaacagatttcagacgttcttcaaattcacctttgtatttggctccggcaaccagtgcgcccatatccaatgagaagatttgtttgttcttcaagttgtcgggtacatcacctcggatgatacggtgtgccaagccttcaacaatggcggtcttaccggtacccggctcaccgattaaaatcggattattcttggtacggcggcttaatatttgtaataccctacgtatttcttcatcacgcccgataaccggatcaagttttccgctgcgggcagcctcattcaaattaatggcatatttgcttaaggattgataagtgtcttcactggattgtgaagttactttttcacctttacgtagttctgctatggcggagcgcagctctttgtctgtcattcccgcgtctttcaatatggtagcgacagtactctttacattcaacaaggccaggataatagcttccagtgaaacgaattcgtcacccatctctttggaatactgtacggctctttgtaatatctcgttgctttcacggctaaggtaaggttctcctcccgaaaccttaggcagcgagtcaatttgcttgtcgatgaccaatgcgatctgctgggcgttcattcccaatttctggaaaatgaagttggtgacgttttcacctactttcagtactccggccaacagatgcacaggctcgatagcttgctgtccgcgggcttgagttacgttcaccgcttgttgcactgcctcctgtgatttaattgtgaagttgttaaaattcatattgtatctcctttctaaatattattcaaatacctattgaaaacgtaactgtcactgctttgttcagtggcttttgcgatttcatttgataatcgtcaaatagtttgccataaagaaaaagaaagctaatgaggtaaaataagaagacaaaatggcaggctttccggcttttaaatgaaaaaaagtccgaattgtacacaaaaaggcagataactctttttgcaggcagatgataattgctatcttagcatcgaaatcataaaatgaaaacgagatgacaaatgaaataaagtttgcagatactgtaattttggtggatgtagcctatgtagatagggtggcgggtgatttatccaaacattttggtgacgtggtgggccgtaagttgccgaaagcggatttaccggtgttgttggaatgtctgtcactggatagtggaatacccttgggggagaatgctgttcaggtattatttatttatgacgaggaaagtaagaaaatggatgcttttcagccgtcggatttggaaaaggaattaaataacgtggctttcaaaagccagttgggagagtttgcactttattctttcgaaccgtcggatatggctagtcgcgaagagttgtttctggagtctttgagagtggtggttgatgcaaaagaggtgaaacgggtgattattgtccctgccgaagaagaatatggagataaagttcctgctatattaaataaggtggatggaaaagaaaaaatgacggtattcggtatgaatcctccaaccagtgaagtagcttatcagtgggagatgcttggattcgctgttttacagtcgttaggaattaaagcagacgaactgtaatcattaaaaaacatgtctgatttcaggttaagagtattcagcagtgttgcgaaaaacctcagctttacaaaggcttcgcaggagctgtttatcagtcagccggctataaccaagcatattcaggaattggagacgatgtaccagacacgcctttttgagcgaatggggaacaagatcttgctgactgatgcaggcaggttgttgttggagcattgtgagaaaattttggaagattacggacgcttggagtacgagatgaacttattacgtaatgagcataccggtgagttgcgcttgggagccagtactacaattgcccaatatgtgcttccccctttgctggcccgctttatcgagaagtttccgcaaatgtctttatcacttttcagcgggaactcctctgaggtggaaaaggcattgcaggaacatcgtatagatttggcactggtagagggaaatacccggcaacctaatttgaaatatactccttttctgcaagatgagctggtggctatcgtccatactcatagtaagtggatggattatgatgagataactttggatgaattgaaagaagttcctcttgtgcttcgtgaaagaggttcgggaacattggatgtattgattaccgctttgcataaacacaacataaagttatcggaccttactatccgtatgcacctgggaagtacagagagcattaaattatttctggaaaatagtgagtgcatggggattttgtctattcggtctattaataaagaactgtattcagggaagtttaaagtattggatataaaagacctggtgatgtttcgtgaatttgattttgtccaattgcaagggcaggatacagggctcccggctctgttcatgcaatttgccaatcattataaggaaaagttataacttataattaaaaacaattagattgtttttgaaacatatattacctttgcatcccgaaatggagaaataatgttaaaaagtaaaatatatgatttcagtaacagctttacagcaaaacagcaaaactatttatgtaggtttgctttccacgttaacggtctttttgttgatggactatattccggtattggcttcattttcccagtgggtcactccccccgtatctttatttctggggttgatatttgcattagtttgcggacaggcctatcctaagttcaataaaaaggtttctaaatatttgttgcaatattctgtagtgggattggggttcggtatgaatcttcaggcttctctggcttccggtaaggaaggaatggaattcacgatcatttctgtaatcggtacaatgattataggtatgtttatagggcataaacttttgaaggtagatcgtgatacggcttatcttatcagttcgggtactgcaatttgtgggggaagcgctattgctgctgtgggtcctgtattgaaagctaaagatagtgagatgtctgtggctttggctactatctttgtattgaatgccatcgctttgtttatttttccggtgttaggtcacatgtttgggttagatcaacaacagtttggtacttgggcagctattgctattcatgatacgagttctgtggtgggagcaggtgcggcatacggtgaagaggcgttgaaagtggcgacaacaatcaaactgacccgtgcactttggattattcctttggcattcgctacttcttttattttcaagggaagcggtaagaaagtaagcattccttggtttatcctttattttgttgtggctatcgttctgaatacttatgtgctggatggtgtgcctcaattcgggcaggctgtttccggactggcacgtaaaggattgattattaccatgttctttattggagcttccttgtctatggatgtattgaagcaagtaggtatgaaacctctgattcaaggtgttgctctttgggcggtgatcagtcttagttcattggcttatattctacttttctgatagggatttattagaatattaaaaagtatgcggatgatatggattgtttgaaaaatcctgttatccgcatgtttttttatgagaatataatttagaagtaatagatgagtaatagtacagcgtttactccaatgacagtgaggaatcctttccatacataaggcagcatttcttttctgcgggaggaaaaaaatatggcatagaacatattcactacgatgttgctgatgatagcttgcatgatacaggcccctacaatggttgccggaatgtttccgccttgtaacaggtttagtatgaaaggagtgatatcacttaatcctgttgcaatggagagaatactcaaacctcctgttcctgcataaaccaatgtatagtgagtcagaaatgtaaatactacaaataataaagcaaagatcagagcgactttgaattccagtggattactttccgtttccgtttcttcaataacttcgcgctcgccttttatagtatgctttttatggatgaatatgccgatgccggcggcggttgcagacatgatgagcagataggggtaaatattcagaaagatggaagtgctgaatataaggatcaaaatcatgaaacgtaagaacatcatgctgacagcaagcatcatggcagatacatattccggtatttcatgcgcttgtacccgtttgcatttgcgggcaaggatggaaatggtagcggtgctgctatacagaccaccgataatgcccgaaaccaaagtgcctgattcgcggaaaacatattgcttcagcaggtaggacaaataggagatacccgatacgactacagtagctagccaaatggtgtatggagtgagattgatacccggtatgagaggttccttgggtagcatgggcaaaatgataccgctgatagccagaaattttgccagtgtgatcatttcatcattctgcatccgttgtacaagttctgtgaaggtgtgtttcatttctgtgaaaagaagcacggtgactaccatcatcacgtaaaaccaggaaggttgtgtacttatgataggagccatacaataggtgataagggcgatgatgattgttgtcactccaaacacgtggaactgggattgcttgacataataattgatgcccagtaacatacctaaaattattccgcctcccataaataaatgcatttccttaggatcaagtatatagaggagatatcccaaaatgccgataaaagtaaaagtccggtctgtgccgaaaagcgtagtttccccctctcgtttcaggctgattctccgttgggataaaccgatgagtaaagagaacaaggtcaccagaatgaaagtaaccaattgctggggaaggtaatcgtacaacttttccataaatctgtcaagattaggttgatgtaataggtttttccttttaaactgcattgactcctctgatggattcaagtggctttaaaacgcttgcttaaactggctttcttcaaaaagtccttttaatttatcatcactttttatttggttgatgattgtggacagaactcctgctttaggcaattctaccacaacgtctgttttatatttaccaccgctctgccggctgttttcacagattacttttaagttagcagcctcttgctgggtagccatatggatcagatctgagaactgttcccactctgcattaccgaattttttttgagacttggcagccatttccgcctttgctttgatctggctggttattgcggtacgggctgcaatgaccgccttctttttggaggcagtggcgtcaccgctctgagctgatgctgaggcacggaagaagtctgcgtttgtgctatatgcatttccggtacaaggagtactttgtgcctgtgcccatgttgacattccaaggacgaaggctaaaaaatagatgaatttataatatttcatagttgtaattttatcaatctattgcgaagatagaagaatatttgataatataaacaagaaaagggaaaaaaaagattgagcttgctttatgaaatgattatatttgcagaaattaaatgaaaggttagtattcatggaatcaacaacaaaactctattcgttaaattacacaaacgcaaatacttatttatttgcattcgtgtttattgtaggtaatgtggtattgccgcaactttgtcatttggtgcatttgggtggacctgctatgttacccatttatttcttcacattaataggtgcttataaatatggattcaaagtggggatgttgacggctgttctttctccgcttgtcaatagcttcttgtttggaatgccttctgtgaccatacttccggctatattggtaaagtcggtattgttggcgttggtggcgggatatatggcagatcgtttccgtaagattacgattcctgcattgctggggactgttatggcatatcaggtggtgggtaccttgatagaatgggctcttgtcggtgatttttatttggcggcacaggatttccggattggaattccgggcatgttgctccagatttttggtggctatgctttgttgaaagctattgcaaaaagataagttgtaaacatttgatgttatgctgcaaattgtgaaacagcctgaaaatggtggcgctggctatgttctggtagctgtcatggatggagatcccggtaaatggatgactttggtttttgataaatcatttaatagttaatagataaaatgacaggcacattattatttttaggattaggaatgcaggaaatattattcattgcattgattgttcttttattctttggtgggaagaagatacccgaactgatgaaggggttgggcaaaggggttaagagttttaaggaagggatgaacggggtggaggatgatatagatggaaaagataagaaaggggaaacgaaagagtgacaaatgatggaacaacagcagaagatactgactttttgggatcatctggaagaactgcgccatgtcttgttccgtattgcagtggctgtggtatttctaatgttggtagcattcttgtttaaggatgagctttttgctattgttctagcgcctaagaatgctgatttcattatttatcgttttttttgccggatagctgatttcatggctatgccttcattatgtccggaagtgttttatgtgaaaatgatcaatacccaattggcggctcaattcattactcatatgagcgtgtctttttatacgggttttttgctggcatctccttatgttatttatcagttgttccgttttgtttcgccggctttatacgagaatgaaaagaaatattctacccggattgtagggtggggctattttctttttatgatgggagttcttttgaattattttttgattttccctcttactttccgttttcttgctacctatcaggtcagtatggaagtggagaacacgattactttgtcttcgtatatggatacattgatgatgatgagcctgatgatggggattgttttcgagattcctgtcctttgttggctttttgccaaactgggatttcttacggctgattttatgaagcggtatcgtcgtcatgctattgttattattctgatagttggagctgttatcactcctacgtcagatgtctttacattgatgatggtgtctgtgcctatgtatttgctttacgaagtcagcatttggattgtaagtcggattgggaagaaacagcgggaagaatccgtagaggaagtgcttgaaaaatcatgagatgataatccttataaatgttattccgtaaaaaaggaagacctttcatgataggccttcctttttccattaggatccatactttattaaattttccagccaaaggcttctgctacggccggaaacacaatctttccgtttacaatattcaagccgttttttagtcccggatcgttttcgcaagctttttcccaaccaagatctgccaatctgatagcgtatggcagtgtagcattggttaatgccaaggttgaagtacacggcacggctcccggaatatttgccacacagtaatggatgataccgtctacttcgtaaataggttcggcatgagttgtgggatgggaggtttcaaaacatcctccttggtcaatggccacatctaccagtacagtaccctttttcatcagtttcagcatagggcgtgttatgaggtggggagcctttgcaccggggataagaactgcaccgattatcaaatcagttgttggcagttctttttctatattgtggctggacgagaataatgtttttacatttttaggcatgaactcactcaactgacgcaggcggggtaatgaaatatcacagattgtgacatcagcccctaatcctgcagccattaaagctgcattggttcctacaatgccgccgcctaataccagcactttggctggcttgacaccgggaactccacctagcaagatgccacgtcctccttgaggcttctccaaaaaacgtgctccttcctgagtggacattcgtcccgccacttcactcatgggaatcagcagaggcagtcctccttgtttgtctgttacagtttcataagctaggcatactgaaccactacgcatcattgcctccgttaattctttgtcacaggcaaaatggaagtatgtaaataccagttggcccttacgtaccaggttatattcacattcgatgggttccttgacttttataatcatctcggcaatggcgtacacatcttctatagtaggaaggatacgcgctccgactttctcatactcttcatcggaaaatccgctgtttatacctgcggtgtgttgtatatacaccgtgtgacctctctgtaccaactcgtgtgctcctgcaggggttaatgatacacgattctcgttgtttttgatttctttaggaattcctactatcataattgtcacatttaaggggtttgactgcctcaaagataacaaaatgtcagaaaagtaggttttgtctggatatgtttttttcgtaataaatgtatgtttagcaacattgttttaagggatattctgttttttatttgtaagtttgcggagagattcaaaatttttgtgatgagttctccataaaataaagaaaatgactttacgaaattatataatcatagcagctttgggcagtgttcttgctgtacgggcacaggaagaaccggctgctcctgtattccgtcctccttttgattttccgcttattctgagcggtaatttcggtgaactgcgttctaaccactttcatggaggagtggattttaaaacccagggagaggtgggaaaacctattcattgcattgccgacggatatgtgagccgtgtactggttactcccggaggatatgggcaggctatttttattacgcatcccaatggatatacttcagtatatggacatgtgttgaaatttgcttctgcagtggcaaaagtggtggaggaatatcaatatcggcatgaaacttttgctgtggatttgaaattcgagcctcatcaggtcagtttcaaagctggagaaatcattgctttaagcggtaatgaagggtattctttcggaccgcatctgcatatggagatacgccgtacggatactggtgaattgatagatcccttacagttctataccgataaaattaaagacactactccgccacgtgcgtcaatgattatgctttatccgcagcggggcgctggagttgtggaaggctcacaaagaaaaaaattcatatctgttgcttctttgggacaaccggtttctgcttgggggaaaatagccgctggcattaaggcatacgactatatggatggcacacataataattatggtgtgcgttccgtggtactctatgtggatacgacagaagtttttcgcagtacggtggatggcgttttgcccgaagagaaccggatgattaatgcctggacagactatgaggagaatgtaaagaggcataattgggtgatgcgctcacagattcttcccggaaatagtttgcgcatgttacaagccaatgatgaaggaggggtggttacgattgatgaagaacgtgattatcattttcgttatgaattagctgatttatacgggaataagtcgacttatcgtttcattgtgcgtggccgtaggcagccgatagaggaatatcatccgcaggtaaaacattatttggcatggaataaaggtaatgtggttcaggaaccgggtatggaactggttatcccccgaggaatgttgtatgaggatgtggcactgaactgtcatgtggttaaagatacagccgcaatatcttacgagtaccagttgcacgatgagccagtagctttgcaggctgggtgcacgctgatgatcggggtacgccatcttcctgtagaggatacgtcgaaatattatgtggcccgtaagtggggaaaaaggaaaggttcagcaggaggaatttatgaaaatggttggatgaagacttccattcgtgaactgggaacctataccgtagctatagatactttgtctccacgagtgaccccattaaataaggcacaatggaagacaggtaaggttcagttcaaaataggagatgcggaaacgggtattaaggattataaggtgaagatagacggcgaatttgccttattcggtttcagttccaaaaatgcgaaattgtggatgaagcatcctgaacggttaaaaaaaggagtcgcccataaattggaattggtggtgacagattattgtggaaacgaaacaaaagaggaatatgaattttgatggtaaaataagtattatacacaattaaaaagttatatattaatgaagaataaactgattttaggtgctgcctttctattggcggcaataacagagagtttggcatgcactaacttgattgtaggtaagggagcctcggttgatggttctgttatcgtttcttattccgctgattcatacggaatgtttggcgagttgtatcactatcctgccggtatgcatgaaaaaggagccatgcgtgatatctatgattgggattcgggcaaatatttagggcaaataaaagaagcgcgtcaaacctataatgtggtaggtaatatgaatgaatttcaggtaaccataggtgaaactacttttggtggacgggaggaattggttgattctaccggtattatggattatggaagtttgatttatgtagctctccagcgttctcgtacagctaaagaagccatacaggtaatgacggatttagtaaaagaatatggttattatagcagtggcgaatcattcagtatcgctgatcccaatgaagtctggattttggagatgatcggtaagggtcccggtgtgaaaggtgctgtatgggtagcagtccgtataccggatgattgtattgccgcacatgctaatcagagccggattcatcagttcaatatgaatgacaaggataattgtctttactctccggatgtgatttcttttgctcgtgaaaaaggttattttgacggtatgaataaagatttcagtttctcggcggcatataatcctttagattttggtggtgtacggttctgtgaagcgcgtgtatggagtttctataatatgttcaacaagtcggtgggagatacctatcttccttatattcagggggacagcaaagaaccgatgcctctttatatcaagccttcccgtaaactttcagtacgtgatgtacaagcggctatgcgcgatcactatgagggtactccactggatataactaatgatcccggtgccggtccgtttaaaactccttatcgtctgtctcccttgagttttaaagtaggagatcaggaatatttcaatgaacgtcccatttcgactcagcaaacggctttcacttttgtggcacagatgcgtgctaacctgcccgatgcaatagggggagtattatggtttggcacagatgatgctaatatgacagtgtttgctcctgtatattgttgttcggatcgtattcctgactgttatagcggtaaagaagccgactgtgtaactttttcatgggactctgcattttggatttataattgggtggccgatatgattcgtccacgttatagcctgatgattgatgatatgcgtgccgttcaaaataatttggaagatacttatgcgaatgcacaggctggcattgaagcttctgccatgagcttatatgagaaagatcctgtaaaggcaaaagagttcttgactaactatagttgcatgacagccgaatcggcaatagacagctggaagaaattgggcgaatttttgattgtgaagtataatgacggtgctgtgaaaaagatggcaaaagatggaaccatacttcgtcctgaaaccggtcattgcgctcctttggtacgtccggggtatcccaaagaatttttggaagaactggtaaaggccaccggtgaacgctataagatgaaataggatatatttttgtatgttctgaaaatctgattaattagtggaggggcaggttatgatcctgctcctgtgcataataagatagttttttagattgtattcaggatgcctgggagctttcccgactgttatatagtagtgtttttttaccttgtatggtcttttgcttttttatgacagattattttagggggataatcctttatatctctaattttcttctttcaaatttctaggatttttaatttaattcttttacatttgtcaagacgtaaaaatcggatgtaattataaaccttataaataacaaaaaattatggaaaatgaagaattgataaagcaagtgacagagaaagcagagaaatggttaacacctgcttatgatgccgaaacacaggctgaaattaagaaaatgttggcgaatcccgataagactgatttgattgaagcattttataaagatttggagtttgggacaggtggtttgcgtggtattatgggcgtgggcagtaaccgtatgaatatttatacggtaggtgctgctactcaaggtttgtccaattatctaaataaaaattttaaagatctcgatcagatatctgttgtggtaggtcatgattgccgtaacaacagccgtttgtttgcggaaatttctgccaatatcttttctgcgaacggtattaaagtatatttgtttgaagatatgcgtcctactcctgaaatgtcatttgctatccgtcatttcggttgccagagcggtatcaatattactgcctctcataatccgagagaatacaatggttacaaggcttattgggatgatggtgcacaagtattggctccgcacgataagggtatcattgatgaggtgaacaagatttcatcggctaccgacatcaagtttgaaggtaacaaggatctgattcagattgtgggcgaagaggtagacagcgtctatttgaataaagtgaaaacaatttctattgatcctgaagtgatcaagcgtcagaaggatttgaaaattgtgtatactccgattcatggtacaggtatgatgttgattccgcgtgcattgaagcaatggggatttgaaaatgtacataccgtgcctgaacaaatggtgaagagtggcgattttccgactgttgtctctccgaatccggaaaatgccgaggctttgtctatggctattgatttggctaagaaaatagacgctgacattgtaatggctagcgatccggatgctgaccgcgtaggtatggcttgtaaaaatgacaaaggagaatgggtgctgatcaatggtaaccaaacctgtttgctgttcttgtattatataataaagaaccgtattgcgatgggtaagatgaaggatgatgatttcattgtgaagactatcgttactacggaactgattaaatctgtcgcagacaagaatcacatcgaaatgttggattgctataccggattcaagtggattgcacgtgagatccgtttgcgtgaaggcaaacagcaatacatcggaggtggtgaagaaagctacggattcctggccgaagacttcgtccgtgataaagatgctgtttctgcttgtacattgttggcggagatttgtgcttgggcaaaagaccagggcaagaccttgttcgaagttttgcttgatatttatgtggagtatggtttctcaaaagaaactactgtaaatgttgtgaaaccaggaaagagcggggcagaagagattaaggcaatgatggaaaacttccgttctaatcctccgagagaaataggcggttctaaggttgttcttgtcaaggactttaaaactttgaaggtgactgatggtaacgggaatataacagaaatagatatgccggaggctagtaacgtattgcaatattttacggaagatggaactaagatttcagttcgcccgtcaggaacagaacctaaaatcaaattctatgtggaagtaaaaggtgaaatgggttgccacaaatgtttcgatgccgctaatgcagctgctgaggaaaaggtggaagccgtaagaaaatcactgggaatttaatcgagtataagcatcgggcgagagtctgagagaatattcataaataaaagaaggggtggtggagatgtatttctctatcccccttttcttttatttccgtgccatttatatcaaaatctacacttctttgtttattttttgttgtaactttgccttctgttttaaataaggtaaaagatatgatgtggttacttctggcatttctctcggctgcattgctgggattctatgatgtatttaagaaacagtcgttgaaggacaatgcggttattccggtattatttctgaatacgttgttctctagtttgatatttcttccttttattgtattgtcagtgtggaggccgggaatattggaggattctattttttatgtgcctgttgcagggtgggaggtgcatcgctatgtggtgttgaaatctgttattgtcctttcgtcgtggatattgggatattttgggatgaagaatctgcctatcacaattgtgggacctataaacgctactcgtccggtgatggtgttggtgggagctttagtggtctttggtgagcgattgaatttttaccaatggattggtgtgctgatggctgtcttctctttttttatgctgagccgcagcggaaagaaagagggaatagatttcaaacataataaatggatttattatgtggtaatggcagctgtgttgggagcggtcagcgggctttatgacaagtatctcatggcgcctgtcgatcaaggaggtatcggactggatagaatgattgtacagtcatggtataatatctatcaattgtttatgatgggaggtgttttgatgttgttatggtggccgaagcgcaaatctaccactccgtttcattggcattggtgtattattctgatatctatttttctgtcggcagctgattttgtttatttctatgccttaagcttggatggtgcaatgatttccatagtatctatggtaaggcgtggcagtgtgcttgtttcttttctatttggtgcaatggtattccgtgagaagaatcttaaaagcaaggctgtggatttggcactggtacttattggtatgatatttttgtatttgggaagtcggtaagcaaaaaagacggggtgtgactcatcgtgcataccccgttattcttgattactctataatgattttatattctacatcaaacgtttcttttggttccaatttctgtatccattcacggtcctttaattcgcccgaataccctacagaatcgcaacgtccataccatggttcaatgcaaacaaatgggcaatcgggatgtgtcttggtaggagaccacaaagctaccaatggagaattaaattccaaactgatatggggctttttctttttatccagtaaggttatttttttcagttgtttattgtcaaaaatataagtgtcacaatcaaaagtatgaatatcaattggcatcagcccttctttgtttaattttagtacatgacgttctggtgatacgcaccccttttcggttggcatgatatattctaagtcagactttcggtcaaaaacaaagaagccacgatcctttgtagcagcatcgaactcggggaaatagaaagctgggtgtgctccaatctggaaatacatatccatagctcccagattttctacacgccattttacggtgattttattttcttccaataaatatcccaccagcaggcggaagggaaaaggaaacttgcccaatgtatcaggagtgctttccaaccaatatacagctcctttgtcttctttataggttagtttgaagtccatatcacgtgcaaaaccgtgttgtcctatttcataagtgtttccggcatgacggtatttattgttccacacacgtcctactatagggaaaaggacaggtgaacgccgtccccaaaatttagcgtcgccctgccaaagatattctttgccatcctttttgatactttgaagctcggcgccatgctcggctatttgtacagtcaggatagaattagatagtgtttccatgtttcttcgtttataaattcttttttcaaaggtagggatgtttcatgacatgacaaagtgaatcttcatctttgtgtaaattttatctaaaaggctgttttggtcaaataaattttaataaaagtatatggttgtgtttatttttgcttatgtttgtcaataagctatgaaggaggataagatggagaacatacatttgatatttaaatttttatggtatagtgtattattttgtatatggggagtatcttgtacaagttccggaacttataaaaagacccaaatggatatctatatgcagtattatgattttataattgattcattgtcaaaaaatcctagttatgtatgtacccggactgccaggcaaatgtcggttgccacagatagtgtggcgtattaccattatcttgttcttttggcaaaagcatatatgtttaaatccgagatggattcggctaaacttagcatggatagagcggaagtattttgcgatggagctgaaccgtcatcgttaattaatgatttgtatgctgagatttacaatatgcggggtaatgtatgtgttcgtcaagggttgacagattcttcagtggtatgttttcaaaaagcatttgattatcgtttgaagggtagtaacagagatatgcttcatgatatttctattaatttggctgatgcttttgtccgtaccggtcattatgataaaggcgcgatgtggtatcgtaaagctttgtcttactgtgattcattgaagattcctgaagaaaaacgttttcctgtttattacggattggcacaggtttatatggaacttcgtgattttacgtcttgtgatcattactatgaactggctgcccggcaatatgataagatgcttccatttgagaaacatatttatttgaataatcgtggtaattcttattattttcgtgctgattatcctaatgctttggaatttttcagaaaatcattattgttagctcgttcttatccggatatgatttttgaggaacatctgactgaaatgaatttgggagaaacttttctattgatgaatcaggttgattctgccgcatactatttaaacctttgcagtgatttttttcgttctatcgaaaatcagacggctctctattatttggatacccaattgattgaacttgccttgaagcagaataatttgtctttagcacgtaaacgtatgtctgaggctatacagcctgattatgtggaaccgaatatgcagcatatccgtaaccgttacctgcaacattattttgaagaggtgggggatttcaaacaagcctattattatcaaatggaaaatcagcgtattgatgattctacacgtaatgagcgtattaaaatgcgtacagctgaaattgatctgaaatacagtcaggacaccacgctgatgaagcagaaaatttttatccagcaaaaagagaatgaagtactggcgctgaatcagacgctttacctgtggatgtttgcctgcatctgtattttggggctcgttgtttttgtttacatgtacaacaagagacagcgtttcctgctgcaaatgaaaagtcagaatatgattgccgctttgcgtatggagaatatccgtaaccgggtttccccccatttcatttttaacattctgaaccgtgagatgggaaactacaccgatgagcaggccggaaatatgcgtgggttggtaaagctgatgcggcgcaacctggaactgaccgaacagctgtgcgttaccatggccgaggaactggactttgtcaatacgtttatcaacctggaacgtgaagcattgggagatagctttatactgtccacatccatagatgctgccatccatcttgaccaagaaatacttccttccatgatgatacagattccgatagaaaatgctatcaagcatgccctgaaggacaaagaggggatgaaaagactgtggattgatatcaagaagaccggggagggaatctgcgtcaaggtgcgtgacaatgggggaggttaccggataaacagtgccaaccatggtacaggcaccggtataaaagtgattcttcaaaccatacagttgttgaacgccaacaataaaaagcatatcgacatatccataaccaatgtgcagctggaagacggagaaaccggttgcgagtttgctgtcttcctgcctcaaggctatgattataatttgaaaaagatggtttagttattatttttgctaggatagtgtccgaaacggtcgctatagttccataaccggagtgtcgggtttgtgcgttaaaacatgttttaatacttttgttccgttaataactaaagcaggattgtttactatggataaactatacagggtcgtaataattgatgatgatgagttctctgcggacaatctttgtctggagctgaagaaatataacaggctgtctatagacgggatggcacgtaacggtgcgaatggccggaaactgctggaaaaggttcatccggacttgctgtttctggacgtggaattgccggacatgaagggcatggaactgctggaacagctaaggggggcaatcacttggaatatgcagattgtgttctatacagcttatgataagtacatgatttatgctatccgtggggcagctttcgactacttgctgaagcctatagacaagaaggagctggaagggatcattgaccgcttcatgaaaaaggcggaagagtcggcagccgcatctttggttatccctccgcgtgtgtattcggccggcgagcatacttttatgatatccacacccatcaatgacttgcgcattctgcgctccattgacatcggttttttccgttataactccgaccggaaactgtgggaagtggtgctgaacaaccagctgcctttgctgctgaagaaaaatactacggccgatcatatcaagggatatgactcctgcttcgtccagatccatcagtcgtatatcattaatatcaattatctgatgatgattaaggagaaccgctgcgtcatgtttcccccgtttgagaatattacggaacttcaggtttccaagaagttcagaaaagaattgcaggataggttttatttgttgtagtgaatctattgatgacgttgaaaatacaagtttatagaaagtgattttaagtcacagtggaaaagcaggagtcgtgagattgctgctttttttgtttttagtgcttaattttccctttgcggtatatggaaatgaggctatatagtcgttaatttagatagaatagtatgcttgttaggctgtttgatactttctcttggttttgtgaatttgtaaaatgacgttaattgtttttctttgaagccgcataaggttaaaaaaagacatgtatatgaatgaagtaaaaaaagtaatattgtttttattatgctgtgctataccttttagtttttatgcacagaaggcgcgccaaaatgctgtaacaaagaaatggggatatgagcagaccgaaaataaaggatggtgggaaaattcaaaatataggggtaattctatgtttggtggatgggatgcggctttagtaaatcaggattatgagataaattggttgatttctccacaatatgaaggggtgaccaagagatttacagaaaagttggcaggagtagttttaggaggaaaagtaggttttatagacatacacaaccgttttataattaaaccgcagtttgaaaatgcagatgatattcatggatttaatttaggactgtctgcggtaaagaagaatggcaagtttggctttataaataaaaaaggagaatttgtcattgaacctcaatttgattacgctgataattttagagataacatgttggctacaatcaagcaagatggtaagttcggggctattaatttaaggggagaaatcgttgttccatgtaaatatattctagaagaagcaatgataagcgttcctatatccaataaggtatatcgccagaaacaagaagaagtgaaaaatgcgaaagggaacggtgattttgatgatttgcttgataaaatcgctgaatgtagcagagaggtcaatgaaaaaattaataatcctggagcagaagttataaccgattctctcagaataagggaagataatggtaaaatgggccttgtagtgggaggacaaactgtaattcctacagaatatgaggagcttataatagcagaagatggatttgttcttgcttgcaagcaggataaatggggggctttggatatatatgggcgtactatattgccttgtgtttatcaatgggtatattatgatgtatcggcaaaggtctggattgccaaaagtcttgcaatggggctatataatagtcaaggtgctttattactaccgggaaggattgattatataggtagttttgtggatggcaaagcacctgtttggctgaattccgtactcggttggatagatacgaagggacaactctctgatggctttgcagaggatgtgacagaatcctttttgaaagaagaaaaaaagggagtggcaggtgcttggggtatgtttaatttattgacagatttgattccggactatgccatggcccactattatatgggaaaagggcaagtgactgatggcatttattctaaaggaatggagcatctgaagatagcggcagaattggatccggataatggagaagtagcgttagcgctgaagcaagccaaaaaggacaagaagaaaagaacgttgaatacgattggttacattgcaagtgtgcataatgatttggaatctacaaactctaattcttttaaagatgaaagcagaaatcaaaataagccttcatccggaattaatctgggagtttctatggatgaggtagatgcccttggtgggtctacagctactgctatagcaggaggtagtaatcattgtggttttttgaaatatgtgttagaagatcttgaagaaaagattcagaagaatacgggcgaattgatgggagagtattatcggaaagtgaaggatgaatatttgcagtttgccggtaaagaagggtgtgaacaataatatataattaaagaatagaattatgagagtaatgaatgtgaaatttgtcggtagaatcattatgacggttctttttgtattcatctgtattggagcgcacgcaggtgatgaccctttaaaatatgagatagagggagaaggagtaggtgcacaaggtatttatttggtaaaagtgacagtaatccagaagaaaagtaaattggatgccgatgtgatcaagaagtgtgcagttcatggggtgctttttaaaggattttccagccagacttcacgcacccggcagaaacctttggcaggaagtatggtggtagaacagcaacatcaggattattttgatgtctttttccaaaaaggaggttcttacatgaattttgccaatatggtaggagagaatctttcagtggtgaagatgggaaagcagtatcgaatttcagcagtggtttccgttgcgaaagacgccctctatcaagagctggtatcagccggagttattaaaggactaaataatggattttagcttatgtataagaggttgattgttacttttctgatactggctgacggattattgtctgcttttgcccggcaggctcgtgatgtgattaatctgaataatggtaacttgtatcattgaaattagactatgaattttaaagaagaaaaaattatgaaacatctgttttatacgtggaaattgggatgtctgcttttacttatccttgccggatgcagcagcaaaaaaagtgtttcttcctatcattcctttgagagtgaatgtttgggagtagaactggatgggtcggaaacacttcgcgcctggggcagagggaaaaatcgtacagatgctatagagcaggcaaagaaaaatgcagtaagagatgtcttgttcaaaggtgttgttgccggtagtcgtgaatgtagtgtgcgccctttgataacagaagtgaatgcacaggaacggtatgcatcttattttaacgacttttttagagacggaggggaatatctgaagtatgtaagtatggaagataagaaaacaaattctaacacgaaggcttctaataaaacccaaatttcttattccactacggtgcgtgtgcttcgttctcaattacagcagaaactgatagaagataaaattttaaaaccataaagacagaaaaacatgaaaaaattatatgctattttatttcttgtagcacttatacacaccggagtgtatgggcaggctaaaaaacccaccattatggttgttcccgctaacgtgtggtgtacccataatggttatacacaaaaatataacaatcaaggcactattactgaaattccggattataaaaaggcattggataatgatttgaacttggtgaatgtcataacgaaaataggtgaattgatggctgaaaaagattttccgttgaaggatatggcatcttctattcgttccatagagcagagttcggcggaacatgagatgactaccagttctacttcgggagcttcactggcagagtctcctttggatcggttaatgaatagagctaaagctgatattctgattgaagtagtttggaatattaatacaatgggtcccaaacgttctgttacttatactttgcgaggcttggatgcctacactaataagcaggtcgcagcgacgcaaggtacgggagaaccttctatggctgctgaagtggcagtattgttggaagaagcggtagtagacaagatggatgctttcgtaagtcaattacagaaacattttgatgatttgatggctaatggccgtgaagtggcattagaagtccgtgtgtttgataatgggagcggcgttaatttggaaagtgaatttgggggggctgaactacaggaaatcatagaagattgggtggcgcagaatacggtggctcatcgttttagtttaactgatgcaactgagaatatgatgctttttgagcaggtacgcattccgctttatcgtgaaaatggaatggctagagatacaagaagctttgcaaatgatttgcgcaaatatctcaatcagaaagccaatcttacctgcaaagtaatgacgaaagggttaggtaaagctgaattggttatcggagaaaaatagaaaagatatgaaaataaggaatatgatatttgccgcttggtgcgcatgttgtgccatctctgtggcagcacaggattgtgagataagccttaccatagctaaagctgcccagaaagaggaacttccatcccaggtacaagagattttaggaaatcgtttagctgcggcagtggccggtcaggggagtgttgccaattccaattttacaccattctttatcacagctaagatcaatactttatataaggaaacattgtccggtcctcctgtcagtacagcgcttactgttcaattgactttgtatataggcgatgcagtagggcagaaagtattttctactctcactgtggatgcaaaaggagtaggtactaatattaaccgggcatatatcaatgctttccgtgcaataaatggcaataacgtgaaaatacaagaatttatacgcgaagggaaagaaaaaattatctcttggtataatagtaattacaggcaaatattggtaaaagcgcaaaaaagtgcttctatgcatgagtatgatgctgcattgtattatgttacctctattcctgaatgttgtgtcggctatgaggaagctagtaaactgatagacacttattatactcaatatgtgaattataattgtcaattgattatgcaatacgccagatccgaatgggcgaagtcacccgatgcggaaggtgcttcaaaggcttttgactggttggttttcattgaaccgggaagcagttgtgaaggtgaagctaaagctttgtataatgaaataaagcaaaaggtgaccagtgattggaattttgagaatcgtgagaaatataaggatgaagtggggctgaaaaagcagaggatagaagctgccagagctataggtgtagcatttggtaatgggcagcaaccggttactactaatattacttggctccattaattcaagttcaaatgattttaaataaagagaatatgagaaataaaaaagttatcctaattctatgtctgctggtgctggtcagtggctctgtgcaagctcagaggttgaaggccgtgcagaatgaaaaggggcgttatggctttatgacggaagacgggacggtagtgataaaatataaatatgatgaagctactccctttaaagacggtatcgctaaaataggaaaagatggaaaatacagtctgattaatgaagatggtgaaatcattacaaaacggaaatatacatatatcggtgaattttataacggggtttgccccgtcgctgaaggtggaaatactaaaaaaggagtaatgctaaccacgggtgggctcataggcaataaagctagtagcaatacaggtgaaaaatgggggttgattgataagacaggtaaggaaatcctaaaaaccgattatgaagcaatgggagatttgaataagaaactgatatatgtcttgaaaggcaagaagttcgggttcattgattcagctggcaatatcatagtgaagcctacttataattttattggcagtttcaataaccaaggaatctgttgggttaatatcggtggcaaatacgataaaaagaacaacatggtgtctaaaggtaaattcgggttaatcaatgaaaatgggcgggaaataattcctgccaagtatgaagatgtgggcaatttccctgttttgcgagataagaaaaccggagctttgcttgatgaggctgccttttataccaaggcagaccagtctgcatttccggctaccaagcaggaaatacagagcttgctgcttcccaaacctcatgccgctgagtcccagttgccttcatcgagggtcgattatttttatttcattaataagaaatcccaagggttggtagatatccatggaaatactattattcctttaactgccaatcaggctattcttcctccttcagacaatatgcttaggcttgctaaagtggaaaagaagcaaatagctaaagcttattatgatttggatgctgaagtgatggtcagaatatcttcttcagaaaagggaaagtttggagctttcagccataatttagctccggtttcattggatgatgaattgtatttcatagataaaaaggggaacaaggtgattggtggcctgtcaaaggctttcctaagtaatgaaggataccgggtggtacaaaagggatcggcttttggcgctattgattctacaggggcagttgttattcctattgaatataccaattcgcttaccagcgtgaacaatggacgtttgggagtacaaaaaaatgcttcttggttttatgtggatatgaaaggacaaatcgtatccgataagtatgaccgtataggcaattttcatcaggggtatgcatccgtatgcctgaacaaattatggggggctattgatttgcagaaccgggttgtcgttcctttagagtggcaaggtgtagctcctatagtcgatccgaaattgatatgggtgaaaaaggataacctgtattatctttatgatggggtgcaaaagtctgttcgtctgaagcagggatttgccaatgcgtccaactttgataatgagatggcttatgtgatgtctgatggaaagtgggggattattgatccggatggcaaggtactggtgccttgcttgttcgagaaagaagaggatatggtcttggccaaacaatatatgttagcggaagacaagaagaacttgaccgaagtagaggctcttcgagtgattgcacgttttgacccggatacaaatatgtttaagataacctctgtcattccggataaacattgggattattaattattgaatgtttgaaaaatgaaaagattcattataatacagctgttggcggtggtattcgccgctcaaattcaagcccagggagacggcgaaataaaatatcgccgcagttctctttatagcatgatgatcaatcacgaaggaagagaatttggtgatgaaataaaggatgtttttctcaaaattcctgtccctgataaatacaataaccatgatttaagtgtaaaagtaatctatacttctgaaaagaaattggataaaaaccatgaggagatagatgaatttatcagaaacaatggtattgccagccgtatggtaggacgctggtttaaccgtgattacatgacagggatctgtgatgtggaactggtgaaagaacgagggctgtataacgcttccgaactggacaaggctctggcatccaagactcaacgcggaaacgctctgctggaagatgccggtgaggacttgattggaaatacttttcttattgtgaatgacattcgctatattgaccgttcaaaaggttcaagtgtgtggggaggaattgtcaaaggactgggtgcggcagcggctatttacaccggtgagacatcctatatggatttaggtaattctacgggagatatggttgcatcctataaggggtttaaagtaaatattgatacttatctctatcaactggtttgggatgaagagaccgcaacaaaattctatactcaatattatactgataaggataataaggagaaggtgaatgctttcaataataaccgtaagatgttcaagttgaagtatgtgggcagccagcatagtgatggaagtaacacttcctttttgggtattaacttggatgagccccagcaaatggtgcgaaaggcatgccaacgtgccattgatgaaaatatagcgagtctgcaaaagaattttgaccagttcaaagtgaatactcccttaatcagtgtttctcccctgaaagcttatattggcttgaaagagggagtcactgaaaagtctaaatttgaagtgctggaagctgaattgagcaaagaaggcaaaatgacttataagcgtgtaggagtgattcagcctaaggaaaatctgatttgggataatcgctatatggcttccgaggaacaggcttatggttcggactttggttttaccactttccgaaaagtatcgggtggcgatttttatccgggaatgttgattcgtgaaataaaataagtgtttaagttagccggcttcgtcaacagaagtgaaaataggttacttgccaaaaagatttgttgatatggctgaatagtgaaacataaaacaaacaggcgtttattctttggaaatgaacgcttgtttgtttatgttttaaatggttctatactgccagcttggagaggtgtgaaaagtagaactgtttttttgatggctcttccaatttcatatcatatagagctggaatgtgaagcttaatttacaaattttcaagcttgtcttattggcataatttatttattgtatatatagtcgttaattttagctgcttggtatctgctttagtgtgtttagtgtaaatcttgacaaatgatggttttttgaatataaaagttgcaatacatttgcaaatgtaaacttatagagtcaattgttacgaagtatggaaaagacaattattgcagcacttttaatgctgatttcgttaacatcgtatgcacagggtttaatgtggactgcgaaggctgaactcaatatgagcagcatgtctaacgtagaggaatctaaaatgcatccaggtttctatgcaggaataggagctgggtatgttattgatgaaacttggtctgtccgtccttctttattgttcactatgaaaggagtgaaacaagattacaaattttaataaaaatactgcattatgaagaaactgttttttatcatggctatgtccgtatgtgcattcacggcacaagcacaaactacttccggtattcgtgtggggttaaatatgaccagtgctacagggaagtataatgatcttatggcagatcaagattataataataaaagctatatgggttacagtatccattattttatagatgttcctgtgattggaaacttcagtattcagcctgctgttggactttctatgaaaggtatcacttatgagtacgataaatttaccactaaaaagtcgcatcggctcgatttggattcttataagaaatatgatgtgacggaatctcgcggcactagtgtcactcaaaaacataatctgggatatttggacgttcctattttatttgcttatgctttacctttgtcagaatcgtttagggttcagttgggagtggggccttacttctcttatgggttgtttggtaagtttaaatatgagtcggataaatatttgacagtatcccccgataaatatggagaaaataaacataccataaccaaagatgattgtccctcctttggcaagaatgatgatgcggacgatcctaaaggtaatattaaccgttttgattggggaattgccgtacagggcagcatttattggaaacgcttgtttttgaatgtcgcttatcaaaaaggtttgaaatcggctaatattactgacgagaagaatgaagggaaagataaattggccctttccaatttgtcgttagggttaggctttatattttaacgtgagttcgaaataaaatcaaaaaatagcaa

SEQ ID NO: 3929 - DNA, 6867 bp, Unknown
  gut microbiota DNA sequence
ctaacaataacaaaaaatcaattgaatgcggttatgaaaatagacatatacaaaccggttgtcctgttcctgctaccggcagtccttgcgggctgctcgggtgaacgggagcccttcccgcagggcgggaaggccggactgaggatagagagctgctccagccgtggcggaactgacggaagtcccacccttgtgaaagatttcggaatggtgctgcttgacgatacgggcggcggttatgccggagccgtaaacccgctgcatgtaacatacggggaaggctggatctttccggaggtcacactcacggagaccccctgcaggctgttcgcattctcccctttcgccgccatcccgggaaaggagctgcccctgagcctggtcccccagaccgactacctggcatccggggagatacgcctggactggcagaaccggtcagcggacatagggatggaacacctgctctgcctgctggaattcaccatagagggcagcagcgcgtgcactctgagtgtggagggggttcctacaggcggcacttatgaccttgccggcggcaaactctcggcaggggaaaaaggaacggtcccctcggatgggaacaccgtccttctgctgccgggcaaggcgggaaacaacagggtcgtgatccgttttcaggagaacacatacggctggctgctgccggccgtcaccctggaggccggaaaaagatacggatatgcattgtccctgggcaaagaagggggactcattctctccggtgtaagtgtccgtccctggcaggaaggagaagactataacggaactatcaaacctaacaaataataacaaaatgagaaattttacagaaaaaaaattgtttctgactgtcatgtctgcatcatatacactccggggattcgcccaggatgcccggggagcgatcaatgatgtcctggacagttttacactgcccgtgttcggcggttttatgcttggaggtatcattctgggccttatccagcaatgggacaatatcatcgacaaggagaacaggggcacgcgaaaggaaggattcgtcgcactgggctggtatgtcggctttgcattgctggccgcagtcgtggtgtccgccgtaaagagtgccatttccggtatcagcctgtcgatatgagatacaggatcagaaaaggactggagagcccctgcatgatacgggggcttctttccggggactactggatattcgtcggctgttgttccgccgctttcgtcctgttcttcctcggcatccgtgcggggatatccgcaggcaactggaacctgccggtcctggtgctcgtcatctcgctgcccaccctgccgctgcttctatacaagctgaaaagaaaggcacggccccaaaagttcaaggagacgggaaaagagataaacatcagtaatctggacataaacagggtattaacaaaaaaggagcataatgaaatcagaagaggcatacagcatacttgacattgtcagtgaatcggagggacagggcgtcgtcctgacccgcagcggcagcatatgcgtttctttcgaactccgggaaccggaatgctattccctgactccggaggatatcgacaggagggacggcatgttccgggaagccttcaagtttctcccggacggcacatatgtgcacaaacaggatgtgttcctcaaggaaaggtactgtccggacattgccggcggttctttccttgaccgggccgatgcgcggcatttccggggacgactgtatgtcagccatacctgcgtcatgcactttgtactttccggactcaaaagtcttgagaaggcctacatatcctcgcccctgtcctataaggagaacctccataaggaggacctcgccaggctcgatgaattcctcgagggagttgacaacgccgtcggcatcatccggagcatgcgtgatacggagatagccccgatgtcagggcaggaaatgcgggacttcacggccggatacaccaccctgttcgacgccccgggggcggttgtggacatacatgccgacacggaactccgcacaggaaagaaacgggcacgctgtttcgccgtctgcgatgagatctttctccctgacggcagcctggattcctgtgtacgggacgactcccttcctcccgccggctccctgctgtaccatccgatgctggagcggcttgggatgtacctgccgtacaaccacatcgtgaaccaggtggttttctttgaggggaacggacggctgcgcgagcggatcgcccgcaatatcgacatttatggaagcaattccggcatgagcaggtccatcaaggtacagtaccagaaactggacgagctccagcaggaaatccttgaggagaacgagacactggtacgcagcttcttctcggtctgtgtgttcgacgagtcggaggccgaactggagaaggccgacaaaaagatcagggagacgctcaacctggcccgtctcgggtattatattcccggatatgagaacctggctgcggtgcatttcgcctgcgtccccggccagatccacctgatgccgcggaaatacctgttcctgaccaccctgcccatagcattgtgcttctttctccagtgcggcagtttcaggaatgacagcgagggcatctatgtgcatgacaggatgtaccaggtccctctgagaaaggacatctgggatgcgggcaagaagagggtcaacgcccgtaacgggatggtcatagccggaaccggcggcggcaagtccgcctttaccctgaaccttacccagcagctcatcgagcaggactatacggtcgtggtggtcgagttcggaaagagcttcagccagctctgcaggctctatccggacatctccctgcacgtggactacgacggcaggacggcgctgggcatcaaccccttcgacctgcagggggaggaactggacaacggaagcatcgagatgctctcgggggtcgtgcagaaatactggaggcacatgttcacaaaggacgagtcggagaaggaggtggccctcacccgtttcatccaggactattacgagaatgtccgtgaagggcacaatttcgagagtttctacaaccacgtgacggaacattaccccgagattctggcaaggaagcacatccccaaagattatttctccctggagtccttcagcctgaactgcggcgagttcctgcccggcagacgctacgagaacgtatgcaaggatacgggaacggacttctcgggaaagaggttcatcgtgttcgaactgacgcagatcaagcaggacaggtttctgagcaacctcgtgatgggcatgatattcaccgtcatacagaagaagctgctcagtgaccggaggaaacggggcgtcctgatctttgacgagtacggcgagaccgcgcagatggtcgatacggccacgggaaccgggatacacagctccgtggccttctgctatcagaagatcaggaaggagaacggggcggtgtacaccatcatccagaatcccgaccagctgccggagaacgagcacacaaagaacatcatagccaatacggacatgctgttcgtgctccccaccaaggaggtcatctaccagtccgtcatagacaggttcaggctgacccatcccggacagatagccctgatgaagtccatgaggaacaatttttcgggacaacggccctattcggagtgtttcatgcggctgggggaacattacgccaccgtcacccgcctggagttctcaagggagaaattccttgcgttccagacggagggggagatatggtcggaccttgaggagaagaaccggaggatgtccatggaggacgccatagaggaatatataagggaacatcaataagaaataagaaacaacaaaaacaagaacaaatgaagaaactacttttatccatgctcgtgctgatgacagcggcaaccgcatccgcacaatgggcggtggcggacgcgcccaaccttgcacagaacgtcaagaacttctcggaactgcagaaacaggtgggctacctgaaggagcagaaagaccggctggacgagacactggacatgatgcgcaaggtcaactccgtcatctccagctgtgagaccgccaaatcaatcatagagagacagggaagactgtcagagaagtgcatagacctggtgacgaacaaaaaactgggcacgtcaaccctgcagacgctcacatccagccttgacctggtcatgctcaacaacacacggctcatcagcctgtcaaggaccatactttccacaagcgtgaagatgaacgactccgagcggctggccgtcctgcaggagatagagagacagaccatcgagcaggaaaggaaggtctcgaaggtatcccggatcatatcccagtatgaaagactgaaaagagccctgagataatatggaagaggcatacagcaatctgaacaacgcatacctgcagatcaaggggatgatagtggtggagggattctatgcccttgttgccggatttgtgattaccacctttgtattcaagcttgcgggtatcatcaaggagatggttcacgaaggcaagggattcaatgcaaaacagttttatgagctgggcagggagtacatcctctgcatagccctcatctgcatcatgcccgtgttgctggacacgcttgagaccgtacttgcatacgccgcggacaggctgatggagtcgctcgccgccggaggggtctacaatccggacaatatctggaagaagccgatcgagcagctcttcgacgacctgatgaacagtgacatcatcgacatagcggtcaacgggctggacacggccttcgactccctgctggcgggagcggtgggcagtttcgggggagtcgcatacgactacctcatgctggtgttcctgtgcacgcgctaccttatcctgatactgctcgaggtcatatcgcccctggcgatagcctgcctgtacaacagcgacacccgcagttccttctacacatgggccagacagatggtcgggtgctacatgctgtatccgggattcatcatcgccagcgtgttttctgatctgattgtagtgaactatgtacagcagcgcccctggtcagtaacgctcatggtgatattttccttcctgctgaaactggcgatgctcgccacggtgaaagcaacggttaacaaatggttatagctgatatgatggacataaagaacatacttaaagatttctcccgcctggcggaagccagaaagaaccatacgttccgcaccaggctggtattcatattctgcgccgccacaatagcgatggtgctgtttttcagctacagggtggtgaacagcgcgatggacaagatcttggtcgtcaatgaaggcggggaactgctccgcttcaaggccatgcagcaggatctgctgtatgaatcccttttaaagaaccactgctaccatacggcctattatctgaacagtttcgacaggctctccctgcaggagaaccgggcacgcgccctgttcctggtcaacaagccggacgcgaacaccatattcgccaaataccaggctgacagggggtatggcgacgccctggaactcggagtggtctacaggacggagttcgagaagatgctctcggtatccgtcagcggggaggagtatcacgtcaccttctcgtcagtcctgagcatcatcaacggaaatgatgtcagaaagatacggattctcagcgagggcaccgtcatacgtaccacgccacgttttccggagaacacttccggatttttcttccggacatacaaccagcaatacgagatgccatgacaaaaactgaaaggagcagaatagtggcgctggggggtataggagccgtgatcatcctgctggtatgggggatcatcgccacattaccgaaaaaagaggacggcagggagggagaagtgaggctgcgctctgaaatcaaggacaatttcacgctcaaggacatgctcgggagtgtggaaaaggaaatggagaaccggagagaaacccccatgcccggtggaggaaattacggaatggatgaaccggaggacaccgtttccccggaaagcgagatacagcgcatccgggaactgatcagacgcaacgagcagaccctcggaagcgctccgctttccgggacggaacagcccgccccctcccccttcagggagaaggaggaaacggacggtgaggaggagaaaccggggaagacggaaccggaggacacggtccccgaagagactccccggagaggattcaacagcgtgcgccttgtccggcaggacgagaggaacgtcatacgggcattcgtacattccacacagacggtcatggtcggagcgacgctgaagatgcagctggcggagaactgccttacggacgacggacagcgcatccgcaaggggacaccggtgttcggggaggtgaccggaatcgacggggaacgggtgctggtcaaaatcacctcggtgaatctggcagggaacatacttccctttgaaaaggaggtgtattccgaggatgccatggaaggcatatacgttccgggaaatgccaaggcggaaaccatcaaggaggcggaagccgcgggtgtcagcgggacgaacacaagcatttccgggggacttgacatgggaagccagatagtggcgggcgcggcgaacagcgtcatcaacgcgaccaagtcggccgcaagcaagaatatccgaaagataaaggtgaccatcaagacgaactaccggatactgctgaaggatgcgaaaaaatagaaatacagattaaataggaaaggataaggacaatggcgaaagtatatgtggcaagcag

SEQ ID NO: 3930 - DNA, 489 bp, Unknown
  gut microbiota DNA sequence
acaaatcgtaccaaggcattgatggcagtagtgtaattgggtgctcctttaatagtagcagaagctatccactcacgactgaactttataaagtcaatggtctgttgcttctcttgctctccgtttaggaactcaattatctcatccaatgaataatgattttggtctaattgcagttttagacactgttccctataatagagaacaagcctatctatctctctcttaatggaagtgtcctctttgaatttgagggatttagttaggtcttgttgagttacaaacaggttggtggataagcgttttaccttgcggtctaatgtgaatctaatcttgacgttataagttccgtcaacttttagttcactccttttaatctcagctttaatagtcagcatattagctctattttaattagtcaacaattagtcaacatctgcttaaattaggagtaaatcagggtcaatgtaaaaagctgaggggtaaatt

SEQ ID NO: 3931 - DNA, 8295 bp, Unknown
  gut microbiota DNA sequence
gaattagttggctgattttgtaatatttaatgaatgtccctagcaaaaatccgcgaatcatgcaacaagatttcagaaatcatgtagcaagattcgcggatttcagatggagcttcccggtattatttgcaatacttctgtatcagtccgtctaccacttcatcgcccagttcttttgctttggcaaaatttgcacaggcttctttgtttttctttaattgtatctggcagtatcccagcatacgatatgcggctgcggctttcgggtctaaagagatagccttttccaatgcttctattgcttcgttatgttgccctacacgtagatgcaccgaacctttttccacccacatggctacatcctcaggagtcatttctactgctttattaatgtcgttgatagcttgctgatacattttacattgtatttccgcctgttcgcgttgcagataaaaggcggctgtaacgcgtccaccgatggcatcataaaaagtatcataatctattaccgcttcacggtatttgcctgtctgggcttttatctctgcccgttcatagaaataaggagccgcttccgatgtataaggcttggtgaaacgtgccacagcactatccatcaaggcaataacctcgttcatatctgttccttcaatcagttgtttggttttggctgccgagtaaaatgtagcggcagaggctatggaagactggttcactttttcataagcggcgtatgcctcaggatattttttcatagcaaacagaatgtctccctccaattgtgtgtaaatgggttggttgtcggcctgcatggcatcatgaataatggagagagctttgtcgtaactccagtcaccgtatggtttcttgtcacctaaagagatggtgtacgaataaattaatttagcgatattatattgcgtttcactcttgttggctgtcacttccagtgctttcttcaggtcggcatctgccaaagcgttgtgttcatcatcattaaatcccatataagtagtggcacggcgtatatatccgtccgcgctgttgggatattgttccaggaaatcgtttaatgtggtgatatattcgtcctgattttgttgtgaagatgccatgaacaggtacaccagtgcttggtcttctgtttcgggcagtccttttttgatgccgattttattcagtgacatatcgttcaaagaaagggcggtgatgctcagcgaggcaccgtatgtagttccgatggcataactttccttggcttcatccgacgatgcgtttttttggattaaacctaatacttctccattggcattcataatagggcaacttactgttttttcgttggttgtcattgccagtgtatagtaatatgccttgtcgccgatggtgtctactttggtgacggtccctgtctggcaggttgccgctttttgagtcgagtagggtagcagatagactgtttcacctaccgatgccggctgtgatgccgattttaatgctatggtctttttatcggtttcagtattaaattttacgatgtcatacatggagttggctcccaagatacgcaatacaggcaattctttactgtccgcattaatgattactgcacgttcggctccttcaaacagggtataatcggataatgccgttccattttcattgatatagaatccatttcctgtattcttgattttgttatctttatcgtatgtaacgatggaaaaaacggcttttttagctttgccggcccactttggggttgcttgtgcatagcttagctgggcggctatgccgcatgccagtatcaaaagtactttcttcatgatatagttagttgtttgttaacgatgatacggtatttataaagcggatgccgttttgtcttctgtgaagccgcgttgctttacagcttcataaatcagaatacctgcggcaaccgatacgttcaatgattctattttacccattaacggtattttgatccattcatcgcacagggaaaggtgttcgtagggaacacctgtgtcctcggctcccataatgatacatacagggtctttatagtttgctttggtgtaatcataatcacctttttccgtggctgctacaatcttgaatccgcagtctttcagatacttgatggtattagtcagattttgttcgcggcatacgggaagagtgtgcagagctcctgctgatgttttcattgcgtcggcattgacactgacactgtttttcgagggaataataatggcatctgcaccggcacattcgcaggtacgggcaatggctccgaagttacgtacatcggtaattccatccagcatgacgaataggggtgtttttccttcttcaaacaggaaaggtaccagatcttctgttttctggtaggtgacagaggagatgaatgctacaactccctgatggtttttccgggtaatacggttaatacgctccacgggtacacgctgaacagggatgagggtatttttcaagcaggtaaacagttctttggacagttcgctctgtatatctttcttcaccaatactttatctatctctcttccggcttgtatggcttcaataacagcgcgtacaccgaaaatcatttcattcttttctaacatatttaataagtggttaatggttagtgacaggtggttagtggtaattggcactagccacttatcagcgcctttgcattgttcagggctgcctctgtcaaggtagccccacttagcatattggcaatttcttttactctttcttcatcagtcaggcggcggatgtggctgttggtgcctgtttccgtatcttccttatatactttataatgagtgatgccgcgtgctgcaatctggggcaggtgggtgatgctgatgacctgacggttttgttttcccatctcctgcatgatgagcgccattttctcggcgatggaaccggaaactccggtgtctatttcatcaaagatgatagtaggcagtttcacagctccggctatcatggctttcagcgaaagcatgacacgggcaatctcaccacccgatgctacggaagctacattttgtaatgttccattcttgttggccgaaaacaggaatgtcacactgtccatccctttactgtccggttccttgcgcggattcagttccaccacaaagcgcacattgggcataccgagaggaaccagcaggctttgcatctgtctttcaatgtgcttgcccgattgggaacggagttttgtcaacacagcagcttgctttatcactttgtcatatagcgtttctttttgggcggtaagttctgctatacggtcatcaaaagaagtgatggcgttcagcttctcatgatagtcggtttgcacggctatcaattcctctattgtttgtacgtgatgcttctgttgcaaagagtagattaagttcaggcgttcatttacataatccagacgggtggggttgaactccacttcctcctgtgcgcctgctatttcatgcgacagatctttcagttctatgtaacaactgtctaaacgccctatccattcctgggcacgtgtgtacactctcgctatgttatgcagggtttgcatacattctttggtagcggataacaggctggcatcttccgaagccattatttggtccactttgtacaaacccgcttttatctcttcggcatgattcaaggtttcggcttcctgttccagttcggtttgttctccttcctgaaggtttgcatcatccagctgttccagttggaaccggatgtaatcttcatccttccggctttgctcggcttgcgttatgaagtcggccagctgtttgcatacgtttctgtactcggtataaatatccttgtatgctgaaagttcgttgtcatcttgtgccaggatatccaatacattcaattggaatccctcactgttgagcaacaggttttgatgctggctatgtacatctatcagtttctcgcccagttccttcatctgcgccaatgaggccggagtatcgtttatgaatgcgcggcttttacctgatgcatataactcgcggcggataatacattcatccggatcatattccaaatctctttgggtaaagaaaggctccatctgataggcggagatgttgaaacgtgcttctacaatacatttattggcgcctttcttgatcgctttgatatcggcccgttgtcccagtaacaagccgatagcgcctagaataatcgatttaccggcgccggtctctccggtgatgacagagaagccgggggtgaaactgatatccaatgtatcaatcaatgcataattctgtatatagatagattgcagcatattcttgctcctttttaataatttgctgatttgtcaatttgctaatttgctgcgctgttgtattccgcatggtaattagcgcattagcacattggcaacgtggcaaattaagaaattatttattatttaccagtctgtcaataatatcccttgctacttcctgtttgcttttcagcggataaggagttgctccctgacggtctataatcgttattttgttggtgtcacaacgaaacccggctccttggtcgttcaatgagttcagtacaatgaaatcaaggttcttacgttccagttttctttgtgcattttttgtttcatcatttgtttccaaggcaaatcccactaatgtctgtccgtcttttttccggtttcccagtgcggcggcaatgtcttgtgtgggtttcagttgcagtgttaaattatctttctctcttttgattttatgaccggctacggtttccggggtaaagtcggccactgccgcacacaggatgccggccgaagctgtaggaaactcgcggatggcggcttcgtacatttctccggcactttccacatctatgcggcggatgttagggtgatgggcctgaatcgttaccggtccgctgattagcgatacttccgctccacgtgaagcgcattcctcggcaagtgcgaatcccatttttcctgaagaataattgccgataaagcgtaccggatctattttctcgtaggttggaccggcggtaatgactactttctttccggccatgtcttgttgtttggcaaagaaagcttccagaatttccactattttttccggttcttccattctgccttttcctaccagatggcttgccagttccccttctgccggttctataatatgatttccgtaagaacggagcgtgtccagattcttccgggtggaagggtgtgcgaacatatccagatccattgccggagctacgaatacgggagctttcattgacagataagtcgtgatcagcatattgtccgctattccgttggccattttaccaatagtggatgcggtagccggagcgataatcatggcatccgcccatagtcccaaatcaacgtggctgttccatgtcccgtcacgctgggcaaaaaactcgctgataacaggtttgcttgttaatgcagacaaagtgataggtgtgatgaattctttgcctgcgggggtaatcacgacttgtacttccgctcccttcttaataagtccgcgaatgagtatagccgctttataggcggctatacttccggttatacctagtacgattttttttcctttcatactcatttcatcattcccgattcacgtagtctgatttttgtcagtacgtttttcgtgttcagcgtaaagtcaccgttcagtatccagctgtagtagcccggatctttttgtaatacttcgctgaccgacattcctttgtatttcccaaaattaaagacttccacgcctttgtcatcataaacaatgcgtccggcgaaatctacgttcttgttgaaacttgaatattcggctagaaatgccatatcgttttgcaattcttccggatagcggtccaattgggatttcagtacttcgtatgtggcacgtgtgtcggcttcggctgtatgggcatcttccagattctttccgcaatagaatttataggcggcagacagggtgcgctgttccagtttgtgataaatcacctgcacgtcaatgaattttcgtttcatcatgtcaatgtctactcctgcgcgcaggaactcctcggccagaaccggaatgtcgaaacgattggaattgaaaccggcaaggtcacatccctcaatgtcccgggctatctcttttgccacttccttgaaagtagggcagtccgccacatctgcgtcataaataccgtggatggcagaagattgttcgggaatatgcatttccggattgatacgcatggtcttcgtttcttcgttgccgtttggatacaccttcagatagcatatttccactattctgtctgtgtttatatttgttcccgttgtttccaaatcgaaaaaaacaataggattcttcaagttcaatttcattttcagcttgtattatatattgtttttccgccacatggtggcgtgtcgtttttagtcgttcagcatcataggcatcagcagcatcagcaggtcttctttttcttcctgttctacaggaacaataacacccgcacgtgaaggatcagccagttcgaaaagtatttcctgtgccgagatattgtttaaaatatcgatcaggaatgttgatttaaagccgatgctcatggggcttcctgtatattggcaagtcagtgtttcttctgctgaggtggagaaatctatgtcttgtgcggagatctggatctgattttcactgaggcggagttttatcaaactgcttgcttgtgatgagaatacagatacacggcggagcgcactgatcagcatcatgcggtcaatggtggccttgtgcggattatcctgcggaattactgaattataattgggatagcgtccttcgataagacggcatatcatgctgtagttttctaatgtaaacgtagcgttacggtcgtcaaaatcaatttgcacatctccttgttctttcggcaacaggttcttcagcagggttgccggtttcttgggcagaatgaaagcggctttttcatcgccgtgtgccacaaatgttttattgcgtactaatttgtgcccgtctgaggctacgaaagtgatgtcttcggtagtgatatcaaaataaataccattcattaccggacgtaactcgtcatcggcagtagcgaacaaagaacggttgatacctgccagcatcaccggagcgcccattgttacgtgtaccgcatttgcgcctaatgcgggagcctgcggatattcgtcggcattttgtcccatcaggctgtatttaccattctgatattgtacggtgatttccagattctctgtatttaccaggaaagtcagtggttgttcgggtatttctttcagggcttcgagtatggtttttgaagaaacggcaaagcgtccgtcaccgtcactttcatttacttccaaagaagtggacagggtcgtttcgctgtcagaggcagtgagcgacaacgttccgtcagtcagttccattaagaaacaatcaagaataggtaacgaatttttggagttgattactcggctaatagcttgtaaatgactgaataatccagtacttgaaacgatgaacttcatagttttatattattatatttatattctatatctctatattcatttaactgccaaagttacgaaaagattatggttcaagcgcaaaaaatggcgaaaaaattagtttactcgcaaggaaaagtgtactttcgtggcgaatttaaataacgtaatatggaattagcaggaaaagtaatagcagtcctcgaaccgagaggaggagtttcaaagacaggaaatgaatggaaagtacaagaatacgtaattgaaacgcatgatcaatatcctaaaaaaatgtgttttgacgtatttggagcagataagatagcgcaatttaatattcaggcaggtgaagagttgaatgtgttttttgatgtggatgcccgcgagtggaatgggcgttggttcaacagtatccgtgcgtggaaagtagagcgtgtgggtgcccagggacctgttgcaccggatgctccgtttcctcccatgaatgctgctcccgctgcaccggtagattttgccgcgacagacgagaaggatgatttgcctttctaggggatagaggattcccataaacataaataagccggcaggatccgtgaaaaggattttgccggcttattttatatagtctgtttttatggtcattctcaatcatggtgtgaagtgttgagggatatttgggctcagcggaaatttctggttggtaagtttta

SEQ ID NO: 3932 - DNA, 2479 bp, Unknown
  gut microbiota DNA sequence
ttttggttaaaaagctatgaattaatatgtataatgcgtgccaatgcatgatgaaatagaaataatttttatatgaaagtagtgattttagccggaggttttggtactcgtattagcgaggagagccagtttaagcccaagccgatgattgagataggtggcaaacctatcctatggcatatcatgaaatggtattccaagtttggtcataatgagtttattatctgttgcggatacaagcaacaggttatcaagaattattttgccaactactatatgtataatagtgatatgacattcgacttttctgccaatgggaaagtaactgtacatagtgatcatacggaagactggagagtgacggtggttgacacaggtttgaataccatgacgggcggacgtcttaaacgcgttaaagattacatatctggtgaaccgtttcttatgacttacggtgatggtgtgtcagatgttgacattaatgaatgtatccggtttcatgaagagacagggactatggtcacgttgacaggtgtgcttcccgaaggtcgtttcggagtaatggacattgacggttctatgataaggtctttccgtgaaaagagtcgggatgatatgggatggatcaacggaggtttcatggttgtggagccgggagcattggaatatatagaaaatgacacaacgacctgggagcgtgaacctcttgaaacgcttgcctcccgggggcagctttcctgctataagcatcatggcttttggcagtgcatggacacgttgcgtgacaaggagaaactggagagcctcttggcttcgggcaaagcaccttggaaatattggaaatgataaaaataaaaggataaatatggcattcaataatgtatatagaggaaagaaagtattgataaccggtaataccggtttcaaggggagctggttgtcagcatggttactcatgctgggagcggaggtgtacggctattcaaatagtatacctacccaaccgtccatgttcgaggttgttggcctacccgacagaatccatcaccattatggtgacatccgtaataaagaggagatgaatgattatgttcaggctgtaaagcctgactttatctttcatcttgctgcacaggccattgtttctacttcctacaaggagccttttgataccatcactaccaatgtggtaggtacggtttccgtgctggaggccatccgtaatatcacatggaattgtacctgtgttcttatcaccagtgacaaggcttacgataacgtggagtggatctggggatatcgtgagacagatgcggtaggcggaaaggatgtctattccggttcaaagggtgcagccgaacttactatcaagtgttattggaaatcctttatccaggctatgcccaatatcaaactgggagtggcccgtgccgggaatgttatcggaggtggtgactgggcgaaagaccgtatcatcgtagattgtgtcaaggcattttcaaggaatgaggtggtggagatacgtagtcccaaagctacccgtccttggcaacacgtattggaaccattgagcggttatctcaatcttggacaatacctttatgaaggaaaggtggagaatggagaaccgtttaactttggtcctcgtgcggagcagaccaagactgtgtttcagttggttcaggatttggccgaactttgggggctggataggaatacggcagcccggctgaccggcaatgtgcctttcgaagaggctactttattgaagcttaattgtgacaaggcactggcttatcttgactggcattctacattgcactatgaggaatgtgtacattttattgctgactggtacaaagctttttatacagatgccaatgtggatatgtatagcttaaccactgcccagatagattcctatgtcagggctgccggagcacaacatttaaaatgggcggaataatgatggaaggagtgacagttcatcccctgaagcatattgtcgtacccaaaggggatatttatcatgctttaaaatctactgatgaaggttatgtcggatttggtgaggcttatttctcacagatagaacacggtgcagccaaaggctggaaacgccataaccgcatgactttgaatctggttgtgcccgtcggtgctgtcaagttcgtaatctatgatgaccgtgagggcagtcccacccgtgggcagtttgaagaaataaccctgtcacctgaaagctgctatcagcggcttactgtagctcccggactatggatggccttttatggagagggggagggcatatccatgctgatggatattatacctgaacctcatgatccttcggaagcaagccggatggagctggaggcgatagactataaattttaaacattgtagctttatgaagatattgattacaggagctaccggatttgtagggcaaactcttatcccccaactacagaaacag

SEQ ID NO: 3933 - DNA, 37168 bp, Unknown
  gut microbiota DNA sequence
gataaatatatagttaaatatgcaatctacatgatcttatacattatttttgccgataagatcaatttccattcctaaccgattcggtaaaataaactatttatgaacgctgtattcttcaacgaatacatccaaacaagccctagatttatgaccgatttcaccccgtggacactctttgtcgatacaggcatcatctcagtactgctactgctcggcaaactcatgagagtaaaaataagattcatccaaaggctgttcatcccccccagcctgttggccgggtttataggactgtccttgggacctcacggtttcggcatcatacctctttccacccaaacaggaacttatgccggcatattgatagccttcattttcggcgctctcccactcacctcacaaaaggcagccaaaggagatgcagacaatataggcagcatgtgggcatattcacaggcaggaatgttgttgcaatgggcttttggaggactgttgggattgcttgtcctgaaccggatatggcccttgaaccctgccttcggcatcactatgccaagcggctattgcggcgggcacggtacagcagcagccatcggacaggctttcagccagttcggatatgacgaaattctaactttggccatgactgccgccaccttcggtatcgtagcggcagtcattatcggactgatcattataaaatgggggacaaagaaagggcacacctccttcctcgccaattacgatgaccttcctcacgaattacagacaggcctgttgcccggcgacaaacgggaaagcatgggtgaaagttcttgctcttccatctccattgacccgctgaccttcaatcttatcattgtagcagtgatagcattaggcggatactgcatcagcaaaacagtatcccactttatgccggggtttgaactgccggtattcagttgtgcatttgtggtaggtatattcatcaaaaagatattcgacaaaacaaaaaccagtgattatgtctgcccgcaaaccataggccacatcagcggagcctttaccgattttctggtagcttttggaattgcttccattaaaatatctgttgtaatagagtacatcatacccttattaattctgttagtctcaggattaatcgcaaccctgatttatgttctggtcatggcccgcaaactaatgaaagaatgttggttcgagaaagctatcttcacatggggatggtttacaggaactatggctatgggcatcgcattgctccgcgttgcagaccccaaaatgcgcagccgatgcctggataactatgcactggcttacttgttcatcgccccggtagagatttctctgataactttcgctccggtagctttcttgaacggttacgggctggtgtttacgggaatctgcctggcggcaggacttgccgtactggcaaccgcctatatcaaaggttggtttatcaggaaacaataaatggaatgacaccggaataacaagataaaaaaagtaagttaacttgcttgaccaagcaacataggttcgtcagccaacgaacgtatcttacttagctattgaagccaacttactttttttatatcaaaacgcatgagcttatacccgacaaagtacgcaaaagtccttgtcatacaatctccgcaaactcctcaatatgattgtccacatattctgcaatccgggcagttaccgactcttccatatccatgaactgctcttccaactcatcaaaggcctcgtattgctcatacattgccataaattcctcatcatccctgtccttttccaaatcagcacggttctcatcatatattttcttcgcgctataaatcaatttggcaaattctttcgctccaaactgccgcattgcttttgcaaaaggattatcaaagatataaggtccaaaaccattctgtatcaattgtacaaaaccaccttcatttatttcttcacgcaagaaatgataccccaacaatgaatgctggtaaccattgagcaaaggcattgtttccgcattgacaacacctcctgtcacctccaggtatttatctataaacaccttcaagaaaccatccatgccctcttccgcacctcggcgcaaagcttcgtccgtaattgctattttatttgcttccattcctatcattataatataggtacaaagatagaaatttcatcggaaagaaaaaacattttggcaactctagtttgcaaaatgctgtcctgcaataaatttattttatttaaagataaaaagtgacgggcaacaagttgcagaaaagaataaaacgactaactttgtaggcgaaaagaataaccaatcttttcacgtggttacgaatatttattttattaccaaaaaacgtaaagaatatgacttattcacacgaagtagaacacatgtgtgttgtgaagaaaggtcccaatcacggaccggctcctattcctgaagaaggaaagtgggtaaaatcaaaagaaattaaagacatctctggtttgacacacggtattggctggtgtgctcctcagcagggtgcttgtaaactaacccttaacgtaaaagaaggtatcatccaggaagcattggtagaaactatcggttgctcaggtatgactcactcggctgccatggctgctgaaatccttccgggcaagactgtattggaagcattgaacaccgacttggtttgtgacgctatcaacacagcaatgcgcgaactattccttcaaatcgtttacggacgtactcagtcggctttctcagaaggcggtctgattatcggtgccggtctggaagacttgggtaaaggtcttcgcagccaggtaggtactttgtatggtactttggctaaaggtccccgttaccttgaaatggctgaaggttacatcaagaacgtattcctggataagaacgacgaaatctgcggttacgaattcgttcacatgggtaagttcatggacgaaatcaagaagggtactgatgctaacgaagcgttgaagaaagttacaggtacttacggacgtgtaactgaagaacagggagctgttaagaaaattgatccacgtcacgaataattataaggaggaaagaatatgattagagaagtaaaattcgaaagccaagaccgtcgtatcaaacagatcattgctgctttgaacgaaaacggcatcaaagacatcgaagaagctaacgcaatctgcgaagctgccggacttgatccttataaaacttgtgaagaaactcagcctatctgtttcgaaaatgccaagtgggcttacgtagtaggttctgccattgcattgaagaaaggttgcaaaaacgctgccgaagctgccgaagctatcggtatcggtctgcaggcattctgtattccgggttctgtagccgacgaccgtaaagtaggtatcggtcacggtaacctggctgctatgttgctgcgcgaagaaactaaatgttttgcattcctggcaggtcacgaatcattcgctgctgccgaaggtgctatcaaaatcgctgcaaaagcagacaaagtacgtaaagaacctctgcgttgtatcttgaacggtttgggcaaagacgctgcacagatcatctctcgtatcaacggatttacatacgttcagactgaattcgattatttcacaggtgaactgaaagtagttcgtgaaatcgcttattctgacggtcctcgtgcaaaagtaaaatgctacggagccgatgatgttcgcgaaggtgtagctatcatgtggaaagaaggtgtagacgtatctatcaccggtaactctactaacccgactcgtttccaacatccggttgcaggtacttacaagaaagaacgtgttcttgcaggtaagccttatttctcagttgcatcaggtggtggtacaggtcgtactcttcacccggacaacatggctgccggtcctgcttcttacggtatgacagacactatgggccgtatgcactcagacgctcagttcgccggttcttcatcagttcctgctcacgtggaaatgatgggattcctgggtatcggtaacaacccgatggtaggatgtacagtggcttgtgcggttgacgtagctactgctttgagcaagtaatataatacattgctaatatataaatccctataaccattgcagttatagggatttttatttccagtaatttcattcgtttaactgatgacccaccccctcctatttttcaatatcaatcaaaagtattgcaaataattgtctaaaattacggaatgaaattggttctttaaatcataaatcggttatacaattaagagttggtttaggataaaaggaggtcaaaacgaagattatttatatgcaatctggcatttttgaaaatttaaaaacaagcaaaattcaacaacctgttttatcctgcatatactcaaagaacgattatcataatataaaattgacgagcaagaaaaactagatcaaatccctgtatcttaaatattatcaaaaaaaggaaggctgttttcacgccctcctgtctgtccgcacaattatataatcccgtatttgcagtatctcacagaaggtagagttagctgatgtctaacatgatagcccctttacctagttgttttcggtctgttcgaactaatatacattttaatatcagacttcccctgccaaattcacatcaaaaacgaggttttacaaatttgtcatctggagatgtaaaagacaaccccggaacagaacggcggatatctttataggcatgttctttaatcagtgaataatctgtagcatccaaagcatagtaataatcatctttatctgtcgataactttacagtccagtcaaacatatttccaaagatggtcaactcatcttttgccggatcgaaaccggggagagctgatttcaccaaacttccatcactattgataatataaaaatgatgcttgctatctaccatataccccaaagtccgacggctacggaattcagtaataaacacatattccggcaagactccttcaggcaactgaatagctttcacatacggacgtcctttggtgcacttcagatggaacaatttatggttggcatctaaaaccagatatccctcatcatagtctttacgagtagttggattgcccgaagcatagcatgcaggaaaagcaaaccctttctgaaccagcatatccgtaaacaatttgcttttcgcctcatcgatacaattcgtctccatacgaataaattctatacctttatcggtaaaacggaatgcatcttcgggcattttcaaatccacccgtttggacatggactccatcagaaaatagagtcctgtctggggagcattgatggctgacggcacactcttgaaagtaaagtttgtcaattgaatatctttcggactaactgccttaccacaaatggtatcagggaaacgttcgtccgccgtaagctggcgcacatagagagaaggcaacaaactgtctacctgctgttgtgtatatgtattgcctttcgtatcatagcggtgaagttgcttattctcatctagttgtgtaataacaaaatcaccaagtacggaactatacatagtaaaaggagttttgacaggcttcagtgtgagaaaagcataacaccaaggcaactgccatacaagcaggacagctacggtaatataaaaaaatattttgctgaatcgaatcatgtttgtttgattttttaataataaacattcaattagtcttgcttaccggccttgaaccgtaccacagaaatccacgaaagagaagcggcaagcaacgtataaagtgtcagacagggcaagaaactattatatgcctccgctcccggagccagaaagtagacacggaaaatcaatgccgcaataatcagattcaaaaccctgcgcttccatgtgggttccaggcaaatccatgaaacaagcagataaccggcaaatccggcaaaaaaccatggagccgcagataataaaacacgctgcaccaactcacttgtaaaatgttgtggcagataaactcccatcataataaaactcatagcaaaacaggtcaccagtgcaagtacgccataggccaacattgacatgaccattttcttctgtgaataaggcaaatgcaaagtaagcttcaaacacttacgttgcatctcggggaaaaactgtacggcagcaagcaagataccgataagtaaagggacaaattgcaacaaatcaataaatatagcatccttctggaccatcactacccataaatgatcgattccctgtatggcaatggtacggccaatacgaagcatggaatatcctgtgatccctatcataaaaagagttgccagcaaccaataccaacgcgtttttatccactctttataaaatatggcttgtatcatatttcttctatttagtttacatattaatactttccggtaagaccgataaaggcatcttccagacttacattttcgtgctgcaaaccagtaaagggaacttgactttccttcaacagtttctccacatccacgggaggcaaaaaggagtacgtttccaaggtttgacgaatgacagccggatgatagcaagttgccggcaactgaggctgataaccctcgggcacagtacaagtatatcttctcagctctttcatcaacgtttcaataggctgttgaataaggatagagccataatccataataatacaatcatcaatcaaccgctccatatcctgaataatatgggaagtcaggaaaacagtcttgttctcggaacgggcataatcacgtaaataatccacaaaaagacggcgatagcccggatcaagtcctaaagagaaatcatccagaatcaacaactccggattttgtgccaggatcagtcccaatgccacttgcgaacgctgtccgttcgacattcttgagatacgttgcaccggagctaccttcaatttattcatcaagtcataataagcctcctttttccattgtcccggataaaaagaagcataaaacttttctatttgtgtgatattcataaactgatattgaacatgaccttccagcaataaaccgatattcctgcgtaaagcaggattcatggtctgaatgttctcaccaaagatgcgacattcgcctgaacgcggctgaagataaccgctcaatatattaatggttgtcgttttccctgtaccatttttacccaacaaccccaagatacacccttgaggaacttcaaaactcaagttctcataaatcttgcgttgaccgtaataatgggtcaggttcttacattctataattgcactcatgctttataaatcatttttcgtttgctattagaaacacgccaggaaaagaataggaatcaagataccggccaccaactcgattcctcctctgccccacaatcctttaggaccttttatcatcactataccgctgacagtgataataatcagacagacagcaaaagcatcggcaaaccaagtccaccacttacccggattgaaatggagttgtaccatggaagagatcagcggacggcgcttcaccccctcgtagacagcatcttttgtccgggtgttaatcaccagacttgagcctcctttcagaaaaaccttaatcagatccggttccgggtaataatatttagtaaaatttccggcttcgcccagcggttccaacaaagtcaaaatcatcttctcattaactttgctcttgtccgacagatcctctgttattttatattccgttcgtgtaactgtataatggggatttatgctatccctatggttcatcacgatacccgaaatagcataaatcaaaatcattcccgcaaagaagaaagacagatcacgatggatgatccggctccacttgtggaatgcagtacctttattctgcgatttcataagaactggcttccatatagtagaatgacagataatctattccggtagcagcttttctttctgctatctttgcgcgaaagtccgcaatacgggcttcaggggtgctggctgtttcaccgcgtgcttttttttccgaatcacacccggcagcagtttctccatgagatttttcagtctgtgctttcagtttagcctcccagttttgcaagtaagcttcatctacccgctgttcctttaacgttccggtcactgtgacaatagcgttgatgcatttggtatcaaacgagcccaaaggtccggcttccacacgaatcgttttggtatcatcactgcccatcaggaatatttttgtagctccgtgcttgcaggtatgtgtgcagattccttcgatagtcacctccttgttggccagtgaatcggcatgcaccagcagattatcgatgctcaatgccgccggagccgcctgctccgttttttcagactggctctgtttgttactgtttccacaagaagtagtagttactaaagctgccattaaggttgcagcgaccataaacttaattttcatatgctaattgtttttattttttaaaaaaagatgcccaatgaacaaacggcatactgggccgttccgcattttttataatatgccgcctgccattgaacagacaaagacaggttatattgtttcatgatgggataatccccttgcagacgaatccccaccatactataactatcagataaatagtcaatatttgccaataaagtctgggcggacgacttcgcggtattcaatcccggtaaagaatattcagccgataaattggcataatatccaccgttagcttctgcggtcaatcgtagcagcctcttctgatacagcaaacgggcacgcaaagaactctccaaaacagacaagtgaacaaaccgggatacggcgttgtaatccgtttccaaccgatggtagattatgtttgggacaattgctcctccccatacacctttatcggtcaaaagcttctcccacaaaccacttacggcaatccgactattcgtgaccttcattcccggagatgtactaattaatgctccataggagcttccgcccgcctctccgtaaatattctccattcctttacgaactatatagcctgcatccagtttcacagcaaggtgttctgcctgctgaagttcccgcatccaggtcacgtttcctttcaaatcagtcgtattcaattccagcaaagtgagattattggcattgctcaatttcttgtccattgacatacggtcaattgaaactgtggccgatatccccttttccgtatcaactggcagaatgcctatgcttcctccccaccggatgccttgatgcttcgtcccggtctggtttccggcgaaacgcacataatccatgcccaatcccaacatatggtataccgaagtagagcctttatctgcaaggaatgaaatctcacttttctgctgataaagccggaaatctgcggaaactcccaaacgatatgtccccagacgatatcctgctcccaaagcaaaagagagatcggaagctgtattacgtggacgcggatctttatcccgataattatgaaacgctctgtaaccaccggtgattccccatgtccaggaacctgactcactggcgtaacctccattgaaataataagtttctcccttcaggaaaccaccaatggaatcaccagtcacgtaaggagcgatcaatttccagtctatattttcattccataacacattctcctgcttctcactcctgtatcctgctgaaccgaatacacgatcacgttccgaaagaataacgaaggaattgacatctaccccgatacgggtatccttatcaccttcctgtttcaaagatgcttttcctttatcatgataagctccatttacgtccagccttgtccatgtatacggagtatagtaataataaagtgccggattctgccatatctcgccacgaaatccagtcgcaaatgaagcggtacggattaccttatcggacagggagagtgtgtcggtagtctgcccgaaggcttcctgccgactctccacaaataaagcaatcagcaacataatgataattcggattagcatcatgaataataaagatttatatatcaataagacggattcaattatttgttaaacaggctcggagtagccgcaggtgtgaaatcaacggtagagttatttgtatcctgcaatacttcccgatcaccatccttgtaggtggctttacgcattacgcactttccgatgttttctgcaacggtattgttcataccgatataagtatgccccatatccagcccggtagaggttacattccactgccattcattggaagcacctacatttacagcatcaatcacccattcattggggaacttatatttgctttgcggtttactggctgttccattttgcataatatacgtatagttgtatgcatagtctgaaatatacttttctttagtcatacttttgggtaatctgccaatagcataagcgcgatttccctgtttattcaacacccagatagttttggaataacaataataaacatccagattgggaacagccggattatccacatcttgctttgattcaatataccactcaaaattggctttacttaaatctatagaattcggattagcctctttatgattgatcgcattgtcacaaaggataaaggattctcccggttgtaccggataatctgttccactgcccggtactgctacaacagagcctaccgcaatagcttcatccatgatatccggatctaccgattgatatttctgagtagtttggaattgtgattccataaatatcaatccatccgcatacaaaactttatccgagttattatagatacgtatatactggtcgccattatattgcttacctgcttcattataggttccgggaataaatatctcggcaatcacaaaatcaggatcacctgtattgagtacatgaaccttcagttccagcttgtacgaccctccagatacggccacattctgttgtactccctgtacatcgacttccaccggagttccattctgtgagtaagttcccttaccaatgaaagttacattatacaacccgtccgccagttcaatactctgagccggataggtaatgtctgtcttgacagatgtatttacattttcaaaagtataggttccaccggtcagttgcagcccctcgatagttgtatctacagtagtggtaatacctacagtggatatgctcactttgtcatcatcactacatgcggtaaatcccagcattgtcacaaaaaggactaacattgtcaattgattctttttcatcttcatctctattttattgttcatttactaaaaggttaagttcatttccataccgaaataaggcgattcggacgttctccgttgcagtacgccccgtaacgtataatcaggataaatacccaaaagccggtttacataaaaagccagattcagatacttaccgatccgtttactcgccttcaaattgatatccatataaaaaggcacggtagtacgctcaaaataagtggctgaatatttctccaccagatgctgtaactgaatattgtttttatcctcttcgcgaaacggatgcgtttcaccggattgatctatatagcttactggcacgccattattccacaagttccgtctgttggtataccaagtgcattgtgccgacgtagagaaagtaagtcccaaacgctgtatataggtatcaaacataaagttcgtattgaatgcctggctttctgttccgttgtccccattgtacaatcccacatatttcagctgtttattgtccaacaatatagaagaggccttatattgaggagaatccgaattataaattgtctttatccaggctccatacatagtgacgcgagtcttgagcgattctattcgtttggaagcgaactgaaactccactccttctttacacaccttcattacattaccttgtgtggaatacacatccagattatattcatttgtataagtcaactgagaaagttctggaggagccgtcaatgctgatccgtcgatactagcaggatcatatagtttatatgccaatgacctataataagtgatatcatcaaaagcattattcatccgttcgcggaaataagttatcgacaggcggtttcccttatagctgacgtcggcccgcacttcccatttcatgttacgtgctggttccaattgatagtttgtattatcccatttatatgtcatcatattgatacggcgataatccggattggtatggtaataattcaactgaatcaaatctacatacttaaaatccggatatagctgtgcggtggtcggcatacggctgatccagcccaaacctcccgaaaaggaaacatcccatccgtttgataccggtaaactccattgcaagtccagacgaagatcgggatatatcttgccctgcatcttatatttagtgtccagccccaataaagactgcaaacggataccagccgtaaaagccaatttatgtctatttacaggaagattcaacacctcctcggcatagaaggcgaaaggttgcagctccggtatatccttaaaacggcgaggccgtgtactcaaactttcactgatgggccgtgtcacatcgaatacctggccttctcccaaattcttctgataattccattccatccccatattcatcgcattctgtaatacccccaacgggaaagccaaccgcgtacgggcggaagccgtaacatataaaggtttaccatcaatatccatctgtgccacataattataaggtagatagatgccatcaaactctccggtttctgtctgagtagcaatagctgccggacgattcagagaaacggactttatttcacgcatcttctcccactgctgactgacagaagtagccacaccaacctcacgaatccataaatggaccggaaacttcatgctccatttccccgctatcttcaggctgttaaagtccgatttataagaatcttcctttactgtcgcatctttatccctcttcgcatcatcaaacgagccggtataatcggaactgatattccaatgaatattacgttcattccataaccatttgccatccaagcgggcggaagcagtaaggcgagtgtaatttttcacactgttacgcggatctattttggactccaaatagtttaaatcagcattcaacacgtaacgcccgttcccatccagccgaattcccttgcctacagaaaacagtttactggttttatcagccttaaaacgcgcagacaaggggctctcattcattttacgctgaatgattaccgcaccgtttgccacattaccataagccacggaaggaatgccacgaatgatttccaccttctcaatattatcggttgagatggtacgcatatccatcccttttgacattgtgctcgttgcattcactgcggaagtactgtttggcacatattgcagattcgcatccgtattctgggagataccatcaatataaaatccaactcccaatgaagagatatcctccgtcttacctgtttcacgtatccggatcagattggcctgccccatctgaggatcagccgactttcctccaggtactaattccatcaagtcactgaaactgctgggctgaagatgtttcatggctgtacggtcaacgatagaagcgctggtagcgcgttttgattcagaagcggtcaccactacctcgttcagcgccatgaccgaaggttttaaataaaagattgctgaaatatccccaatgaccttcacttctttttctgtagaatcatatcctaaataggatacaataacccgataagttccaggatggatatgtagaagttcaaaatgtccattcgcatctgttattcccccataaacaatctgcttatccacaaacaattgaactgtagcgtaatccaacgctttataagtctgctcatccagtacagttccccgaaatacaaatgtctgcccccataaaagagacacattgctacaaattataaataaaaaaatatatgcaatcttacaaatcatttcattctctattggtttgcaaaattacaattcataaaagctcggcacaatccccatttctaggtatatactaaattatacatagatcggagatacctacatgacggtatacaatttacaaataaaatcactttcacctaaactttatattcacattttttttcaatgataagataaatacatctactttttacctgtttcaatgggggaaataccacgccatataaatacagttcattatcaacatattaccccataagcaatggtatgaaagcataatggcatacaactttatattacaaatccattggcagaatatttatatccggcagtcaaggaacatcggatttattaagtaatattcctcctttaaattcatattaaattagcaaatgaagaaaagcaactgcaaaaaacactatatttgtggaaatgaattcaaattaaacagttagattatgggtactttaggttgcatcaatgacatgatgagaagagataaagaaaatcgtgaactacgaaaggcaggaaaggaacgcttgaatgaaaccagaaaccgactgattgatttgaacaaaaaagggcactcctcccatctatcccttgagcaattagaagagatcagaataaaaacgcaagaaaaagaagaagcggaaacccaccagctcttcaaaataaaattaatcatgttaggcattgttctaatagcaggagttctgatatggataggaattacttttctttaaaattccactctctatttttctttcttattccttgaaaaaaccaataagaattcttatatttgtaataccaacttggaataaccttaaaaacagatagatatgaaaagaatattattactactggttttatgtttaaacataagtatggtgcttggacaagagtataaaaattgggaaaaatatgatatagagggattctatattattgccaaatcaaaagcagaagccaagattagcaaaaatgtattgagggagggagcagattattatatcctcaccgaaatggatgaccaagtattcccatctggtgtcagcaaaaaaataactcccaaactctataaattaaaagatactgaaatatacatatttttcagctttcctcctttcctatttgatgccgataatggaatgatagagattaaagacaataaaggaacttttttcaaaaagccaacacaataaacatcaagatactccatcaccaatatcttcatcaactacattcattatccctaaagatgaacagggaaaagtatgctataaacatacaccatccacaaaagaaataatataaattaaaataccatgcctaaaattacaaactggcggttatagcctcagccaaatcttcataacttgccaacgggttatccgtgaaaacactacggataaccaactctttatctatgacataaacacgaggtatccccgatttagcaaactgatagtataccgtgcggttttcttgggccgaatagggcaaggtcaaatgattttcgttccaataacggacaatctctgccgagctctcttccctgctaatacaaaccatccggattcttcgaccgtaatccgtatatattttttgcagcacaggaagttctttccggcagtccggacaccccgtatgaaaaaacacaatcaaagaaacctctcctttcagagtttcggaagttattatttgtccatcatccattgccacagagaaaacaggaatgctctctcctgtttgtaaatcaacagtaccttcctccacatcatcatcaatacacgccgtacacattacacaggtccaaaacagaaaacagactgtttttatccaattcttcatttccattttcattttcatttccatttttcttctttacaaagataacatgattttcatgaaattactatttttgcagcatgaaacaagaattaaaagaaaaccaaggactacctgcctccttactttggacgctagcaattattgcgggaatctccgttgccaatttatattataaccaacctttattaaaccgcatcagccgtgatctccaaacatccgagttcaccgccaacctgatagcaatgattacccaaataggttatgccatcggattgctgttcattattcctttgggagatttatttaaaaggaaaaccattattctaatcaatttcacagtcttggtcgtttcattactaaccatcgcactgactccctatatccatctcattttatttgcctctctactgaccggcatttgttcggtgatgccacaaatctttatccccatagctgcccaattttccactcccgaaaccaagggaaaaaatgtaggtatgattgtatcgggattgctgacaggtatcctggcctcgcgcgtagtaagcggaattatcggtgaatatttaggatggcggttcattttctttgtggcagccgggatgatggtgatatgtgtcatcatcatcatgcgtgtactacccgacatgccgtgtaatttcaaaggcagatacagtgatctgatgaaatccttgttttcattggttatggaatacccccagttgcgtatttcttccttacgtgccggaattgctttcggctcatttcttgctctatggacttcattggcatttaagatggaacaagcccctttttttgcgggaaacaacattgtagggttattgggattatgcggcatagcaggagctctcaccgcctcgtatataggaaactatgtacaggttttgggagtcaaacgactgaattacatcggttgtggtttgatatttgcagcgtggttctcgctttattccggtcagaactcctatgtgggaatcatcatcggaatttttatcatagatataggcatgcaatgcatccagttaagtaatcagactacgattttctctcttaacccgaaggcggccaaccgtatcaacaccatttttatgacgacctattttattggcggttccataggtacacttcttgccggaatattttggcactggtttggatggcagggagtagtaggaacaggtatcacactggcaacctgttcctttatgataaatatcttctcaaaaaaatagatcaggaatccatatcgcttagatgcaattccagcgccttgaccgaaatataaatctcgcgcacagaaatccccaaagaaataatgagcagcacaagcgccagtccaaaaatatatacggatataaggtagaactgtatatacattaaaaacatactgaccacacaaagcaacaaacttccgatacctgtcacctgcatggcacgtgtcagataaagacgcttgcggagattagcaatctgtgctgctgtcacagccgaatgattctcacgatattggtccttcaacgtacgcactaattgagcgtatgaaagaaaacgattagtatatgccaacataatcagcgatatggcagaaaataataaagcaggagttgttaaatctatttccatttttataggtatttcaaagttagaatattgcaaagataaagtaaatatcccgatattctccttcctttttacaatgaaaggaatatctttgcaataaaaataattcaaataaactaatatgcaaaccataaaattatacataaaagattggttggctatccatccttacatccaacaacaggctacagacagatattttgtcgatctggctaaccgattatactccacttgtacgataagaaagattcccgaatccataaaaaagaaattatgtctttacaccgctgcctattttgaagatgtcatttcaggtttaggtctatggcaagcattcatcaaaaaacatctggaactatatgatacgtcacttcctttctataccatccggccggattatataaaagatgagatcaatgaagaagatatccgcttcatcatttggaacactttagagaaggctccatataaacatccgtatatcaatccgatggacaggaatatcgaagaaacctcgcattcatttttccggatattggatgaagagtatgaaacggctcccgccaatgacacgttacaggatttctttatgaacttcaaaggaaaagagaacgcaaaccataaactacgctggctgttcggacacacttatctcacagaaccatctgtacaagaatatattgcacaggttacagaaaccgacaaattcatcattccatgtggcccccttgccctgtttcttcatgaatggattgacctgctgaccaacggagaaaccgaatgttgggaagagatagaaggactataccctgccattcccgaaatatcggatgaaatgaaggaaaggaaccaccatacctatcaattgttcacgcaaggcacaaacggtgcccgtatcgtatatctggaaggatataaggaactacaccgtttccttacccaagtattacaatggccggacgattccaatcacactttgccccaaatgaaggaacataaggatttcatcatgatggtgaattccgaaaaaggtattctactggcgaaagatatatgcaaatatatcagtgaccctcttaacccgatgtatgatgccgcaacggctgcccaagaggcattcagcctgcttactatcccgaccaaatgcccaccggacctgatggaatatgtaataaacaaccactatatccccgatgcacaattccccgaatttggtgaaagggaactggttcaaaagaatgcggactttatagcccgccactccttattatattactacaggggagattagactctccccaccgctacttcgttcaccaaagatctactttcagcaaagtctttcacattttgcagagtagtatgagcaatattcgtcattgcttctttggtaaagaatgcctgatgagaagtcacaatcacattgttgaaagacaaaagacgggctaaagtgtcatcatcaataatcttgtcggacttatcttcataaaaataaggctcttcttcctcgtatacatccagaccggcatatcctacctttttagtcttcagtccctctatcaaggcattggtgtgaatcaactgcccacgccccgtattgataatcatcactccgtctttcattttactgatggaataatcattaatcagatactttgtctgttctgtcaaaggacaatgcagggagatgatatccgaactatgataaagttcatccaaagtacaataaaccacctgatgttcacgggcaaaattgtaatcgggataaagatcatatgcaagaacattcataccgaatccacgtaatatctgaattaaaatcttggcaatcttacccgtaccgataattccggcagtcttgccatgcatatcaaatcccataagcccgtgcagggagaaattcccgtcacgtgtccgcattgtagcacggggaatcttgcggttgagtgataacatcaacgccaccgtaaattcggcaacggcataaggtgaataagccggtacccgtaccactttcatcttacctgccgttgccgctaaatccacattattataacctgcgcatcttaaagccagcagtttaacaccattatccgccattgcccggataacttcggcatcagccgtatcgtttacgaagatacaaaccacatccactcctttggtcaacaccacgttattcatattcaaatggcctttgtaatacctgatatcaaagccaaacttctcattagcctccgtaaacgagcgttcgtcgtagggtttcgtgtcgtaaaaagctattttataagccataattgtttttccatttatagttcatataaataacaaaaacacggcccctactgttcacatactgacttatagttttttcagttccgtgtacaggcgctgtacaggaagccccatcacattgaagtaactacctgaaataccacggacaccaatgaaacctatccactcttgtataccataagaaccagccttatccatcggcttgtaaacccggatataataatcgatctcctcatcggacaattctgcaaacgttacttctgtcacagctgaaaaacttcgctgagccccggcggtagtcagacaaactccggttatcacctgatgggtcttgccggaaagcttccacaacatttgccgtgcatcatcctcgttatgaggcttgcccatgactacaccatccaaccatacaatggtatcggcagtaataatcaattcgtccggatgcatggtattccggtaagcagccgccttctcgcaagctatatacaaagggatttcctctgctttcaatgtatccggataggtttcctctatgccgggtagtgtttttacttcatattttatacctaagccggataacaattctttgcggcgaggagaattggaagcaaggattattttatatttttctaaattttccaacataacttttctttatttcattaccacccgaaggccttttcatgagccatccattttccttgagccttcaagacctgttccaccacgtcacggccacatccatatcccccgttacgatgagaaatataaacagctgtttcctttatctcaggtgccgcatcagcaggacaacaaggcagcccacacaaacgcatcacttcataatcgggaatatcatcgcccatatagagtatctcctcatcctgcaatccatatttttccttcaaatgggcatactcccgggtcttcaccgcagcagccagatagacatctttgatacccagcccctcataacgcttacgcaccgcctcggtatttccaccggtaatgatggcaacatgcagcccgcatttcacagccaactgcaatgcatacccatccttgatattaaccgtacgcatgggttcaccattggggtgcaaataaatagtttccgcactcaataccccatctacatcaaataccaatgcctttattttctttaaatcatagtttatcataccacttatgagttctttccctctttatttgcctgaatgacagacaaagggagattatgaatacttttacttatcttttcgtacaattcctgcaaagactcctcatccgccaacatctccaaatgtttgcttattacgttttcatcgtagcgtacagccggacctgtctgcgcctgtgtgggagaaagttcatgtactttgccggcagtttcgtctatcagcggaagcatcacttcaaaaggaatcccctgcttttccagtatatgtgaacttaatgcatacatatgatttgcaaaattacaagcaaagactgccgccagatgcaaatacctacgttgcccggaagtcacttcatacactttaggactgagacgaactgccaccatacgcagcaattccacttctgccggagcagatgcttctataaaaaaaggtacagtattgaaatccacttcacgctgcttgctaaaagtctgcataggataaagtaccccatagcgttttaccaatcccttccataaatccatagacatactacccgccgtatgtacaaacaaggcctgctcccttcctttcaccaatacaggagccaattgtcgcaaaactgcatctttcagcgctacaatatacaaatcggcatcccgacgtatctcgtccggcacaattgtgtagtctactgaaagtctggcagccaatgcagaagcagattcctctgtacggctgtatacctgcaagataagacaccccgccttttgtaaagcaattcccagatgggttgccacattgccggctcctatcagaactattttcatcatcgggtcgaaactaaatataaaataactcccaccagcaacaaagccgccggcaacaaataagcagacatctgtcccaacaaagctatcaccaaaccgatattcaatatcagccatatacccgccaatacaattcctactgacttatcggccttgaaccaaaggaaaataacagctgcatacagtaacagattgtctttctgcataacccatggcaacccgtgtgaagcaaatcctataaacttatcgatcagataaagcatccccatcacaatgagaaacaccgcagaagctttatacgtatccttatgattgacagcagccacgtttacttgcctccatatttattaatgtgaattttctcccattgtaaatgctcctcattaaaaggcttgcgttccatacccttatgtcctaccgctataatggaaaccacctgcaactgcaacggaatatcaagcaacgtatgcacgtattcacccgagggcatcccggtagcggtaaaacgttcacgcacctgtatccaacaacttcccaaccccaaatcttctgcctgcaactggatcattatggaagcaattgacgcatcttcaatccagacatcactagccaacggatcagccatcacaactacagccatagcagcatccgctaggaaagccgcccccatctccttacaatgggaaagtttttccaacatatccttatcatctaccacaataaactgccagcaattgctacgtttagaagacggagccatcaaagcagccttcaacaaagcaaccacctcttcctgtgtcaactcttgatccgtgaacttacgcatgctgcgtctgttctttattaagtcactaaattgttccataatataccctgttaatttatttttctgcacaaatatacaactagaatgtggattgataaacaaaaaacaataaatttgcaattagagatgcctgtcagattaagtacatatcgcaaaggaaatgccattccccctctgccgggaacaagcattttccattctaccgagttgtttcatgtctttgaaatgacccggggatacgaacctttgcttatcgtagcctatataggaaaccgtcctgtaggcaaattactggctgtcatccggaagagtgtgcgcctgtttccccccgcaatcatcaaacgatgcgaaatttatggcacaggcgagtattttgatgaagcacagaataaggaagacctgttcggggaaatattggaacatctcaccaacgaagtattatgcaaatcgttcctcatcgagttccgcaacttggaaaatccgctattcggatacaaagccttcagaaagaacaactatttcgccattaattggctaagagtacgtaattcactgcacagtaaagctccttacgaacggctgagcatgtctcgcagaagacaaataaacaaagctctgagaaatggtgccatcatggaaatagctgacaatgagaaagatatacaagatttctcacgaatgttgaaaaaagcctattcctcacagataagaaaacatttcccggacatcggctttttccggttattagcatggcagaacccggaaaaagaattagccaaagtgtttcttgtgaaatataaaggcaaaatcatcggtggttctatctgccttttctcaaaagaaagtgcctatctgtggttctcaggaggtatgcggaaaacctatgcttttctttaccccggtattctggccgtatgggcacctattacctatgcttacgaaaaaggatatgcacatttggaattcatggatgcaggattaccgttcaaaaagcacggttacagggactttgtactccgctttggcggcaagcagagcagtacacgccgctggttccgcttcagttggaagtggctgaacaaactcttgtgcaaattctatatttaactcatttttgtctttttgtctaaagtgttgtgaagcatcttgcaaataagaaataaaattgaagaaatatttctttatttaactcgaaattactttctttgtgcagttttatctgaaaacttgagtataaaaccaaactattaaaattataagatcatgaaaatctcacacattgaacacctgggcattgccgtaaagagcattgaagaggccctgccgtattatgaaaacgtattaggtctgaaatgctacaatatcgaaacagtagaggatcagaaagttaaaaccgcttttctgaaagtaggtgatgttaaaatagaactgctggaacctacaagccccgaaagcactatcgcaaagttcattgaaaaaaataatggcaacggtggtatgcatcatttggcttttgcagtggaagatggtgtggcaaatgcgttagccgaagctgaaaccaccggcatccgtctcattgacaaagctccgcgtaaaggtgctgaaggtttgcaaattgcttttttacatcccaaatcaactttgggcgtcctgaccgagctttgcgaaaaaccataaaacacgagatctgactattcacgattgaagtcagtatatttagtctggttcaagcgtaaatagaattattttttaatcgtaaattgtaaaatcataagtaaaatgagcaatcaacttgaaaaaataaaagagcttatcgaacgccgggctacagcacgcatgggtggaggtgataaagcaattgcaaaacagcatgataaaggaaaatatacagcccgcgaacgcatagccatgctgctggatgagggcagtttcgaagaaatggatatgtttgtggaacacagatgcaccaatttcggcatggagaaaaaacattatccgggcgacggtgtagtaacaggttgtggtaccatagaaggacgtttagtttacatctttgcacaggatttcacagtttctgccggttctctttcagaaacaatgtctctgaaaatatgcaaagtaatggatcaagctatgaaaatgggtgctccctgtatcggtatcaacgactcaggtggcgcacgtattcaagaaggtatcaatgcattggccggttatgctgaaattttccaacgcaatattcttgcttcaggtgttattccgcagatctcaggtattttcggtccttgtgcaggcggagctgtttactctcctgcgctgacagacttcaccttgatgatggaaggcacatcatatatgttccttaccggaccgaaagtggtaaagactgttacaggtgaagatgtaagccaggaaaacttaggtggtgcaagcgttcattcaaccaaatccggtgttactcattttactgccaagacggaagaagaagggttagccatgatccgcaaattgttaagctatattcctcagaacaatctggaagaagctccctatgtagactgtaccgatcctatcgaccgtctggaagactctttgaacgaaattatccccgacagccccaacaaaccatacgatatgtatgaggtgatcagcgccatcgtagataatggtgagtttttggaagtccaacctcactacgctaaaaatatcatcattggtttcgcacgtttcaacggccagtctgtaggtattgttgccaaccaacccaaatacctagcgggtgtgcttgacagcaatgcgtcacgcaaaggtgctcgttttgtacgtttctgcgacgctttcaatatacctcttgtttcattggtagatgttccgggattccttccgggtacaggacaagaatacaacggtgtaatcctccacggtgccaagttgctgtatgcttacggcgaagcgactgtacccaaagtgacaattaccctgcgtaaatcatacggcggatctcacattgtaatgagctgtaaacaacttcgcggtgatatgaattatgcatggcctactgccgaaatcgccgttatgggtggtgcaggtgcagtagaagtattatacgcacgcgaagccaaagaacaggaaaatcctgccgcattcctagccgaaaaagaagctgaatacaccaagctgttcgccaatccttacaatgctgccaaatatggctacattgatgatgtgattgaaccgcgtaatacccgtttccgcatcatccgtgcattgcaacagttgcagactaagaaattaaccaatccggctaagaagcatggtaatattcctctttaattaaaaattaaaaattgagaattgaacatgaagaaattaaatataggaatattcctttctttgctgctgatggtggggttatgttcttgtggagaacagaaatcgaacaccaagctggtactgaatgaagtgctgattgaaaatgaaagcaatttccaggatgactacggagtacacagcgcatggattgaaatattcaacagatcatttggtagcgcagaccttgccggttgtttactgaaggtgagcagccagcctggagatactgctacttattttatccctaaaggtgatgtattgactttggtcaaacctcgccagcacgctttattctgggcagacggcgaacccaaccgcggtactttccacactaatttcacactgaatgccgcaaccgacaattggattggattgtatgattcaggcaaaaaattattggatcagattattgttccggcaggcacattgcaagcaaaccaatcatacgcacgtgtcagcgacgcagcaaatgaatgggaggtgaaaggttccagcgcagacaaatatgtgactccgagcaccaataacaagactatcaacagtcatgcaaagatggaaaaattcgaagaacacgacggtagtggtatcggtatggccatctctgctatgagcgttgtattctgcggtcttcttttacttttcattctcttcaaatgtgtaggtaagatttctgtaaacctgagcaagcgcaatgccatgaaggtaaaaggtattaccgacaagcaagaagccaaagaaaagaaattgggtgaagctccgggcgaagtattcgccgctatcgccatggccatgcatgaaatgcaaagcgatgtacatgacgtggaagaaaccgttcttaccattacccgtgtaaaacgtagttattcaccgtggagttccaagatttataccttgcgtgaaactccccacaaaaagtaagtcaccaataaaaagataaaatgatgaaagaatataaatataagatcaacggtaacgtatacaaagttgccattggagatatagaagacaatatcgctcatgttgaagtgaacggtactccttacaaagtggaaatggaaaaagctccgaaagctgtagtgaaaccggtagttcgtcctgtatcaaccagccctgctccggcaccagctacagtagtaaagcctgctgcaacttctacaggtaaatcgggcgttaaatctccgttgccgggggtaatccttgatatcaaggtaaatgtgggtgataccgtaaaaaaggggcaaaccatcattatccttgaagctatgaagatggaaaataacatcaatgcagacaaagacggcaagatcaccgcaatcaatgtaagtaaaggagaatccgttctcgaaggtactgaccttgtaattattgaataatatgggagaatttatcaactttttagggaataacctagctgacttttggacatatacgggttttgccaatgctactgttggtcatatcgtaatgatcctgataggtttattcttcatataccttgccgtggccaaggaatttgagccgatgttgctcattcctatcggtttcggtatcttgatcggtaatattcctttcaacatggaagccggactgaaagtcggcatctatgaggaaggttctgttcttaatattttatatcaaggagttacctccggatggtatccaccacttatctttttaggtatcggtgcaatgacggatttctcggcattgatttcaaatcctaaactgatgttgattggtgctgccgcacagtttggtattttcggtgcatacatgattgcattggcaatgggctttgatccgatgcaggctggtgctatcggcatcatcggtggtgcggacggtccgacagcaatcttcctttcatccaaactggcgcctaacctgatgggagctattgcggtatctgcctattcatacatggcattggtaccggttatccagccgcctatcatgcgtctgctcactaccaagcacgaacgtttgatccgtatgaaaccaccacgcgtcgtttctcatacagaaaaagtaatgttccctatcattggtttgttgcttacttgttttctggttccgtcgggtctgcctctattgggtatgcttttctttggtaacttattgaaagaaagcggtgtaacccgtcgcttggcagaaactgcccgcggtccgctgattgataccattaccatcttattaggattgacagtaggtgcttccacgcaagcttcagaattccttaccattgattcgattttgattttcgcgctgggtgcattgtcattcatcattgctaccgcttcgggagttatcttcgtaaagatattcaacttggtattaggtaaggataacaaaatcaatccgcttatcggcaatgccggtgtatctgctgttcctgactcggcacgtatctctcaggttatcggtctggaatatgatcctaccaactacttgctgatgcatgccatgggtcccaacgtagccggtgtaatcggttctgccgtagctgccggtattttacttgggttcttgatgtaattcattgaaaaacaataaataaaatcctcttcaactaatatgtggaagaggattttttattgatatagattaagaaatgaatgatttattatgatttttgaacgattagttatataagatatgctgaaaaacatataaatttgccgccgtaaaaccaaactaaattaaacgaagatggaaaagaaaacagttaagtaccatattccccaacacggaatatatatgtacgcacgtactaattctgggaaaactgaactcattgtcctaaacagcaccgatgccgaacaagtggtggcaaatgaccactaccgcataatgacaaatgattcaaaaagcggtaaagaacttatcagtggcaaaaaaattgaccttaccaaaaatatgacagtcggtgcacgtcaatcattgattattgaattataattgtttttttaaggtaagaaggtaaaatgagaaagtaagaataaaggcggcttttattaaagggccgcctttatttatatctctgtccacctcttttatttacgtgaaacaattgtccctgtagcttgattagtaggcataaccaacatttctgcaatctgcatatattccggtacggaagctgcaaaataaaccgtttccgcaatatcatctcccgtcaatggacgaatgcctttatatacattatccgccttttccttatctccccggaaacgaacaactgaaaaatttgtttccaccagccccggtttgatattagtcactctcaatggagtatcaactaaatctatacgcagtccatccgataaagctttcacagcagcctttgtagcacaatacacactacctcccggataagcagcatctccggcaatagaaccaatattaataatatgtcctcgtttacgttccaccattcccggtacgatcaggcgtgtcattgccagcaaagccttaatattagtatctatgacaatatcccactcatccagactgccttcctgttctttatccgtaccgataaccaacccagcattattcaccaatatatcaatggattgccattccttgggcaatgattccaaagcagacgttgccgctttacggtcgcgcacgtcaaaaggaagcaaatatattttcgcaccatattgcttttctaattcttctttcaatgcactcagtttatttacgttacgggcatttaaaatcaaacttgctccctgtgaagcaaacttgcgagcgcatccggcaccgataccgctggaagctcctgtgataaaaacaatcttatccattttattatttcgatttattaaagaacttactgaaaaatagtatttgatagtctatggcattattccaatacctgcctgtatgcccacccggacggatgataaagtcatgatttattttcttcttcaacagtttttcgtgtacagccttattcacttccagaaaaaaatcatcacaaccgcaatctattataacagccaaatcaccattctttatcttatccaactgattaattaccgtatgttcgtcccatctctgcttgttgctcgcttcttcacctaattgcttcttcatctcccaattattgggaaacggacggatatctaaacctccactcatactacctcctcctccaaagacatctttatgacggatggataaccataaacttccatgaccacccatacttaacccggtgacagcacgtccccctctctccgctttcgtagtaaaattcttatcaatatagttcaccaattcttttgacacgaatgtttcataacggtactccttgttcaaagggctgtcccaataccaactgttcttcccgtccggacaaacaaaaatgattccttccttatcagctatccgaggtaattccggttttatcccgagccatgttcccgcattgcccccatatccgtgaagcagataaagtacgggacatttttcacctgccatggctttatccggacagatggtaattacctgaacctctttattcattgcatcgctatgtaccgacaaagtatccaccttagctgcctgcattcctacagacaaacagcagcttcctatcaaaaaagcccaatatcgttttttcatgtatataaaaaattacccgatgtaaaggtacaatataatttgcaatttagttgcatcttctttccgctatctttgttgtcataaataaaaagaaacaatgaaaaaaataaaattagaatcagttttcaatgaattcactttaatgggaatagctgtatcaggagcattctatctaggagaatactgggaaggtattgccgttattctgttctatctcataggtgaatggttccaacacaaagctgtacacaaagcacgcagcgacatcaaagcattattggatgtacgtcccgaaacagccactgtaatatataacaacacatataaaataacagtaccggaaaaagtacagccaggagaaaccattgaagtaaaagttggagaaaaagtacctctagacggatttttactggaagattccgcttcatttaatacgaccgccctaaccggagaaagtgttccccggactctatataaacaagaagaagttttagcaggaatgatcgcttcagataaagtggtacggatcaaagtaaacaaaccgtatgatcaaagtacgttagcacgtatcctcactttagtacaagatgcagcagaaagaaaagcccctgccgaattatttatccgccgttttgcacgaatttatacaccgatagtgacaggactggcaatactagttgtcatactcccctatttatactctctgataaaacctgaattcatttttgtttttgatgattggttctatcgggctttagtattcctagtcatatcatgtccttgcgcattagtggtcagcattccattaggatactttggaggtattggtgccgcatctcacaaagggattcttttcaaagggggtaattatctagatgccataacccaaataaacaccgtagtattcgataaaaccggaacactcacccaaggtgtattcagtgtccaggcaatatcggcagccgaaggtgtttcgcaaaaagaactgcttcaacttatcgcctctatagagagtttcagcaatcatcctatcgcaaaagccattgtcaaatatgcagaagaacaaaatatatcccttaactcgtcactgaaaataaccgaatttgccggatatggaataaaagccgtaacaaacggtaaagaagtatatgtaggaaatgcacggttattatcaaaatacggcatctcttttccctatgaaatcagcgacatgacagaaacaatcgtgttatgtgcaatggaaaacaaatatttgggatatctttcattggcggatacaccaaaaccagatgctgtacaagccatccgcgaactgaaagacttaaatattaataatattcaaatattatcgggagacaaacagacaattgtttctaatttagccgaaaagataggtgtcacacaggctttcggcgatttgctacccgaaggtaaggtagcacatttagaacaattaaaagcaaattctgaaaatcgtgtagcttttgtaggagacggtatcaatgatactcccgtactggcactcagcgatgttgggattgccatgggtggcctaggatgtgacgctgctatagaaactgcggatgtagtgatacaaacagaccaacccagtaaagtggcggaagctataaaaatagggaaacagacccatcgcatcgtatggcaaaatatatcaatggcattcggagtgaaattgttagtattgctattgggagccggcggaatggccactatgtgggaagccatatttgcagatgtaggcgtagctttactcgccatttttaatgcaatgagaatacagaaatggaaagaataaaatgatttgacctatgaatgaaacaatctatttaaaaaaactggaacagcgggaaatcaaaccgacagccatacgtctgcttattctaaaaaccatgatgcagcacaaagaagcattttcactgttggatttggaaaacgaattggatacggtagacaaatcaaccatctaccgcaccataaccctttttttagcccatcatctgattcatggcattgatgacggtacaggatcgttaaaatatgcagtttgcagcaatgattgcaattgtgaggtagacgacctccacactcacttctactgtgagaactgtcaccgcacgttttgtatgaaaagtatccacgtgcccatcgtgacactacctcccggattcaccgtacaaagtatcaattatgtcctgaaaggtctatgttcggaatgctctcatcagcatatataactattgccagaaaaggaaatcaaccccaaagcccagttgatataatccaatgcaggcatccgaatttactgatcggatgccattcatctaattgtctgttattcaaagctgtaatattttcttatatagtatccgcccttttaatgaacatcaatcaagaaatacagtatttttatttgggagcaagaaacttcttagtcagccattttctcacaggctcatcatacagtttcagacacaggcaagccaaaatgacactcaaaacaaaaacacccacagctacataccaagtttctcccaatgtataaagtttattctcaatcaaccatgcgtagaacaaatacatcaacggataatgtactacataaaccggataggatatatctcccaagaacttgcatatctttgtagactgcttatccgtagtagtacccgacgcccccagccacacaagaaaaggaaaaaccacaattacacaaaaagcttcataaataccattcatgcaaatcggctccaatccttccaaataaggaaccgagaacagcgcaatcagtataatagtacatatccaaaacgccccattcaccttcataggcttgaagttacgcgacatcaacatacccaatgaaaatgggaaaagcatacgcaaagttccacctaaaaaattcactccgtcgagtgtccatcccactcccatattcccataaccagacacattgaaaacagcgaatgacgctaatgccatacccagcatcacaaccagcacagccaatgctttattagataaccgacgaatgaacaacgcataaagaatattacctatatactcaaaaaacagggaccagcaaggtccgttcaacggaaacatctcaccattaccacgaacttcatatcccacacccggcatggcaggaataaagaatattgtacaaagtaaagacaacataatcatggaaatagcgacatgcgttccatcccattgcacacaaccctgaatacagaacgtaatagctcccaaaacagcacccataattaccatcggatgaagacggatcaaacggcgtttgaaaaagtctttcatagtgaaattcttcccccaacggtcatcatacgcataaccgataacaaaccccgaaagaataaaaaagaaatccacagcaagatacccgtggttgagagtttcgatattgccggcactagcaaaagcaaaaccttcaaatacatgataccatattaccataagagcagcaactcctctcaatccatcaagaagatcataatgaggctttgtatcagtaaatgctgcagaagagattttttccataataaattaatagatttaataattgattctttttaactgttactaataatgctgcaaagttacacaacttaaaggcttttaaatttgtcctatgacaaaaaatcagcaatacataaattatttcttagctcggagacgactaagtgtgggaagtgttatacccaaataagatgcaatataccttaacttcacccgttggcatatctgaggaaactgttgtttaaactcctcatatctttcctttgctggcaaagtcagccgttctttgtgagaacgatgcaaacgcctgtactcattttgatgaataatcctcccccaattagccaattcaatattagtctgaaacagtctggttaaatcagctaatgatattttgtaaacaactacatcttcaagcgtttccacaaattcctcgctcggcttattatagtacaactcgtccatactgaaaacaatacctccttcccatgaaaaggaggttgttatttcttctccatttacaagccagaaagaacgtgtcattcctttttctatgaaataagctgatttacaaaatgtattctcctttattaactgatatttcttagggaaacgacataaaatcatacattttttcagttcttgtatcgtatcttcagaaaccggacacaaagagagcatattatctataatgtttgtcataaaaccgtagtccatttaaaatacatataaacacacccgatataaacacgggatataccttttttttcttttcagccaaaagtacaaatatatattggaaaacgacatcatttttccaaataatcggagtttccaagaccactccatacaagaatgtccatatacctcttttatttattactttttgttcaaattacaaagataaagcattaaaatgccaaccagacttttaaaacatcccatcgcttaatgcaccactctaaaagtatttcaatagcctccaaatcacttttcatataatctatcagaaatttcataccaagaaaaccccaaagaaataccaaagaattgaacattttttatgaaaaacagcccttgacagattagcggatgcaggctatttttgcattttaacaattataacccttaaaacaaaaaacatttactttgcagtatgaagtatttattatcggaagaataaattcttaattaataatctgctactgctttaaccaacaagtccaatcacatgaaaaaaattataacattacttttaatattgttgtttgccacaaaaagcactttctcccaatcgccaaacaatatagagaagttcgtcgtagtcagtgtaaatgataaagatagtattttaaacaaaataaaaatgtctgctccccaattctacaacatcggaaaaggtaaacgtatagaggtcaaagtatgcaatgaagacagcatacaaataagaagagtacgctgtcttttatattattccaactccggcaagaaagaatgtataggaaaaatatggatttctcctcttattggctacgaaacctgctatttttgcatgaacgtggatatccccctaacaaaagatgaatggcataaactaactttccgaataaagagaggaaaaaattataaggattacaaattcttgaaacagcaagtacaagaataaaacatttgataataagagagagattgacaagaataagaacaagtaagaattgtttttattttaagtttcagccttaaaataaatctagatttatttcataccattctgattatttgtatatttgtctcttgataataaaattatgcaatttattaatttacaaaaacgatgagctatatccaaaacaatctacaagctggtgaagaaattaaatacaaagcagatattcactggtatatatttgcatatccggtaatactactattattaagcgccttcttttcttccgcacaaaccggattattctattatgtcagcatatttctattgttgtcaggattattccaattgataaaaagaattcttcttaagatgggagctgaatatgttgtcacaaacaagaaagtcattctaaaatccggtattttaaaccgggatgcccttgaattggttttaaacaaatgcgaaggaatacggattaatcaaagcctcatgggacgtatgctcggttttggttctattgtagttactacaggcggggtcaccaacaaatttgactttatcaccaatcctataaagttcagaaacgaaatcaatgcacaaattcaataagaataagtgaaaagcatttaaagaaatacaaagagaacgggtataaacacgcttttgcacatacatccatacaaggctatacctacgtacgtacgagcttatgcgtatgtatatgtaaaatgcctcagtccagaataaaattccatatcaaagacaagggcgttttaaaaaaagatcaagagctttttaaaaaagataaccgcctttttttaaaagaacaagagctttttttaaaatgtcttgttcttttttaccgctgccgcgaatccgtaagctatcatttcgtggaagtttcctctttcatgcgcatttcttacgaggaaaaggcttgaaaacgccctactttataccaggcaggaactgtctataaaaaaggatatatagctgacagcaagcatattatgtgaaaatcaacttcaaaacgtagtgagggcatgagagtataagtgagagcaatttttttactattatcatataagtcattcataataaacccattatacatacagtgagggcatgagggcataaatgctcccgaactttctaatgaaaaagataatacgtcaaagacacttccggaaatttatcagaaaacaaaatgatctttataaaagtaaa

SEQ ID NO: 3934 - DNA, 12072 bp, Unknown
  gut microbiota DNA sequence
cttaccaaccagaaatttccgctgagccagaatatcattaccatgatggaacgcaatcatgaccggcctttgatttcgtcgaaaaaaacaaacccatctcatatgctttggtttccgtcctatttacgaggaattccttatcggtacggctacattcgttaatcatcgtccaataacggtaaaaagcggactaccatgatccagagttaaaacttcagtattttcctttttcattttatttatggacacgaagatacaacagactgttcaagaaaaagttgattattgtagatgtgcgcaggttaatgtaattcagaaggtcagatctgtcttcagagtaaaaaatattctggtacggaagggaaattggatgtgaaggagcctatatataaatatatacctcccccaagatataaaacccgcccccctgcaacagccctgcttgaacaaacttgttagtcccctgttccaacctccggaggctatgaatgttttttcttaacaagtaacagtctgctctgatatagaacctaaacccgaaagattatatatcttacaagtgtaacatatataacgatgacacctgaagatctatcatgtgtcacggcatcttctatgattcataatcaaaccgatcaagtatcattcatctatagaaaagaaaattgccttcatcattcataaaaacaaataatgaaggcaatacactaaattatatacaatcaatccctaatcattcagctacaacttcaattacacgactgttgagttgctgtgtagtaaatagattcaatcctacattcatcaagaattctccagagaaaacctcaccattgcctgataaagaagaattggctccgggcatcaagttgatttctttcacacgatacattttgtctgcatcaagcccctgcaaacgcaccggcaatgttttttccgcataacggggatgaatatcgaaagcaaatacaactgctttatccttatctttgcccacatacatagtagaggtatgattactgccataaggagataccaaacggtacatatcgccttccagaacgaccggtttcaaacgattataattctgtacagcagtacggcaataagtttcatcatccttactcatatccgctaattttatatcaaaaccgagtttgcacatcatagccacatccgtacggaatttcacactgctattcttattccatgtggtaacatgagcgcacattgtcttggctgggaacacctgtgaaaatccccactgaataaataaacgttcaataggatcggtattatcactaggccagaattctgtaaaatagctcaaagcctcataatccgaacgcccaccgccaccggaacaaagcatcattggcagatcaggatattttgctttcacacgttccaatacattatacaagccacgcacataatcaatatataaatgtgactgcttgtctttcaaataaacagagtaaatatttgtaatagggctattgcaatcccatttgaagaaagcgatatcaggatattttgtcatcaaattgtccacaactccgaacacataatcctgtactttcggattactcaaatccagaaccaactggttacggaaataatactcgtcacggttcggaagatgaatcacccagtctttatgcttttcatacaactcactcttaggattcaccatttccggttcaatccagataccgaactttataccttttttcttagcggcttccgtcagataaccaatgccatgaggaagcttgtcagccgtttcatcccagtcacctaacccttgatgatcaccactgcgcggatacttgttggcaaaccaaccatcatccaacaaaaacatatccacacccagttctactgcatcatccatcaacttcaccaatttcgcttcatcaaaatcaaaataggtggcttcccagttattcaacaaagtcatacgagtctggttcccatcctttacctgatacttacgggcccaatcatggaaattacggctagcctgtcctttacctgtaaaactgtaagtaaaataaaaatcgggagtacggaagatttcattcggtttcagactatattccgaagcatacggattaatacccgaaataacacgcagttcgttcttattatctacttcgaatacaaaactgaaattacctgtccatcctaatgttccgaccaacacttcaccttggttctcttctgactttccgtccaatgcaagttggaagaaaggagagcagaacatattggcacgtgctcccaacttggtatcaatcgtttttttaccaaattccaaaggctgttccttcacatgcgcctcactggcccagtctcccgagaattcagtcaggaaatagttggcacgattcaagtgcaacatggaagacgcgtacttatgaagctgcacaggtttcttttcccggtggctgatttcagtgaaagtctttattagattttctttctggtaagccacataatgaagttttacagttacaggatatttatcatcctgcatagtaatcacgacttcatctacccccggcgacacttgattccgagtatgagatatatatttcaacaaagtagaaggattgccgtcattatgcactatatgaatagccggttcaaaataatcttccatgccatgagtaagatatgcttcgctgccctgcggcaagtgggcaatatctgtagcatgattcaacctctttcccaaataactttgatatagacgtccattatcaccaacccggtaaataaggtctacattttctgtactaattttaattactggcttatccgccgcctttaacataaatgatatgcataaaaaacatatcaagaagagcaatctttctttcatggtattattcatcgattaaaattatagtgcaagaagccctattttaaaattcgctcttcaaatataccataaaaaacactaatactcaatttcttttttaaatgaatttttatccttatgattatcccgacatctccaatccctcttaatgtaaaaaaatcataaattcaggactgttaccccaattaccgtattcttttcacctattttcttatatttgtaaattattccatcacacaaacgtaaaaacaaatggaccagaccttactaaaatactggaaaacttgtcttcaagatgcagagcgcaaagctattgctctcaaaggaccacgaatcaccctaaacattggtgacaagatacttaaattcattcctctcaaaagtattcctgttattttccctgattggaaagcagaagacagcaatgaaaaacaaaaagtaatgattgctccttgtattcttttgcccgaatttgaaaacggctggacttcccaatcagaaagaccggaatatcccttcttgattactgccaccatgttgcctgacggcaaactaaccgtatgcgagaacgaatcagacagaatcccaatatttattcgtaaatttttggagcctaatgcagccaatgaccgcactatagcttctctttcaaaagtagatcaactactatccaattttaacactgaagaaacaaaatgggaggcctattggcaagcatgcgagcagcttttcaagaaagcaaccggcaaaactttcagcacaatgaattactatgataatccagaaatcattatcataaaagcctccgagcgcaatatggcacagcccataatcacactatatgacaaactcttaaaagatgacaataccactccacatcccctgttgaatttattaatacaaacaaaatctgctaacgctcttcctattccaactaaccggaaagtatattgcaaccaagaacactgggcacaaatgagcagcgactttcctttgtccatatctcaacgcgaaacactagcaatgtacacaacaccggaatgtgctgatatttttgtcgtcaacggtcctccgggaacaggaaaaaccacttttctgcaaactgtcatcgcaaacagacttgctcataacattctaaacaatccggaagagccggaaattatagttgcaagttcagctaataatcaggcgatcaccaatatcctaaaggatttcaaagcggaaacaaccaatgacacaacacatccccggttgtccaaccgctggctacccgaactggatacattaggcctatatctgtcagggaaaaaagagctgcaacaacagtacaaaatgatgttcaaccccaaaggggatggatttccggcagcatacgatacacctgaacgtcaagaagagtacaaacaattctatctgcaatgcttcaataactttttcaagaaaaactatcaagacgaaacaaaatgccggcaatttctccgtaaagaaatgcaagccctccaaaaaaagattattctctgtatccaagctgccgaaacaacagaatacggaaaccggaaggaaaacaatatattacagaagtttatccgcaaattccatgagccattaccctcctatgacaaagtaatagaacagtggactttgacagaagaattcaaagaacgttacgaaaaaataagttccaaccctgagtatggcaacttgccttatacagaagacatggcagtaaggctggatatcagctatcggtatcaaatgttctggtatgccatacattatcgggaagccgagtttattcaccggttaagcaagtgcgatgaaggcaagcagcgcacacaagaagcctatacccaaagattaaaacgtttggcttgcgtaatgcctgttttcatctctactttccattctctacccaagtatatgacctatgcggagaacggaaaatgggatattcctttatacaatggaatagatctgttgattgtagatgaatccggacaagtttcacccgaacttgccgttccctccttcagtttggccaagcaagcgattttagtaggtgatattcaacaaatagagcctgtatggtccatttctgatgaatattcattcattaatttaaagaatctgggcattgtttccaaccagtcctcggaaaaataccgttttttagaaaacaatggtttcctttcttcttccggaagtataatgaaactggcacgtaaaagctgtaattttacagtaaaaggtgaaaaaggagcttttctgaccgaacacagacgatgcgtagattccattattgcctattgcaatgattatgtttaccacggcaggttacttcctaaaaaaggtaacgaagtaaaatacaagtccctcccttccaaaggatatgtacacatcaacagttacagcagccctggaaaaacaggaagtcgcctcaaccgggctgaagcggaagccattgtctgttggctggaactggaaaaagataatctggaaaagacctataaaaagcctattcatgaaattgtagccgtagtaactccttttaaagcccaagaagccgaaatacggcatcaaatacaaaaaatatcaggaaatgagaaatataaagatatgatcatcggcaccgtacattccctgcaaggtgcccaatgtccgattgttcttttttcaacagtcaactctcccgaagaccattctctttttatggagcgtgatggaaaatacaatatgctcaatgtagcgatatcgcgcgctcagcatcatttcattgtttttggcaacatgaatattttccatccggaagaaaacaccccggtaggaaatatggctaaatggcttttcgatgatccatccaacgagatttccaacaactttatttaccaacaggaagttccgctgtgcacctaccaccccacccttcgtctgtccaccacagaagagcatatccagattctgcaccaagcttttgaaaaagcaagacaccgtctgctgattgtatctccattcatatctatccacgccatagaaaacgaccagttggttccgctgatacgccacacggtacaacgaggagtggatgtcacagtctacaccgattcgtctctagattatgatacgaaaaccaatcagttgctcagccgtgccgaagagggacggaacatattaatagaaaatggcgcaaccctcattgaagtaaaaggtatccacaataaatcattggccattgataaccatacacttatagagggttctttcaactggttatccgccaaccgccataaagaatactcccgccacgaatgttccatagttgtatcatctgttcaagccgatgagtacatcaacaatctgataaaggaactagaaagcagagaaaaaacctttcaatccctatctaagcctacaatcaatcttgacattgaccaaaaatatccggggttctttacaaaagaatcttttaatgattgtacagaagaagatatttgccgtataaaacaaaaagtccaagagttaggcattcagaaaacagtccttccaccttatatccataaacaacgtgaaactttcccacgtgcttatgaaccttggtgcacagaagaaaaggaaattatatgtgagttgatgcaaaagaccaatcatctttctatttttatagaatgtctgcaacgtacaggacaagcaattcaaattcagatagaaggcaaaaacaattgattataatcctgaactgatatcctttttatgatattcgggaaacttgggaaacaagaatcagtccctatacggaagagaggaaaagacaaattactttttgccttttcctctcttccgtatagcatatgcaactcctgcccagagttccttattttttggaatacatccaggtccatttatgccaaagactctctaacggtccctgcttatgtcctttcaaccaccacttgcagaactgtacttgcaacaaaaagagtacaaaaccaaccaacaaactcaacgtatatccacagtacggagccagataaaatccgaaagggaaataaataatagctccggcaatagattgggtgatataattggtcagactcatcctaccataataacgaagatttgatacaaaattcctgaacctatcccgttgataaagcaatacaaaagaagcaaccagtacaaatgtaaaagcgaacttttgccacatatcaaaagcagttccggcagtctggcgaatgagttcactgtcactagccataatcaactctttcagttggaaaagcggagcaaaagagatagcggaaatgataagagccttcacccaaaaacgagtatgtttttcggaagtaacaaacaattgtttgcgtccgatgtataatcccatcaaaaacaagccggcagtctgccagaaacgccctgctcccagagcccaatatagactggctttctgaccaaaggtcatattcttacccacaaactcccctctttggtatattccgccacttctttatacatcgcgcccactccccaatcgggcaaagtataagaaggatcaaacagacctactatataatgataccactcaacgggctgcaataaaaacaaaatagccgtaacaagtatggcacagtcactccacttgcgcaccacaaacaatacgattcccactaccgagaacagcaacagcacatctcctgccggaaaaaaagctgcattcagcgtagcaaaagctaccaataacagcaaacgccacagaaaacgataaccaaaatcttttcctttacgctgttggttagccgactgaatataaaatgtaaatccaaacagcaaagcaaaaatggcatacgattttccagccaataaagtaaatgtaacattgaataccccgtcattcagtatattcaaccatgcaggctggtctaccggataaaccggaaagatgaaatgctccaaactatgcactaaaagaattgccatgactgcaaatccccgtaaagcatccaccacctcaacgcgtggcagtttttctgataattgtttttccatgaactagttattattgtttatttaaaattcgttttacccagcggttgaccggtttctcaaaataataataagaaagcagactcagcccgatagtgactgcaaagataagcggaatactgatatacagactgatatgccaatcgtatgtttgcgccaactgcacataagcaaataatatccactatactctcctcttcggtgctattcctgctctacatatccgggggagcggtgagcaacattggataatagactacagacaatatcatcagagttttgacaactcttaccaaaaactgtatattaaaaagagaaactgatttcctacaatatttcctttaaattccaagcctgtatatgcctgaccccttcattggaagggaattgtacctcatccatggaaacgacatatttttcataattatcacctatcgtcagcaaaggagcatattcccgttccatggtttgtgccgtttccaacatgtaagttgcttgaagataaatcactctatcgtccttcatagcaacaaaatcaacttctttatcccgaaaagaacctgtatatacaatatagcctaaacgacgaagttccaaatatactgcattctccaacaaatacccgactccataagcaaagcccggataaagaaaattcttaaaggacaagtcattcagataatacttgcaattacctgccaccacatcctttccttttatattgtaacgttctgttttataagcaagaaaagcttcttctatataacctagataattagataaggtatcataactcaccttccggttcttggatttaaagaaattaacaatatgctgaacggaaaacagattggacgcattattcaccaaataaataaaaatatcatccaataaccttacatcacgaacgggtttacgcttcactatatcacgcaacaaaatcgtatctttcacagaagcgacatactgtttttctgactcgacagtgggcaggttgtacaattcgggcaaaccgcctttctgtaaataggccaaataagaagcccgaccggcaggttgctgcatcaactgtaaatattcagcataactataggggaatatatgaaattctacataacgtcccgacaaaagagtggcaagttcactggaaagcattttagagttagaaccgctgataaacaattcactctcttcgacaaagtcttgcgaatgggagtttacaaacctttcccagccatccacattttgaatttcatcgaaaaacaaatatacttttccttgcggtttaagcttttcccgataaaaacgatacagactttccaatgctttataatcatcaataaaatcaaattccagatactccttatttatatataggatattagccggatttactcctcgttccgagacaagacttgaagcaatttgcctgagaatataacttttgcccgaacgacgttgtcctataagtaccttcaccaagttattccccacaaaattgccaatcttgtcggtataagatttccgttccagtcccaattgatacgtatttccaccccaaaggttatacttttctaaagctttccatttatcgtccatactcgaatcttttcccacaaagatagtttttttcgagtataatcgaaaaaaaaacactgtttatttcttttttcgagtataatcgaaaaaacgtatctatctcaaactgaattaaagaaaacgaatacaatccggcagtatgtaaaatttaacaaattacttaaacaagcaaactattattttcctacatttgttaccagtgaaactttaaatacgaaagaacatgaaagcaaatcctgtatttagtttatacatccctaccaaattagtatttggctgcggagaaatcaagaaattatccagtgaaaaattaccgggaaaaaaggcactggtcgtcatctcatccggaacttccatgcggaaatatggatatttggagagagtacttgcccaattaagactgaataatgtagaaacactggtttacgataaaatccttcccaaccccatcaaagaacacgtcatggaagcagccgccatctgccgggaggaaaagtgcgactttgtagtaggactgggaggcggaagttccatcgactcagccaaaagtatagctgttatggcctgcaacgatggtgactactgggattatgtatcagggggtagtggtaaaggacgccctgttaccaaagcacttcccattatcgccatccctaccaccgccggaaccggaacagaaatggatccatggacagtgattacccacgaaacggctcaagaaaagataggcttcggttgccagctgaccttccctaccttatctattgtagacccggaactgatggtttccattcctccgcacctcaccgcctatcaagggttcgatgcattcttccatgccgcagagggttttatcgccaattgtgcaacacccatcagtgatctttacgccttagaagccatccgtctgatctacaaatatctgccagtagccgtagccgacggaaagaatttgaaagcgcgtgccaaaattgcttgggccagcaccttggcaggcatggtggaagccacttcaagctgcacttccgaacattcattagaacatgccatgagtgcttattatccacaacttcctcatggagcaggactcattgccttgtctgaggcatacttcgaaactttccggcatgactgtacaaaacgttacatgaaaatggctgaaatgatgacccagaaaaagagcaaccgtccgtccgatttcattgatgcattgattacactgcaaaaagaatgtaaagtacattctatcaaactgagcgaatttggtatccaatccgaagatttccccaaattcctgcaaaatgcaagagatacgatgggaggactgttcactctcgacccacgcccgattacagacgaagaaatcctgcatatctttaaaaattcttataaataatggataaagaactagaccttgccgtaacctgttacggcaaggtaaaaccattgaaatatgatttggtcctcctcccttggggagctaccgaaccgcataatctgcacctgccttatctgacagactgcattttgagccacgacatcgcactagatgctgcaaaactggcaaaaacacattacggtattcgttgcatggtcatgccttacgtcactgccggttcacagaatccgggacaacgcgagctggatttctgcatccattatcgctatgaaacgcaaaaagcgattttaagcgacatagttgcctctctatacgcccagggataccgcaaaatggtcattatcaacggacatggcggcaatacattcaaaagtatgatacgtgacttgtcactggactatcccgacttcctgatagccagcagcgaatggtttgcctttgtccctgctaaagagtactttgatgaaccgggtgaccatgcagatgaattggaaacttctgttatgatgcattatcatccggaattggtaaatttagacgaagccggaaacggagattataagaagttcacctcacaaatgttgaatgaaaaagtggcatggattccgaggaactggcaaaaagtttcgcaagacaccggtataggcaatcctaaaaaagcaagtgccgagaaaggtaagaaatacgccgaagcagtcgtcgcaaaatatgcattgctgtttgaagagttggtacataaagaactttattaatagttttagaactaaacaggtttattttcttcataataaaaagcataaatttaacacatcatataagtcacatccaattatatcactgcatataaaccagttacccaacaatatattctgaaatatatttgatataataaaattctaatgtacatttatgaagttaactatatactaacctttaaaagcagatcttatgaaaaacaaatcactttttttagccctagtcattctttgtttgactagcgtggagatctactcttcccgacaagaattaaagtttgatgcacctcttccgagcaacacagaaaacggaaatgctcgcagtgattacggacctcccggtgaaggagacggttgctggtatttcggaggttccagatgtgtaaaatttt

SEQ ID NO: 3935 - DNA, 9418 bp, Unknown
  gut microbiota DNA sequence
tacttacttgctttcagcttatcctgtaattccggtcggggaactcccaactctattgctttttcaaaagcaacatacgcttctctttttttcttctgacttaaataaatctcaccacacatcacataaatttccgcatcgtccggtgccagtttggcggcctcctccaaatccaataaagccaaatcaggcgtattcatttctacagccaatgtagcgcgagctttcaaataagaaacatctctgggattatcggaaaccaatttgttaaaatcttctaaagattcacgatacttcaactccttctgatttaaaagtgccctgcccaaacgtgcagtattattccccggttcctcctgtaataaagtattataatctattctcgctcccttataatccctacgttgcatataaatataagcccggaaaagtaacgcttccttatttgtcttatctatatcaatcacattgcaataatccacataagccctgtcaaacaaatttttctccaaatagagtgaagcacgattgagcaatgtaacaacagaatatggagtaatattcaaggataacgtgtacgaatcaatagcatcatctattttccccaatctccgctggaccgttcctagattagtaaacaataaagcattacgcatattggcaggatccatcttcaatgcctgtttgaacaaaatttctgattttgtcaaactgtcgttttttgccgcatccaacgcacaggttatcagctcatcgtaagtttgcgcctgcaactgcatacatgcacatagcaacataagataacatacgatctgtttcatccgattttctatattaattaattccggttgcaaaggtagaggaatctttaacgatattcctttagtttaattaaaaaaagcataaggtaggtttctcgttttaaagggtattccgtatatttggcatacaattttaaaagaataaagaacatgaaagtagaaaaagcgatattcgccgccggatgcttctggggcgtacaacatcagttcgaacgtattccgggtgtactaaacactacagtcggttatacaggtggtccggaagccaaccccacatatactcaggtaaaagcccacatgacccaccatgtagaagctatttttgtagattatgacgccgacatggtttcttatgtggatttgtgcaaacttttttttgaaatacatgatccttcacaaaccgatggaataggtcccgacctcggaccgcaatatcggagtatgattttctacatggatgaaaaacaaaaatccgaagctgaagaggtcatcgaactgcttcgctcgaaaggtcatagagtcaataccaaattacgccctgccgagaaattttgggaagcagaagactatcatcagcactattacgataaaacgggaggagaaccttactgtcatatacgcgtaaaaaaattctaaattaaacaacagaggtgtgttcaaataatggcacacctctgttattcataattatccggaacctttcatcatttcatcaatgcgtccagatacatataaaattcgggattctcgccaactacctgtttagcaattttcccttcaggatcaatcacatatttagtgggataaccacttactccatacatcaccgccacatccggttcacctatattgcgtacattaatccacggcaattgatgctcagctactgcttttttccatttatcctctgtatcattgcagtcaatccctacaaattctatttttcccttgtatttttcatatgcctttttcatttcgggaattccttttatgcaccatccacaccagcttccccagaaatcaagcactacatatttacctctcagagaagataagtcaaaattctttccatccaaatccttcaaagtaaattccggagcaggattacctggtttcattgcttcttttgctttatcgcgagccagttctttctcatatccttctctcattctctgatataaaggagccatcattccttcctttacccggtcagtcaaaacattaaaagcatcccccaactggtcccttgtcaactgtgacattacatatactgatacatctttatccggattctgcctaacatagtcactttttatttttaaaatatttccataccattcttttgctgaagcataaactttacggatagaatctccgggtattccttttttctccatatccatacagactacattcaatgaatctattttatgactatatgctttacagtcctccaacacttcattataatcatcataaaaggaacctccctccaatttatattcatccaatgaacctgaaatttttataggttggccaggcaacagcaaaaaatttacagctttcatcgatatggcaggtatactgccatcctcattgggtttcactgacggtttaccataaatataaacctgtttcaatacactatcacctaaattaaaagcaaaacttccattttgcatggcaatcgtatctgtcctacgactatcacgatcatttacaggaaaagattgtaccaataatgtatcactctcgataccagtcagcataccgctgatttccggttggtccgaaggctggcaggcaatcataaaaccagctcctaccaaagcataaactaaattcttcatctgaatgtctttcaattattatctttgttttatttgcagcatcaaatatactttttcttatccaataaaaataaagaatcagaagtaaaatggcattcacttctgattctccgtaaaaaacctataaaattctatgctttcttgatataatccacaatccaggaacccacttccttagtaccatacttggccccaccttcaacctgaatttccggagtacgcacattttcatccaaagaagcatctacagccttacgaatcaaggtgccttcctccttaagatcaaaatactcaaacagcatggccaccgataggatttgagccaatggattggcaatattcaatcctttagcctgtggccatgaaccgtgaataggttcgaataccggagtgctttcacccgtagaagcagaaggaagtaatcccatagagccactgataacagagccttcatctgtcagaatatcaccaaatgtattctcagtcaccatcacgtcaaagaaacaaggatcctgaagcatcttcatggcagcattatccacaaacatatagtctgtagtcacttccggatactgaggagccatctcttgtgcaatctgcctccacagacgtgaagatgccagcacatttgccttatcaactacagtaagatgcttacggcgcttcatggcatattcaaaagccacttttaaaatacgctcaatctccggacgggtatacatattggtatcatatgccttatcattatcctgatatttttcaccgaagtacatccctccggtcagttcacgaatacagataaaatcggcattttccaccaattcggcgcgcaacggagacttatgaaccaagcatttgaaagtctgcacaggacggatattggcaaacaaacctaattttttacgcatagccagcaaaccttgctccggacgaacctttgctgtaggatcattatcaaatttagggtcgcctacagccgagaaaagcactgcatcggcattcttacaagcctgaaaagtagcttcgggaaacggatcacctactttatctatcgcatctgcaccacagatcgcgtattcataacttactttatggccaaacttctcacaaacagcgttcatcacatcaacgccttgcactgaaatctccggtccgataccgtcaccggctaaaactgcaattttaaaatccatttttttagtgattaatggttagcggtcagtgattaatagttggcggttaatgaaatctgacgacactgttcattaaccactaaccactaatcactaaccattattattttcatattcattttctattatattcagcattttcatggtagccttgatagcagcctccgtctggtcagcatccagcccacgagtacggaatactttttcttcaaaactccaagttattactgtttgcacaaatgcatctgtacggcccccaggaggaatacttaccgcataattggtcaacatagggaatttacgccctaacgtcactttataaattttacgcaatgcacgcacaaaagcgtcatactgaccgtcaccgctggaattctcctcaaactcttttccgttaatctctatttttacagtagccatcggcttcaatccatgcgccagtgtcacaatataacttttcagttttacactttcgcttaccactccatgcttcagcacatcggaaacaatataaggcaaatcttcctgagtaaccaattccttcttgtcacccagttcgataatacgttccgttaccttacgcatggattcttcatctaaatcaagtcccaaatcctccagatttttacggatattggctttgccactagtcttgcccaacgcatactcacgtttacgtccgaatcgttccggcaacaaatcattgcaataaagattattcttattatcaccgtcggcatgaacgccggccacttgcgtaaacacattctcacccacaatcggcttgttggcaggaataacaataccagaataggattccaccactcggctcacatcattcagacggctttcgtcgatattggtcaaagcattaaaatgatccttcagaatagcttgaacactggcaagcggtgcatttcctgcacgttcccctaatccattgatagtagtatgaagtcctttaaccccactcagcacagcagcaagtacattactcacagccaagtcataatcattatgcgcatggaaatcaaaatgagtatgaggataacgttttttcatcttccgcatgaattcaatcacttgcaaaggattcaagatacccaatgtatccggtaacatataccgtttgatactggtatccttcaatccgtccatcaactggaatacatagtcagaagaatccttcattccgttactccaatcttccagatatacattaactgcaatatccagttcatcggcataacgcaccacattcacaatatcttcaatatgttcttcaggtgttttcttcaactgctgtgtacaatgtttcaacgaacctttacacaataagttaattaccctgcatcctgtacgttgtatccaatctacagaagtacggccatccacaaatccgagcacctccactttgtgaagcaaattccggcgggcagcccagtcacatatcattttaacggcttcaaattcgccatccgatacacgggccgaggcaacctctaccctgtctacctttaaatcttccaatagcaatcgggcaatcatcaatttttcatggggcacaaaagatactccgctggtttgttcaccatcgcggagtgttgtatccatgatttctattttgacgctttttcccatgcttctatcttgtctttgttggtcagcaaaaagtcgatatcatccaatccgttcatcaaacaatgtttcttgtatgcattaatttcaaaatgttcgcttttacctgtagccttattggttatagtctgttcgggcagatttacttccacttccattttcggatctgcatgaattgaatcaaaaagttccttcaaaaatccttcactcaccaccaccggaagtacaaaattatttaattcattattcttatgaatatcagcaaagaaactggacacaactacccggaaaccatatccggcgatagcccatgctgcatgttcacggctggaaccagaaccgaaattctttcccgctacaaggatttgtccaccgtaagtaggattattcaatacaaaatccttgttcagagaaccatccggattgtagcgccagtcacggaacagattatcaccaaagaatttctcttcacgagttgtcgcctttaagaaacgggccggaataatttggtctgtgtccacattctctaaaggaaggggtacgcaagtgcttgttatgatattgaatttctgtttcattgtcttcgcatttttaaattagttctctaggatctgttattacaccggtcaccgcagcagcagcagctaccagcggactggcaagcaacgtgcgagcacccggtccctggcgtccttcaaaattacggttactagtagataccgaatactttccggccggaatcttatcatcattcatagccagacaagcagaacatcccggttgacggatggcaaaacctgcctcctccaagattttgtccaaaccttcttcacgaatctgtgcatctactatccatgatcccggaaccagccatgcagtcacatgatctgctttctttttccctcttactaaagaggtaaaggcgcggaagtcctcaattcgtccgttagtgcaagcacccaaaaatacataatcaattttcttacctagcaaggattcgcccggctgaaagcccatatagtccaaagactttttaaaagaagcacttttatcatctaccggaatatgctcagtgattcccatacccattcctggattcgttccgtatgtaatcatcggctgaatatctgctgcatcaaaacgaatttctttatcaaatacagcatcatcatcactctttaatgttttccaatgagacaccgctttatcccaatccacacctttcggagcatgttccctgccttttatatattcaaaagtcacttcatcaggagcaaccatgccaccacgtgcccccatttcaatactcagattacataaagtcagacgaccttccatactcaagttacggacagccgaaccggcatattccacgaagaatccagtagcaccactggttgtcatcttagacatcatatagagagccatgtctttcgccgtcactcctttacccagttcaccatcaatagtgatacgcatggttttcggacgagattgtaagatacattgtgaagccaacaccatttctacttcactggttccaataccgaaagcaacagctcccatcgcaccatgggtagaagtatgcgagtcaccacaaacaattgtcatccccggcaaagtcagccctctttccggacctactacatgaataataccatttcttttatccatcataccgaaatgagccaagccgaaatctttggcattctttgccaaagtatccacctgtgttttagaaaccggatcctcaatcggtttatcctggtcatgtgtcggagtattgtgatccggcatacaatatacatgatccggacgaaagactttcaccccgcgtgcgcgcagtcccgcaaaagcctgcggactagttacttcatgacaataaagcctgtctatataaagttgagtaggtccctcctcaaccttttgtaccacatgggcgtcccaaatcttatcaaataatgtgttagccatttttgtattacgtattattatcttttaaacttgttgatacaatcaatatatgcttctactgatgcagcgataatatctgtattcgctccgaaaccatagtacatctgtccgtcatattccacctgcatgtgtactttacccatatcatcactacctttactgatagcctggatcgtaaattccttcaacaccatgtggcggtcaataatttttttcaaagccttgatagcagcatctaccggtccatttccactggcagcagcttcaaagtgctctcctgcaatattcagtcctaaacttgccaccgaacgaactcccactccgcttgttacctgcaagtaatccagttttatatggttattgacacttctatcggcacctgccaataccagaatatcatcatccgtgatatctttcttcttatcagccagttttaagaaatcctcatataccttatccaatttgtcctgttccagttcgactcccaaaacatgaagacgatgttttaacgcagcacgtccgctacgagcagtcaaaacaatagcattatcatcaatgcccacatccttcgggtcaataatttcgtatgtttgtacgttttttaaaacaccatcttgatggataccggatgaatgtgcaaaagcattacgtcccacaattgccttgttcggctgaaccggcatattcatcaaacttgataccatacgactagtcggataaatcttctgggtattgatgtttgtctgaatactaatatcattatggcatttgacaatcattgccacctcttccaaggaagtgttaccggcacgttctccaatgccattgatagtcacttctacctgacgtgctccatttaacacaccactaatcgtattggcagtagccatacccaaatcattatgacaatgagtagaaataatagccttatcgataccatctacatgatctaccaaatatttaattttcgccccatactcttcaggcaagcaataacctgtagtatcaggtatattcactactgtcgctcccgctttaataacagcttctaccacacgagccaagtattcattatccgtacgtcctgcatcttccgcataaaattccacatcatctacataacgacgtgcatatttcacagcagccacagcacgttcaataatttcttcacgagtagaattaaatttatatttgatatgagaatctgaagttccaatgccagtatggatacgtttgtgcttggcaaacttcaatgcgtcagcagctacgtcgatatctttttcaactgcacgagtcagcgcacaaatggttggccaagtaacagccttagaaatttcaattactgaattgaaatcacccggacttgaaataggaaatcctgcctcaatcacatccactcccaaagcttccaactgcttagccacctgaatcttttccactgtattcaactgacatcccggaacctgttcgccatcacgaagagtggtatcaaaaataaataatctgtcactcataaatttcaattttatattttaccattattatattcataaaaaaaacctttcacacagggaagtgagaaaggctttcgtatatcattgttcacacatacttttatgcacaacactcacttcccgctgactttgccagtagaataataatgccgcatagcaaaatatgtataaatccttggttcattgtttatctcttattttatctaaaacgttgcaaaggtagagattattttctaaacgcaaaataaaaatgaaagttttttcattatataaactacgattttttatttattctacttttagagtaacagtttataggaatatatgtctacaagtatctctatagaagtgtatctgcaaagatatagatcactttagatatagaggcaaattgaattgacataaataaactcactttatgaacatcg

SEQ ID NO: 3936 - DNA, 7586 bp, Unknown
  gut microbiota DNA sequence
gatgaagttttatcactaaggtgatcaattttcatcacatgggtgatacggtttcatcactaaggtgaaacgataaattaaaaaggaagaatacgtcattccgactgccggttattccaacccttccagcattctctttaaaacaactgtagcagaaatttcccggttggccgcttcaggaataaccaacgaagtaggcgcttcaatcacctcatcggtcacaatcatgtttcttctcaccggcagacaatgcataaagaaagcatcgtttgtcactgccatgtgcgctgcatctaccgtccagttcatatccttgctcaggatctttccatagtcggcaggacgggtgacaccgggacatgcccagttcttggcatagataaagtcagccccttcaaaggctttcatctggttgtattccaccttcgcgccacggacaaacttcgggtccagctcatagccttcgggatgagtgatgacaaaatccacatcggcctcgttcatccagtcggcaaacgagttgggaacggcctgaggcaatgcacgcggatgcggcgcccaagtcaagaccaccttgggacggtctttcttcttatactcctctatagtaatcaggtcggcgaaagcctgcaacggatgaccggtagcggcttccatagagaatacaggcttgccggaatacttgatgaactgattcagaatcttttcggtataatcatcctcgcggttctcaaaatgagcgaacgaacgcacaccgatgatatcacaataagaagccatcaccggaatagcttccagtaaatgttcactcttgtcgccatccataatgacaccgcgctcggtctccagcttccatgcaccttgattcacatcgagcacaatcacatccatgcccaagttacgggctgccttctgggtgctcaaacgggtacgcagactgttgttgaagaaaatcagcaggcaagtcttatgctttcccagggtttcatatttgtagcggtctttcttgatttcgaaagcttcggcaagggcactcttcaagtcgcccaaatcgtgtacgtttgtaaagtatctcataattttttcatttatagtattattgtcttatttgtccatccccctgaataatccacttgtatgtgttcagttcctccagtcccatcggaccacgggcgtgaagtttctgcgtgctgatacctatttccgctcccagtccgaactcacctccatcggtgaacgaagtaggcacattcacatagacacaagccgcatccaccattttcataaaataatcggccgcccggtcattctccgtcacaatacattcactatgtcccgaaccataaatagaaatgtgggccacagccgcctgtatggtcatagtcgccgtcactgccattttgtagtccagaaactctgttccgaaagtatccgtagaagcatgtttcagcaagtgggaagggtaagaagtcttcagataattgtaacacaagtcatcggcatagatttccacgttgtcctgctgcaagccgctacaaagagtggaaaggtcggtcagccggttcacatctacaatcagacagtccaaggcattgcacacgctgatacggcgtgtcttggcgttgcggataatggcggctcctttcgccacatcaccctccttgtcaaaataaacgtgacacacaccggctcctgtctcgataacgggaatcgtggcgttctgccgcacatagtctatcagccccttgccgccgcgggggataatcagatccacatagccgcgggcatggagcagcgcgtcggccgaatcatgtcctgccggcaacaatgccaccagataaggagacaagtgggctacatccagcaaggtattccggataatctccaccaggatacggttggagaaatcggcatcgctccccccctttaatatacaggcgttgccggatttgaaacaaagtgcaaacacatccaaagtcacattaggacgagcttcataaataatgcctatcaccccgaaaggcacacttaccttggtcagcttcatgccattgggacgcacggcctggctcagtatccttcccgatggagaaggcagcgtggctacctgtcgtatgccttgggctatggcgtgaatacgttccgccgtcagtttgagacggtcatatttgggattcgacggatccatcgctgccagatccttggcgttctcttccagaatccggtccgtagcagcctccaccctgtcggccaatgcatacaaggtgtcattgatgatctcctccttgcagaaagcaagagatccttttgcctgccgcacctgtttaaaaatatcttttatctgttccatagtcacttcattttatctaaatcattaccacaccgcatcagtccaaatacaaataatcatagtgtaccataggtttctgtccatgtttcccctgcaatgcacgcgcttctgccgaatcaaatccgatgcgtcccactcctatctgcctgccccggtggtctatgattttcactatatcatctttttcaaattccccttctatgcggaccactcccacaggaagcaggcttaccgccttctgtcctttcaacactttcacggcctgttcgttcaaatgcaactcgcctttggcaaagccttcgctatgggcaatccactttttcacgctggatactccgccttctgccggaataaagcgcgtacaaaccgtctctgccggatgttgcagcaaatcgaccagaatatggtctttcttgccgttggctataatgacggtaatgccctcatcggccactttacgggcaatggtagtcttggtcagcataccgccccggccgaatcccgatttctccgtctgtatatagtccgaaagatcctttccctgctccacctcccgtatcacctgcgtaccgggggtagaaggagaaccattgtatatgccgtcaatattgctcagtatgattaacgcctgcatatccatcatggaagcgatcattcccgaaagctcgtcattgtctgtaaacatcagttcggtgaccgaaatggtatcattctcatttacgataggtatgacaccgttctccagcatcaccatcatacagttgcgctggttcaggtaatgacggcgcgtgccgaaactttctttcgtagtcagcacctgcccgacgggaataccgtgttcgcgaaacagctcatagtaccggttgatcagttttgcctggcccaccgccgagaaaagctgcctttgctccacgctatccaatttcttggaaggcttgatctcgctgcgtcccgaagctaccgccccggatgaaatcagaatgacttccaccccggctttgcgcaattccgccacctggtctaccaatgccgacatacgcgtcacatccagcgtaccgtctttacgcgccaacacattactaccgatctttactgctattcttgtaaactgaactgccatttctcttgttattttagaaacacaaatatagatattaaaatcaatctgtaaagtcaaataagccaaaaattaacctttatcgtatttgtgtgcatgtattttaattctcatctttgcaaaatgaaaatatataacgataatattcaataggcaaacgtatggttaaagctatttttttcgatattgacggtacactggtttcttttgaaacacataagattcctgcttcgacccaagaagcattaaagacacttcgtgataaaggcattaaaatatttattgctaccggacgcccacaatgtttaataaacaacctgggtgacttagagtttgacgggtatatcaccgtaaacggaagctattgttttaccgccggccaccagcccatttataaaggttgcatcccgcaagaagacattgaacggcttatcacttttcaacagaaatatccggtacctttcgtttttgcatacggcaatgaaatgttcgtcactgaagtgaatgacagagtacaggctgtttccgatctgattgaaattcctgttccccctgtcgcctccatagaagaagcccgtggaaaagacatcctgcaaataatggggtactttacggccgaagaggaaaaagaaacagatatattcggcaaagtgctgacccattgcgagccaatgcgctggtatccattgtttgccgacatcattgcacggggcaacagtaaaagtacgggaatagacaaggtactggaatatttcggcatcaacctgaaagacaccatggctttcggtgacggcggcaatgatatccccatgctgaaacacgtagccacagggatagctatgggaaacgccgaacctcatgtaaaagctgtggccgactatgtgaccacctccgtagatgaagacggaatagccaatgcgttgaaacatttcggattaatctaaagaaggttcgataaaaggaaaatgaatgcagagagtatcctcatgagagatcccaaactaaggtttttcatgtcgtttattaatttaagagatgcaaagatattcatttacttcttattaattcgtttcttgttttgatttcttgacccatttttccagaaaactctttatctttacgcaaaatatttattaattgcgaatctatgaagaaaaccaattctatcctttgcgcatttgtattggcaggctcgctcttcggctgttccacaacacagcagaagacaggcgaaactgactacacgcagtatgttaacacgttcatcggagcagcagacaacggacatacctttcccggtgcctgccgtcctttcggcatgatccagacaagccccgtaaccggagctgtcggctggagatattgttcggaatatgtgtacaccgactccctgatatggggatttacccagacacacctgaatggaacagggtgtatggacctgggagacatcctggtgatgccggttaccggaacacgcgcccgtgcctgggacgcttatcgcagccacttccccaaagacaaggaagcagcgactcccggatactacaccgtagagctggccgaccccggcgtgaaggccgaactgaccgcctctccccatgccgccctgcaccgttatacctatcataacgccgactcggcatctgtattgattgaccttcagcacggacctgcgtggaacgaaaaccaataccattcgcaagtacaaagttgcgaaaccaattgggaagatgcacaaaccttgaccggacatgtacgcaacagcgtatgggtgaaccaggattacttttttgttatgaagttcaatcgtcccgtcatagataccctgtatctgcccatggccgaaactgaaaaagggaaacgcatcatcgctacttttgacatgaagccgggagaggaactgctgatgaaagtagccatgtccaccaccggcgtggatggagccaagaagaatatggaagcggaaatagccgactggaattttgaaggagtgaagcaagcagcccacaacgaatggaacaattatctgagccgcattgaagtaacgggtacggatgacgagaagaccaacttctataccagcttctaccatgccctgatacagcccaaccaaatctcggacgtagacggatggtaccgtaatgcagccgattccatcgttaaagccggtaacggagctttttattccactttctctttatgggacacttatcgcgccgcccacccgttttacaccttaatggttcctgaaaaagtagacggattcgtcaattcattggtagaacaggctgaagtacagggcttcctgcctatctggggactttggggaaaagagacatataccatgattggcaaccacggtgtttcagttatcgccgaagcgtaccgcaaagggttccggggttttgacgccgaacgtgccttcaatgctatcaaaaatacccagaccgtatctcataaactgaaatccgattgggaaacttatatgaaatacggttatttccctacagacttgattaagacagaatcagtatcctccacactggaatcggtatatgacgattatgccgcagccgatatggcccaacgtatgggtaaagaggaagatgccgcttattttgccaaacgtgccgatttttataagaacctgtttgataaagaaacgcagttcatgcgtccccgtaatgctgacggaagttggaaatctcccttcaaccctagtcaggttgcccacatggaaagtaccggtggagactataccgaaggtaatgcatggcagtacacctggcatgtgcaacatgatgtgccggggcttattgagttattcggcggagaacaggcattcttaaacaaattggattctttgttcaccttgaaactggaaaccacccaggcagatgttaccggcttgatcggtcaatatgcacacggcaacgaacccagccatcacattacttatttatatacgttggcaggccgccccgaacgtacccaggaactgatccgtgaaatctttgatacgcaatatcgtcccgaacccgacggactctgtggcaatgacgactgcggacagatgtcagcatggtatatgttctcggctatggggttctatccggtagatccggtaagtggcaattatgtcttcggcgctccgcagctgcctgaaatcgttttgaatctggccgacggaaagactttcacgatcattgccgaaggattgtcaaaggaacacaagtacattgacagcatcacactgaacggtgaaccctatacaaagaattatatctcgcatgaagatattttgaagggtgggactttggtgtataagatgaaataaggaatctacctcattacaggaagagggtataacagccggctccggctatataccctcttcctgctttctgttcctgatgcttttcaaaggatcataatgctccaggtatttatgcccttatccatgaaacatgatcattatcagcataacttctgttttagatatcttgtaattgccatattaaattgttgccatgaaccatgtcaagtcagaacatgatataatgggcaaaacaaaaatacaactcttatatttgctcaatccaaactttattgcgttatttgcgttacatgttttatgtaacataaaaactgcaatgaagagtatttctactaatccatttttaataaccggttaccaaggacccgactatttctgtgaccgcgaaaaagaaacagcttctttaatgtcagcattaaagaatggcagaaatattacattaatcagtccgcgccgtatgggaaagacaggactaataaagaatgtattttactatattcaaaaagaaaataaatctgccgcctgtttttatctggatatattttcaacccagaatcttcaggagtttgtatctctactgggacgaagtgtgttggggaaattagataccttatcacagagtaccttaaaatcgctattctcattctttaaaagttgccgtccggtcatcagcgccgatgaaattacaggaatgccatctgtaacactcgactttattccggaacgttcagaagaaaccttgaaagagattttcacctacctaaaccaatcgggagtag

SEQ ID NO: 3937 - DNA, 75788 bp, Unknown
  gut microbiota DNA sequence
cacttttaaaaaagctcgttatctttttaaaaaagttcttgttcttttttgaaaagctcttgatcttttttgaaaatgtccttatcttttggaggtgaatgatttcacagacgtgtactaggatttagttaacaacttctattgttattactatatcagatttgcatagttgtttttaaacctaatgtagttattatataggagattccacatacatccgcataagtccgcacatacatatgtgtaatcctatgcagatatacgtgtaaaagcatgctttctgacacgggtaaaaaattgaccggacaaccgaatcgattttaagctaaaggctgatgaatatacaaacttacatacttcaggctaacatattctatcatatatcatgataaaagataccaagtacaatgctccgtatccaacttttattttagtattctatctgttctattttagaagacaacttttcaatgacagtacccagttcttcctcccacgggataacattaaactccccccaaaagtcagcatcatatttaaaatgtgtatccgaaaatatagtgcgtgtaggcatccgttctttacgttggaaacgagtcacattatctgtatccaccttacaggtaaccatttcaaaccatgtatgcaaggaagaagaactaaaccattgccgtttaagtttcactttaaaataaagatcgccacgaatatgattcatgtaataaatgccattccactgcctgtaagaaatggtataaaccacctcttgcgcggttattttccacttccgtgtctttcgttctataaacatatccgtagcttgcctcacataggcaggattgatttcaagacgcgcctgaaccaacgcattgttttcagcatcaatatataattcgccacaataaagaggttcttttattcctttattctgtcgaaaggaaatcacattaaccaaacgattgtctatcaccgtcatatcacaggaggcataagagtacacattacccttatcgtcaggcaacagaaaatccggcaagttcttgacaatatccagttgcaaacaagcatcaattcccgcacttatcttggctatcagtgtatcccgttcctgactattgactatgcgactcatctttaatagttttacatgatcctgaaaatgattcaacaaaggagaaggtttgtagattttaaaaacagcctctgtcagattacgaaatttttgtttataccgaaccccttccctataaaatgtagtgagataaacaggaaccgacgcataatttgtttttttagctttcaacatctcacgcaacaaccgtataggattgacagcacgaatcaccacttcttgaataggaatcacccgaggctccagagaccacaccgcgtgttgagcctctaataaagacatatccatctcctgtcccacataccccacatgagaaaccacgatgcgcccctgtctcaacgaatcgggcaatcgtaaacggaattcgccattctgattggtaatactgcctatagaagtaccgactacccccaccgtgccgtaagcaatgggagcccccgactgattatcctgcaacttgccttctaaagtaaaataggccaaagtatctttagaagtggtaacaaccggacattgcacctgcaactgattgatcaaaatatgattctccacaatatgcagactgatatcctgccgaccgataatttcgtaaacagcctgacgaatagtgcgctgtcctgcccccaacttcaccgtacgatcattgtccaccaccttgctgtcataaacaaaaaggaaaccagactgttcggacaccttccccagtaaagtatagacagtacccttactcttagcaagataaatgactcgctccaacacacctctatccgccgctttcgtaaattccgtcatgcaaaccaacaaactgaaaaagaagatatgccaataataatgatatgtacgaatatgattcattttcccactttattcggataaaacacctatatcaccttcacgagtatattttaaattcatagccagacagataagctctgccatagactccggagattccccggaaaatgcaaccgtaagccgacgctcccctaaggagggggaagtcttaagctgcaaaccggaagaatgcatattaataaccctaaggatattcatcaaagattcatctttgaaacgcatacttttccaataatgggctatccgggtatcgtccctataatcagtgaaacgcaattgatgtgttttaagcgtcaccgcttcacctgcattgacatacatctcttgatttttatttttcaatgccactttgaccttgccgcgctgtacggacagttcgaaagtactccctacatcactctttacatgaaacatcgttcccaagacctcaattctgacctcctccgtttcaatcagaaaaggacgttcccggttaccggccacatcaaacagggcgtttccctgcaaactgacctcacgcttgtccatagagaaatgttcaggatattgcaaagaggtttccccacccatatagacaatagatccatcctcgagtgtggtcaccaaagtagattgctccgtgttctcctgcataattaaagcccgaacttccaccggctcgcccacttttcgataagtagtagtcaaaaagacacctattccgacccatatagcagccacagccccccacttccacaacatggatgcagacaaacgttttctattctgccggtctgataacaaaagtccgtcagcatccaaacggtcatacaatttattccatgcctgatccactctttccttatttctttttgtttcactcatgtccttataatataattctcaatttctttttttaatgctttaagagcttttgtcatctcagcctctacagtcttcactgacaaagaaagctgcgaggctatttccgcatactttttaccttccatacgatgcatccggaatatgcgcaaccttcgttccggcatccgagcaagcgtagcatctatcaaatgtcttaattcctggtattccatctcttcttgaggattgctatcctgtgtccgccccttccgcgagaggacaaactcccgatatttgtttctcacctcctgatgctcgcaatattgaaaagactgattgcgcaccgcaatataaagatagcttttcatagaacggaacaacggcagcctctcccgatctctccaaaacccataaaacaactcctctactatttcctccgcagcttccatactgccggtgatgctcatggcataccaacagagaggagaataataacggcgaaacacatcttcaaacgcctttatatctccctctcttattctggccagtgttaacaaatcattcagcatctacttcttttttggtagttcttttcaatcatacgaacctcatccgagactttaacgcgattgtttctttaacttatggactgcattttccaatgattccgtaggttcaatgatattataggagccccaaaaatcctcgctccaatattcatccactttatcataaaaagcatctttctgatgaaaagccatctttccgggaatgatcgccacattattttccttcctatccgttgccaccatctctgaaagcacagtatagccggtagagaaaagtttgcgcttccagtcacacttaaaccggatacggttacggatataattcagataggttttcccatccatatctttataagtaacaaggaaagaaagttcctgtggcttaaaacgtaagccatagggtttcttggctagaatagcctgcactgccttgactttattatccatagacaagctaaattccgcacgggtaaacgacaacttgtcacgatcaatatacaatttgccataatacaaggcataaggcaaaacgacacggggacggaaactgatcacatattgctgacgattgtctatctggaccggttcttccataaagaaatcataatagttcaatgtttccatatccaacaacgcatcctgatttttcacaatgtccacatagatagataaagtgggaccaccagccagtttcacccccaacgtatcactgactttctgactgagcaaccggcgccccttcaaaacctgcacccggtcgcgggtagttgtcatatcctcataagaagtcttgtaaacatcaataatagcttccgaaatattgatataacgacgccctttctgaacagtttccctgtaaaagccggtaagcatattgtttttattgctgtaattgacaggaatcttgcgaatggcctcttccactataagacgaggattgtgggcataaaccacaatctcattcaacatattggcatgaggggtaaggtaaatctttaaatccgacaaatgttctttatccaaacgtactctattattatgataaccgatatgtgaaatctctaaagcaaaaaccatctccgcatcttctatcttcaaagaaaattcaccatccgcatttgtcaccgtccccacacttctgcccggaactgatacattgacatactctaaagtctttctattttgtttgtcctttactacaccgctgactgtaatataagtattctcttcagcaaacggtgtcttctcctgactccatcccggaatgacactcaaccaaaagacaacgagcagtatccattcaatcaattgttttttatgcgctctcatattcattaaggtattaaaaaagtgaatactaattctgtttctacttataagatcacccaggattaaaataccctatgaaaataagaaaaataatttgttttatcgatattgacgcccttttttatagacccgaacagtataaacaatcaaaacaactgtatcattctttttcttcctttttgattattgtcttctttttcttcattctgccactcttgcgcaaagcttccgctataatccattgaagctgtccattcgtggaacggaattcatccgccgcccatttctcgatagcttccatggtttccgcgtccattctgagcacaaagctttttatcgtttctttctttgccatctcctacactaatgattcaacgttccggaattaattaccggctgtgctggctcgtccgcacaaagtaccaccaacaaattactgaccatagcggctttcttttcttcatccagttctacaattccatcctcagctaatttatccaaagccattttaaccatagaaacagccccctccactattttttcgcgcgctgtaataatagcacttgcctgctgacgacgaagcatcaccgctgcaatctccggagcataagccaaataattgattctggcctctactatttccatacctgccatagccagacgctcattaagctgacgttccagctggtcattaatctcctcacctcctccacgcaaggtcagctcattcgtatcatgctcattgtcatcgtaagcatactgtccggccacctggcggagggccgcatcactctgcacacgtacaaaatcctcaaaggcattcatacgccctgccacgctgacacttgccgtccctgtccctttactgtccgccatcgtctgcgcgtcaatctcaaacatcgccttataagtatctttcaatttccagaccaaaaccagccctatcagaataggattgccaatcttatcattcacctttatcggctccacatccagattacgggcgcgaagagacaacttcttcttgttcatgaaagggtttacccaaaagaagcctgtgtttttaaaagtgcctttatattcaccgaaaaacaccatcacacgtgcctcattaggttcttgagaaaaatatcccggaagcatcagcataaacaacaataccagcataaacaaaacaggaatagataaccaaggtagttgcccaaaaatcaaaaagttcaggaatactagtgcaggcaacataaccaagttaaaaaacaaagccataaacccattaattaccagctcattgtaagacatttcttttgtttccataatgatttatttttgatattattatgatatcacaaatcaagcaatacttcttgagataaacaaactgatttatatgttatacgacagaagcaaacaaaatattcaccaaaatgcaataagaaactcctactttttttgacctaaatcaataaaattgagatatcgattaaaaacatgctgtaaaacatatatcataacgaacaaactccttatctttgtgttgtaaaacataaaaagatatttttttagtagctactaaggtaaaaagaaagattgtttaaagaaggccaaccgggaggtgcgcctgctatttatgagtgtttttaggtattaattaaaaaaagaaaggataacattatgaaaaaggtaaaaaacatttttcacaaaattgctaacgctgatcctatgatttggggttacgttatgttgaacgaaacaaagtaaattagaaccaatacagggcaatcccctgtaggactataaaaaaggacggttatttaaccgtcttttttatgcccttttacgggatttccactatctttgtccattcattttcaaacgtatggacaaaatgcaagtagacactcataataaagagtttcaagatgccttgaaccttatccaatatacacgtcagtcagtattcctcactggaaaggcgggtacaggtaaatctacttttctaaaatatgtttgcgaagtaaccaaaaagaaatatatagtactggctcccacaggtattgcagctatcaatgccggtggaagcacactgcatagtttttttaaattaccattctatccacttttaccggatgatcctaaattcagtttgaaagatggaaagttacatagctttctaaaatatacttccgctcatcgaaaactgataaaagaagtagaattagtgatcatcgatgaaatttccatggttcgggcagacattattgactttatagacaaaatattgcgggtatattcacaaaatatgcgtgaaccattcggaggcaagcaaatattgctggtaggagatgtttttcaacttgaaccagtcattaaaaatgacgaacgtgagataatcaaccgcttctatcccaccccttatttcttttcggcacgggtctttcaggaaatggagctggtatccatagaactgacaaaagtataccgccagtcggacaaaatttttgttaacgtattggatcatatccggaccaatactgccggagcagccgacttgcaactactgaacacccgttacaacactcacatagaagaaaatgaaagtgatatgtatatcacacttgctacccggagagacaccgtagactttatcaatgaaaagaaattatctgaactacctggagaatcaacgattctgaccggtgagatacacggagaatttccagaaagcagcctccccacccaaatggaactggaagtaaaaccaggagcacaaattatttttataaaaaacgattacgaccaccgttgggtgaacggtacgattggcaccatttcaggtatagacgaagaggatacattatatgttatcacagaagacggacaggaatttgacgttaaaaaagacagttggcgcaatatacgatataaatataatgaactagaaaaaaaaatagaagaagaagaattaggagtatttatacaatatcctatccgtttggcatgggccatcacgatacacaaaagccaaggattgactttcagcagggtcgttattgattttacaggaggggtgtttgccggtggacaagcctacgtagcattgagccgctgtacttcactagacggcatccaactaaaaaagcaaattacacgtggagatatctttgtccgcccggaaatagtaaagttctcgcaacgattcaataaccgccagtccattgaaaaagcattgaagcaggcacaagctgatgtacaatatgtagaagcggtacaacacttcgacaaaggtgattttgaaagatttctagaacaattctttcttgccatccattcacgttatgatatcgaaaaacctttgatcaaaagatttatacgtaagaagctgggaatcatcaacaatttgaaagtcgaaaacaaacggctaaaagaccaattccatgtacaacgcaaaaatcttgaaaaatatgcccgcgaatattatttaatgggaaatgaatgtatcatccaggcacatgattcacgtgctgctattgccaattatgacaaagcgattgaattgaatccttcttatacggacgcttgggtacgtaaaggtatcacattacataatgacaaggaatactacgaagccgaagtttgtctgaatgaagcggtacgccttagtcccgctttattcaaagctatttacaatcgagggaaaaacagactggcattagataatatagaaggagctttgggagattttgaccgggctgtttctttaaagccggaacatccgaaggcccatgaatatttcggagacgcattgatgagagtcggaaaagaagaggaagccgccctacaatgggctattgcagaacgcttgcgtgaaaaaaaatctaaaaattaaaataacatgcttttaagactttataataagaataataatcccaaagatctggaagaagtaatccgggtattggaagagggagggttaattatttaccctaccgatacgatgtatgccataggatgtcatggtctgaaagaacgtgcaatagaacgtatctgcaaactgaaaaacattgatccacgtaaaaacaatttatccattatctgttacgacttaagcaatatcagcgaatatgccaaagtagacaacagcacattcaagctaatgaaacgcaatcttcccggaccgttcacttttatcctgaatacgggaaaccgtctgcccaaaatattcaagaaccgtaaagaagtaggtatacgcgtaccagacaacaacatcatcagggaaatatgccatatactaaaagcacccatcatgaccaccacgttgcctctgaaagatggcgaagacatagaatatattaccactccagaactgatagaagaaaaattcggcaaagaggtagaactaattattgacggaggaattggaggcatagaaccttctaccattgtgaactgtacaaacggagaagcagaaattgtacgtcaaggtaaaggtattctgaacgatttttaatctgaattgttttatatattagaaatgtcaaattaaagtaaatttatcatgttattagcatctgaaacaagtattcaattaaccaatgcattagagaaacttatcgactccggcattcaattaggagaaagagtattaggagcacttattatttttataatcggaaagttcctcgtaaattggctgaacagactttttgcacgtattttggaaaaaagaaaagtggacccgagtatccagtcattcctaaagagtatggtgaatatcctactgctcattatgctgatccttgctgtgatagggaaattaggtatcgaactgacaggattcgccgcacttctcgcttctgccggtgttgccatcggtatggcactgtctggtaacttacaaaattttgccggaggactgattatcttattgttcaggccttataaagtgggggactttatcgaagcttctaccggtgcctcgggaacagtaaaagaaatacagatttttcatactattcttatcactgcagacaacaagatgatatatgtacctaatggagccatgagtagtggggtcattacaaattacagcaaactggacacccgccgtatagaatggaattttggcgtggactacggagaagactataataaagtagaaaaagtattgcgcgaaatcattgccaatgataaacgtattctcaccagtcctgccccttttattgaattaggagaacttgccgccagcagtgtaaatataaaaatccgcgtatgggtgaatagttcggattactggaacgtatttttcagtatgaatcagactgtttatactacttttaataaagaaggaattaacttcccattcccacagcttactgtacatcaagcctaacgtcagaaatctttagaacacgaatgacgcaattgtcacaagcttgatcttatcaatcatgtgtcatttgcgtcatttgtatgctatcacaagatttattttctatccgctttcaaacgatcagccatagccttagccaactcctttgcctgagtgttagtttcggccttcatgctatgtttcatttctacaggatttccgacaggctcaaatttcaacttatcattaaactctgcaattttcttcacagcagcgctagcccatgtaaatgagccaaaatatcccagataacgcccctttatctcgcgagaagccagcttgctcagcagagcttccatttccggatacatctgagtattataagtggggcatcccacaatcagtcctttatatttgaatacatccgcaataataaaagaatgactggtatgagaaacattatgcatcacgatattacgaattccctgcttgctcagttcttctgcaatagcttctgccacctcctctgtattaccatacatcgagccataagctattacaaccccttcttcggcctcataacgactcaaacggtcataaatacgtaccacacgaggaatttcctctgtccataccggaccatgagtagaacaaacagtcgttattttcaagttttgcaatttctgtaaggccttctgtaccggcgcaccatatttgcctacaatattagaataatagcgcaccatttcattccaataaatatctgtattaatatttgtatcaaccacaccaccattcaatgcaccaaaacaaccgaaagcgtcaccggaaaacaaaataccttccgtttcatcaaaagtaaccatcgtttcgggccagtgaaccatcggaatcaatgaaaagcgcagtctatgatgtcccaaagctagaaaatctccttcacccactacataacgctcaccgcctacaccataatacccttcaatcatttcgaaagtcttcttgttaccgacaatcacaatgttaggataatattgcttgatcaaactgatagaaccggaatggtctggttccatatgatttataatcaaataattgataggtttatcaccgataatgctacgaattttcttcaaataaacctcaaaatagcatacgtctactgtatccaccaaagcgaccatctcgtcgtcaatcaaataagagttataagacacaccgtaaggtaacggccacaagttctcaaacaaagccttgttacggtcattcactcccacataatgtacttttcctttgatttccatatctgttttcttcttttaatatttatagtatttgccttgccaggcatctttttctctcatccgttttttcaccttatccgtaaattcataatttttcaatccccaatcaggagctatcaacaattctttaggtgattgggaaacaaaacgctccagtacaatgtccggacgaagatgttctatataatcaataaccaaatcaacatattcatcagctgtataaagatggaaagcttcaggctctttcacatattcactcgccatgcgcgtacctttaataagttgtaactgatgcagctttaaagtagtcagaggtaattgtgaaagtactcctgcctgtctgattaacatttctctttcttctccgggcaaaccaagaattatatgccctcctactaaaatccctctctctgcagtcttccgaacagcctccgcagaaacggcgaaagtatgtccccggtttatccggcgcaacgtttcatcatccgtactttcaatgccatactccactaatacaaaagtgcgtttaccaagatcttccaaataatccagtaatgatatcggcatacagtccggacgagttcctatcaccagtcctaccacatcctctaccatcagtgcctcttcgtattttcttttcaactcttccagttccccatacgtattggtataagcctgaaaataggccagatatttcatttccggatatttgcgtacaaagaaccgctttccttcttccaactgctgagtaacagactttcccgtatggcaataggccggattaaatgtttgattattacaataagtgcaacctccgtatcctaccgagccgtcacggttaggacaagtaaatccggcattaatagaaatcttctgcactttgcaaggaaagtgcatagctaaaaagccggataagtcgttataaagcatctctctgttcatgaacttattttgcgggacaaagatacgtattttcaaacaaaagttttacctttgtctttgattatcatttaaagaatttatctattatgagaaaattaagtatatttattattttattcttctgcttgctgacagtcagagcccaacaagtaagcttgcaagacgtagcaaacagaacgtatcgtgccgaaggaatcagaggtatcaaaccgatgttggatggagaacattatacccaaatgagtgccgatggcaaaaaaatcatacagtattctttcaagaccggcaaagaaacaggcaccatcttcgatgtaaatacggcccgtgactgtagcatcaagtcatttgatgactatatcatgtcacccgatgaaaaactgattctaatacagactgaaaccaaacctatttatcgtcgttcgtttaccgccaattactatattttcaacgtaaaaaacaataaaatggaaccgctctcagaaaacggtccacaacaggttcctttattctcgccggatggcaatcagatagcttttgtacgtgataataatatctatctggtaaaattattgtttggcaacagtgaatcacaagtaaccaaagacggcaaattcaacgaagtgctaaatggtattcccgactgggtatatgaagaggaattcggcttcaaccgtgctttcgacttcagtgcagacagccagatgcttgcctatatccgttttgatgagagtcaagtacctatgtattcttttccattatacaaaggtatggttcccgcattagagaaattcagcacttatccgggagaatatgaatacaaataccctatgccaggaattgacaattccaaagtaaccgttcatacttttgatataaaaagtaaggtaacccgcaagatggacttgcctctagatgcagacggttatatccctcgcatcaagtttacggatgatgagaatgcgttggcaatcatgactttgaaccgtcatcaaaaccgtttcgacctctattttgccaatccacgaagtacattgtgtaaactgatggtacgtgatgaagctccccaatacattaaagaagaagcctactccaacatcgttttctatccaaaaaactttgtggtgatgagtgaaaaagacggttataaccatctctatctttacactagcggaggaaacctggttaagcaaatcacaaaagggaacttcgaagtgaaagatttcctgggatgggatgaagctaccaacacattctattttgaaagcaatgaaggtagtccgctacgcaccgctatctacaaagtggacggcaaaggtaaaaagaccaaactatccaaacaggaaggaactcataaagctattttcagtaacaatatgaagtattacatcaatactttctctaatatcaacacccctcctgtcattacccttaatgacaataatggtaaagaattggcaaccttagtagataataacacattgaaacaccaagtttcacgtctgaatatgccaagtaaagaactatttagtttcaagaccaatgacggtgtggaattgaatggttggataatgaaacccgcaaatttcaatccgaacaaaaaatatcctgttatcatgcaccaatatagtggaccgggttcacaagaagttgcagacaaatggggaattggagcccgtagagatggcggcatgttcgaagcttatatggccggtcaaggcttcatcatggcttgtgtagacggacgcggaaccggtggccgagggtctgattttgaaaaatgcacctacttgagtttaggagtaaaagaatcgaaagatcaagtagaagccgccaaatacttaagtacactaccctatgtagatggtaaccgtatcggtatatggggatggagctatggaggttacaatacattaatgtccatgagtgaaggaacaccgatattcaaagctggagtagctgttgcagctcctacagactggggtttctacgattcggtatatacagagcgcttcatgcgtacccccaaagaaaacatggagggttacaatgctgcatctgctattaaacgtgccgacaaactgaacggtgaattgttgctgatccacggcacagctgatgataatgtacacttacgtaacaacgcagaatacagtgaagcattggtacaggccgacaagcaatttgacatgcaaatctataccaaccgcaaccatggaatcagtggaggcaacacaactaaacatttactgactcgcgtagccaatttctttattgataatttaaaataaaaaaccattcaccacagattatataattttgcataaaaccgaatgaaaacaatttgcattggtataatctgtggtgaattataaatctaatatcatcatgaatcacgttaaaaaaccagactggcttaagataaacataggggcaaatgctcgatataccgaaaccaaacatattgtagattcccacaaactacataccatttgcagtagcggacgatgtcccaatatgggagaatgctggggaaaaggtactgccacttttatgataggtggcgaaatttgtacccgttcctgcaaattttgcaacacacagaccggacggcctcttccgttagaccctgaagaacctacccatgtagcagagtccattcaactcatgaaattatctcatgccgttattacctctgtagaccgtgatgatctagatgatttgggtgctgcccattgggctaaaacgatttcagaaatcaagcgcttgaatccggaaaccacaaccgaagttttaatccctgattttcaaggaaagagcgaactgattcagctagtcattgacgccaaaccagacatcatttcacacaatatggaaaccgtacgccgcatcagtcccctggtacgaagcgcagccaactatgcaaccagtttaaaggtcatcaaacaaatagccaataatggtattacagctaaatccggtattatggtaggtttgggagaacgcccggaagaagtagaagaagtcatggacgatttattggcacaaggctgcaagatacttaccattggccaatatctacaacctacccaccgccattatccggtagcggactatattactcccgatcaatttaaacagtatagaacaattggattaaagaaaggattccgagaagtggaaagcgcacctttggtacgttcctcctatcatgcagaaaaacatataaaatttaaagggtaacgagtaaaccaactttatatcttttttgttataaagatataaatagagatagagagaatgaaatcgttactggaatacaaaaatttaatcatgtccacagggttaataccagccattgtatgcatgattttctgcattttctttcaagatgcagttgttttgtatgtctgtagtttggctagcattatttatatcctatacagacttgtcaaacctcctgtttatcagccaaatctagtattactacatggaactttggcattaatcattgcatccatcataaaaggcataagcggagatatgcttattccggaccgaacagttcccattacgctagaaatactgatactctgtttttcactactctatctcatggtccccaatttttatacaaaactattctcctactttcattataagatatctattctgaactgttgggccacacaggttatagctgttttatccggcattcacctgtttgcttcctgcataatttatttatttttcagtccactatcttataataccctttacgctatgacccacatcatccctcctttgatatatgtcatttgcattattgtcaatcatgcttttgtgaaaacaatcagtttaacctataaaaaaatgccttttttacgtatcgcccctatttgcaatggaaagatctatgttgctccccgcagttatcaaggtgaagaacccggcaagttggacatacctatggaagactacatttatgcctgcaagacagatactgataaatatgccaaagaagtagaaaataaatatagcaaccatattaccggacaaccggaaccacgcttcagtttgaaacatttggtaaaagaaaccaatggagttaaaaagaccatcatgctatatattcttcctttaaacgatgaagaacagatacattttaccggaggaaaatttgtaactcccgaagaaatagaaatgaattctgcccaatatagttcttttctaaaagaagaaatagatcatctgaacatagtgacacagatgtgggaggaatttaaatgaatatctgttatcgcattacttataaatcaagaaaatacagggaatcttcgataaatccggcaatttcccctgccactcctttattgtcttagtctttatatattctccttcacacgtaatattggcagcaatacaaagtttggtttgcggacggcaattcttaagaatatcttccgccatcttattattacgataaggagtttcaataaaaagctgcgtctgatcttctgcataaacacgttgctccaataccttaatacgtttcgcacgctcaccaggctcaataggcaaataaccatgaaaagcaaaactctgtccattaaaacccgatcccataacagacataataatagaggaaggtcctaccaaaggcaccactttaagattcttacgctgagcaatagcaaccacgtccgctccaggatcagcaacagccggacaaccggcttcagaaataactcccatggactgtccggccaacaaaggtttcagataaccggaaatatcttcaggagaagtatgtttgttcaatggataaaaagtcaatgcatctatgtcaatcccgcgatctacctttttcaaaaagcgacgtgccgagcgtacatcttctacaataaaatgtttgatgccgagaatgacctctttattatacacaggcaacacattttccacaggagtttcgcctaatgtgacaggcaatagatacaaagcaacttccatcatactactaatcaatcaaaatatcaaggtttgaaatctgtttcagccaacatctgatgataatccgtcttagccaacaaatcctttattgtcatatcaggatgctttttcatatattcatcaatcagcaaaatccccatccatactccaatacttgcaggagttttctcacccataatagaaataaagggatccttgcgtatataagtacgtacaacaaggggatcggtagcatataaatgaccattttcaaccattgtcttccacagacttgttttattcttcctgcaccactcagcctcatcctcactatatcccatctctttctcaaaagattcataccctaaaatatgagccactatccaatttatctttccacgatgcataatcatatctaataaagtacgaccaggctgccatggcaaaggatactgactcagcaaataaaaggtaaaacaatccggaacaatacgatcaggctccatactgcgacattgatagtcataatagaagcgtttatataaaggataatctgctcccatatacttatcaatactaaaacccaaaatactgtccccaactacaacagactgattcagagcagctatttgagcataaaaatgaggaacgaacaatgcaggaacctcttttttcaaacgtttgaaacctttggtcagtttttcctcaacccaaccaagatccttaaatttctcttcggcatcgtgcatcaaagtcaataaagtagaatccgaataatattccaacatccggtcgttaatcttcatgtcatccacctcacctatcgccaatacatcttctatcaacagtttggtaacctgaggatagtccgtattcattttttgcagtgccgagaaactattcatcgtgacatactcatactgcaaacgatcataacgggcaactcttacatccacatcagcagtattgccactcttcccatcccactgacaggaggaaagagcaacaagacatactactaatatgaatataattttgcgcatcatctatttcttatccgtaaatgatgtttccgttttcgtctttatattcatccagacctttttcataagttgccatagcacgcaaactcatacctacactggagaaacctccatcatgatataaattctgcatagtcactttacgagtcaggtcagagaacattacaatgcagtaatctgcacattcgtctgccgaagcattgcctaatggtgacatacggttagcaaagtcaaacagcttatccatacctttcacacctgaaccggcagtagtcatggtcggtgactgagatatggtattcacacgcacatgatgttcacgaccataaatgtaaccaaaactgcgtgcgatagattcaagcaatgcttttgcatccgccatatcattatatccatagaatgtacgttgtgcagcaacataactcaaagccagaattgaaccatactccgcaatagcatccagctttttagcagcttgaatcattttgtggaacgaaacggcagatatatccagagtcttgctcaacatatcataatcgaggtcatcataagtacgtttcttacgaacgttaggagacataccgatagaatgcagaacgaaatctatttttccacccaatatttccatcgaacgtttgaaaacattctccaaatcttctacgctggttgcatctgccggaattacctcacaattcagtttctcagctaaagcagaaacttctcccatgcggacagctaccggagtattggacaatgtaatggacgcaccttcttctacagccttttcagcaactttccatgcgatagactgttcgttcaatgcaccaaaaataatacctctttttcctttcaacaaattgtaactcataccttctttattgttaaattagtttgcaaagatacaaacaaataaattaatcatagctttttttgcacacaaatgaagaaataatgcaattataaaactaatttttaccatttaaggtttcagctaaatgagaatttaacaaaaaatccacttattctatcaaatagtgcacataaaggacaattctttcagctatatttgccatcgaattaagaggttttttcataatatttatttaaggttagaattaggttaacatgaaacattattgctgctcccgtaaatagcccgtgagggtcttttacgggagagtgataagacttcttaaagcaacaatcaactagataattattaatcttaaacatatataataccaatgactactttaataaagaagattctattacttcctgccacatgtttaattccttttttgaccggatgtaataattgtccgtctacgactattgtagaagatattatagatcccgccatctatacaagcctccctttcaagatggataaagttgaacaacctactttcccagactattcggtaaacatcatcgatttcggtgccaaaccagacggtatcactttaaacacaaaggctattaatgatgcaatccaacaggttaatgccaaaggaggtggcaaagtcattattcctgaaggcttgtggctgaccggtcccatcgaactattgagcaatgtgaatctatatacagaaaagaatgcattagtattattcagtgcagaccattcactatatcccattataaacacgtcttttgaaggtttggaaacccgtcgttgccagtctcctatttcagcacgtaatgctgaaaatatagcgattacaggccacggagtatttgatggaaatggagacacatggcgtccgaccaaaaaagataaactgactgaaggtcaatggaaaaaattggtcgcctccggtggtgtggtagataccgacggaagaatctggtatcccagtgaaggtgcattgaaaggtgctatcctgtcaaaagacaacttcaacgtacctcgtggagaacttaccgattctgactgggactacatgcgcgactggttacgtcctgtattgctaagtttcatcaaatgtaataaggtattgctggaaggagcgacattcaaaaattcacccagttggtgcttacatccgctatcatgtgaaaatattacaattaataaagttacagtttctaatccttggtactcacaaaacggagatgctcttgatttggaatcatgtaataaagcattgattatcaacaactcatttgatgcaggagatgatggtatctgtataaagtcaggaaaggacgaacaagggcgcaaacgcggtgaaccttgtcaaaatgttatcgttatgaacaacaccgtattacatggacatggaggttttgttgtaggtagtgagatgtcaggaggtgtaaacaacatatatgtagacaattgtactttcatgggtacagatgttggcttacgctttaaaagtaatcgtgggcgtggcggattggtagagaatatctacatcagcaatatcaacatgattaatattccgaacgaagcattaatattcaatttatactatggtggaaaaggtcgtggtgaagatcctaatcaggatgaaaagaaagcagaaactaccatccctcctgtaacagaagaaactccgatattccgtaatatctttatcaaagatgtaacctgtaacggagcaggcagggctgtgttcttcaatggcttgcctgagatgagaatcaagaatatcaatatggagaatatcatcgtatctaatgctaaagaaggtgtagtattaagcgaagccgacgaagttaatatgaaaaatatcaaaatagagttattaaaaagtggaaagaacttgaagatgcaaaatgtttccaatgtaacgatagacggaaagaatcatgctgaaatcggggcacaaggagaagaactcaacttctaattcttacacccattagtgcatttctccacttaatttataaaaatagtaaagcacggattgcacggataaacacggttttcatactaacactgtgtaatccgtatgatccgtgcttaaaataataaactatacatcattatgaaaaagcactcaattattgtcctcacattattagcaggatgctttaccaactcttttgcacaaaaaggcgaaaagacactgaccgtagaagtcagcaatgaatggaatcaaaataagaccgacgaaccgatagtgatagatttaaataacctgaaagcaggtttcaacatcaaatccgccactgtatgggaaggtaataaagaaattccgtcccaactggacgatctgaacggtgacgcacgtgctgacgaactggctttccttatcgatatgccagccaaaagcaacaaaagtttccgtataattctctcttcagaaaaaagtgaaaaaaactatccggcacgtacttatgcccaaatgaaagcttacggacataacaacaaattcgccaatattacgggattttcagcggcaggaaccgagaatgtatatagttttgtttaccatcacggaccggctatagagagtgaattagttgcctatcgtatctatttcaacgaaaaacagacggtagatccatatagcaaagtaaataaaagactggaaataaaagagacttgtttctaccctaccaaagcgcaacgcgccaacggctacggagatgatgcgctacgtgtttacaatagtggtggtgtaggtgcattaaaaggttggaatggtactgaagcgacccacataaaaccagtagtaaaccgcacggaacgtgtactagcctccggtcctgtacgtgccatcgtcgaagcagaagtcatcggttgggaatatcaagggaacgatttgaacatgatcaatcgatataccatctatggcggtcatcgggacatgaaggtagatgtcctgtttgaccgtccgcttaaacaggaagtctttgcagcaggtgtacagattctgaaagaaggaggtcacatgagcgaccataaaggactgactggaagctggggaaccgactggcccgtcacagacaccataggctatgtgaaggaaacaacaggtatgggaactttcattcctaaatatatcggtaaagaagtacaagacggttcaaactacttatataccttacaagcaccggggcaacagcatttccactattacgttactttcacctcaaaaaaagaaagtttcggatttaaagatatgaaagactggttcaattatcttccccaatggagaaaagaattggaacatccttgcaaaattacaattaaataaaaaatctaaaaccatgaaacgactaatcactctctgtctgctaggaggctgttttttatctgctcccgcacagaattatgtatcccaagcctgggtggccgaccaaggcaatgggacctacaaaaatccagtcctgtatgcggattactccgatccggacgtttgccgtgtaggagacgattattatttgacctcatccagtttcaactgtctgcccggtttacaaatattacactccaaagaccttgtcaactggactatcataggtgcggctgtaccctacgcactgccccctgttaccgatgtccgtcctgaacatggcaaccgtgtatgggcacccagtatccgccaccataacggtgaattctatatattctggggtgacccggaccaaggagcattcatggtgaaagccaaagatccgaaaggtccctggagcgagccagttttggtgaaagccggaaagggcatcatcgacacgactccattatgggatgatgacggtcgtgtatatctggttcacgcttatgcaggaagccgggccggactgaaaagtgtaattacaatttgtgagctaagtgctgatgcaagtaaagctatcacacaatcccgtatcattttcgatggtcatgaagcacatcagacttgtgaagggcccaaattctataaacgtaatggatactattacatcttccatccggcaggcggcgttcctacaggatggcaagtcgtacttcgctcaaaaaacgtatacggtccatacgaatggaaaacagtattagcgcaaggcaattctcccgtcaacggacctcatcagggaggctgggtggacacccctacgggagaagactggttcatgcacttccaggacgtaggtgcttacggacgcctggttcacctgcaacctatgaaatgggttgatgattggcccgtcataggtattgataaagacggagacggctgtggcgaacctgttctgacttataaaaagcctaatgtaggtaagaactatcctatttgtactccgcaggaaagtgacgagtttgatggttatacattgtctcctcaatggcaatggcaggctaacatcaatgaaaaatgggcttatttcaacggaggagaaggatttgtacgtctatactcctacccggttcccgaagattataagagtttatgggatgtttctaatctgatgctacaaaagactccggctcccaatttcactgccaccaccaagcttactttcaagccgacagaaaaatataaaggtgaacgtacgggactggttgtaatgggaatggattatgccggattagttgttgaaaacacagacaacggactcgtcctgtcacaagtggaatgcctgaaagccgatcgagggggtactgaaaaagtaaatgcttccgttcccttaaaagacggcacaatctatcttcgcgctaaattttccgcaaaaggagacaagattaaagccagtgaaggcggtcacgacctgttagtgaaatataacctcagttacagtacggacggcaagaaattccagccattgggggaaaccttccaagtaaaagaaggtaaatggataggagccaaggtgggtatcttctgtacgcgccccgctattgtaaccaatgacggaggatggacagacgcagactggttcagaattgaaaaataaagaagatattctatatacattgtactttttgcatttttatttgatgtaaatcgcacattttgccggttaaattcctaattttgtgccataaaaggcatctatggacaataatgcaagaaaatacaataaatatgatgaagtagacgaaaggatattagccctctttactgaaaacaaagaagaagcctttcgtctgctttatgatacttattaccttcccttatgcctttactctgtacagttcacaggctctacggaaacttcagaagatatcgtgcagaatctatttgtcagtttctgggacaagaactcgcatactgccatttcctccaacctacatgcttggttgttcaatgccgtccgtttttcctcactgaccaaagtacaacgggaacgctatttctccttagacgagctggaggaagaatcttattctcccatcgatgacttttatgatgaagaagaactgttgcaaaaaagaagccagttgctggccgaattaaaaaaactgccggaacaggaatacaatgttttagtcaagattgttctggaagacaaaaagtacaaagaagtagccgaagaactccatatttccgtaaatacagtaaaaactcatttatcacgcgcattaaaaatgttgcgtcgtttcaatatgatagaaatcctaatcttatttaatttataattttcttcagatttttgtcacccgttttgcgtatttgtgatacttagtgttaaacagtacaacaattatgcaaaagagtaaaacagaaaccttaattcaaaaatacctgtcccaccaactcaatgaacaggaatttaaagaattaaaacaatggattgaagaagacgcttcacataaagaaatttttgtgaagttactttcactccgccatgtcaataaccaacttaacttattacaacagtttgataaagaagcttcatgggaagctattcaaaaacgttgcaagcagccccactctatccgctatcgggttgcgatttattcatctgccgctgcgatagctgttatcatagggattgcttccattttatattttaataaccggaacctgacgcctgccattacccaaagcgagcaatcatctcttccccagaacacccaaactcctaaagccacctgggtacaagcaaaccaatctgtaattcccctctatgaaaaccaacgggaaatcaacggaagttatattaacaatggagaaatcatattccctcaagaaagtgattacccccataaaacagaactggataccgaactattacaaaataagatcatagtgccaaaaggttcggaatatgcaatagtattggctgatggtacaaaagtaaaaatgaatgcggactcccatatcgattttccggttcagtttggagatacccgtgaaatcaccttagaaggagaggctatgtttgaggtaacccacgatgcagcccgtcctttcataataaaagcacacgaccatgctatttatgtattaggaacaactttcaatatctcggcttatcccgatgaagaattatctgtgactctgattgaaggtaaactaaaagtaactgctccttcaggtgaatactacctgctgccaggtgaacattactcttctgcacaatcaaaagttagcaaagtagatacagaattctatacttcatggacagatggtgctatggaatttgacgcaatgccattccctttgctgacagcccgactgtcacgatgctataatgtagatattcaaatagcatccaaggaattggaaaccatgaagtttaccggaatcattttccgtaacaagcctttggattttgcattagatattattcatcgcgtatccgatgtcaagtttgagagaaaaggagaaactatatttgtaaaaaaacaataatcaaaccctgtataacaggaatattctaaattaaatgagttatttgagttttatgaaaaaagacgaactttggaatcgtttagtagctaaacctccaaaaatgaggctgttagtaatgctaatgtgcatgttctgcacattcaacgcaatgtttgcaaacgtactagccgacaagactgtcactatcaaaagtgaaaacatcagtgtaaaagaggctcttaacatggttaaaaagcaaacaggcattcatatcatgtacgaagatgcaacattgaacaatgtacctttgaaacttacattaaacaaagaacctctggaacaagcactttccgtgatttgtagccaggcaggtatgcgctatgaattagtagagaacaattatgtactcatattaccgattgacagaaatgccaagcgcagaacaattaccggagtgatcaaagatgatatgggcgaaccggtcatcggagcctctattgtcatccaaggtacaactttcggtacagtagccaatatggatggacaattcatgctgtcttatcctgaaaacactaaaaacgacgaactgatgatcagctttatcggtatgcagacagttaaggaaaaaattggcaacagacacgttttcaatgtaaaaatggaaagcgaggtgaccaatctggacgaagtagtcgtagtaggttatggtacttcttctgtaaaggatttgaccggctctgtagcttcagtaggcctaaagcagttgagccaattgaatactcctaatgtaacttctatgcttcaaaacctggctgccggcgtacaagtttcacaaaataccggtgttccgggtgagacagtccgtgtacgtgtgcgtggtgctacgtcattaaccggttctaatgagcccttgtatgttatcgatggagttcctgtagaagatcccagcatgctggatgccatttctccgaatgatatccagtctatggacgtattgaaagatgcttctgcagcggctatttatggttctcgtgctgcaaacggtgtggttatcgttaccaccaagaaaggggtggagggttccaaacctaccgtcaacttcaactataatgtaaccactgatgttcaaattaagaacttccgtatcctgtatggtgatgaatggcgcgaaaccgtacgccgctttgctaaagaaaccttggtgtatgatccgtccaaccaatatgcactagaaattcttgagcctaattccaccgcattaggcagtgccaacaccaattggtttgacgaagtgaaacaaacagctatccgccacaatgccgacttgacagtaagcggaggtagcaaagtttccaaatatcttatttcattatccatattcgatcagcaaggtatggttaaaggaggtgacttaagccgatataatgcacgcgtgtctacagaaatgaatgtattgcctatcctccgttttggtatcaatgctaatatgagttatacagatcaggataatgcaggaacttcactgttcagcgcacaaggttatcgtcctgatatgcctatatataatgataacggggaatttgatatgtccacaggtcaagccaacccggtggccaacacctataagaaaaaccatgataatatttaccgcatcatgggaaccgtatacggagaagttgatatttggaaaggattccggttccgttccagtttatcgggtaatttacaatttactgaaaacaattcattcagtccaagttttctaagtactagaaatgaagccagtgggtcagaatatcattataaatattcaaaaaccgtattcgacaatacattgaattataactatgagttcaacaagaatcatgttttggatgccgtagccggtatctcctttgaacgtggtataagccgtagtacaagaatgaatggccagacttatccggataatgatatttacaccaatttaggaagtgccgcaagcatctcatcttggggtaacggatataatgcaagtggtctgttctcttcatttgcccgtatcaattataaattaatggagcgctacctgttcacttttacagggcgttatgatggttcatccatgtttggttcgaacaaccgttatggtttcttcccttcaggagccattgcatggcgtatctctcaggaaaaattcatgaaaaacctgacattcattaatgatttgaaattacgtgccagcgtaggtactaccggtacacaaaacttaaccagcttctctaatcgtgatttatacgaagcaaccagttataataatctgtcagccattatacataaacaagtgggtaaccgcgacatccgctgggaaaaatcgacccaatatgatttaggtcttgatttcgcattgttcgattaccgactgaccggttctatctccggctatatcaaagataccaaagacttgatctggtcatttgatttcccgcccagtgcaaccggtggctctatgcagatgaaccgtaatatcggagcattgaccaaccgcggtattgaaataaacctggtaggccgtgtattatctactaaagactggaacttggacctgaccttgaatatgtcacataacaagaataaagtcaccaaactggttgaagaaggtagagcacaatcagctatggatgtagtagttcaaggcagctatgccgaccaagtattggctgtaggctatccaatgggagctttccatggttatgaatatgccgggatcatacaagatcaaaccagaatagatgaattgaatgcctatgctaaatcaaagggacaaagttattacgatggtaactcattaaaaccgggacatttggaaattaaggatttaaatggagatggaatcatcaactacaatgaccgtgttattatcggtaatcctgatccggatctgttcggcggtctgactgccaatttatcttataaacaattcagcctgttcgccaacttcggatatcagatcggtggtttgaagatttataacaaaacattgcagaatctacccggacaattaaccggtttgattgactatggattgaatgacagatggtctgacaccaacaaagatgccaaatacccggccttgtatataggtgacggtgtacctagactaaccgatcatgaattgtttaatgcctccttcttccgtttgcaggaagtgcgtctgacttataatttacctttaaacaaagtgataaaaggacaactatttgtctcggctaccaatttgttcacgctcacctcttatccgggaacagaccctgctaccgtaaacagtaacagcaactatggcggtaactatgaaacctccacttatccgggtttccgctctttctcggctggtttaaaaattaacttataatcatttaaatgtataatcgaatgaaaaaatatatattcttagctttacttacaatgggcgtttcctcgtgccagttggtagatgtcttggaccaaaagcccgaattcgaagcagatttagacggtgccatcacaacacccgctgctgtagagttagccttaaacggaatctattactccttgcctggaaatggattcaatgtcatatttcctacagtaagtggttccttcaaagccgggaccatgtggcgtcaagaaattgtcagcgccggtaatgccgtttactactccgaacgaatgttgcctaccctatcattcagtgatgcaacggaatgggatgcagattacgctgtaatcaaaaacgccaacttcctggaaacagcctgtaaccgcatgagtgacggagagttctccggaaaccgtagagccgaagtgttaggtgaaatagcctatttacgcgctttggcctacttcaatatcttggttcgttactgcgaattttgggatatgaatagtgaatacggggttgtcatgcgtaatgaagctccatccgtatccaatgctctaaaggcacgtagctccgtagccgattcttatcaatatattctggatcaactggaaatagctattgaaaaagctcctgattggaaaaagctttcacaagcttctaaagaagcagccaaggcattaaaggcaagagtattgctgtatgcaggaaaatacacagaagcggtagcagcagttaatgatgcaattgatacaaattctccattgccggaagcaaactatggtgacgtttttgataagttttcaacaaccaaagagattctattcgctcgtgtattcgaccaaaaagatgccaccaacacttcaacccgtcagcaatgttacggtaacagccccacgaaaaaacaaggttactgggggcccaccaatgagtatgtggaactggtgggggatgatcctcgcgccgatgccatcttctctaaagtagacagcctgatggacagccgcagttctgcggtagcctacaacctgaaatcggtaaagaagctgctgaatgatgccaatgacatgcctgtcatcttcagtcgtgtttccgaactctacctgattaaagccgaagccttgtatcgttcaggagcctctatatccgaagcctacgcaccgatccgtaaactacgcgaaagagcaggagccgaaataattcttccagccaataacgaagaactggaaaccgccatattcaacgaatggatgctggaattgtctttcgagaactggcatgaatggtttgccatgatccgttttgcaggatacacagagaaacccgatttcacccgtctgcttgctttgaacaagacgttaagagaagctttggaaaaagaatatgaaaaatcggaagcacaaggagacaattattaccaacgcatcatagaccgccgtatcgatgccattccgtcatcagaaatcagttctaatctggaatgtaaacaaaaccctggttattaacatattaaattcaaagacatgaaaaaatatatcttactcattttcgcatgtatctatgcgattcacttaaatgcccagaatgcaggaatcaatttcctgcacggcactacttgggcagaagccgtagctaaagccaaagcagaaaacaaattgatattcattgatttctatacccaatggtgtggaccttgcatgaatatggcacaaactgtattctcattgcctacagtgggttactactataaccaaactttcatcaacctcaaaattgatgctgaagaaggtgaaggaattacattagccaagaaatacggtgtacgcagctaccctacttatgccttcgtcgatcctgctaccgaagaaattgttcatcgcagcagcagccgtcagactcccgaacagtttattcagacaggaaaagatgcaaacattcctaccaaacgctctttttacctgcaagagcaatataccaaggggaacagagaacgtgcattcctgattgattacatcaattatcactattcagtctatgcacgcaataacgtacaagccgcttttgatgaattaataaaaggaggtgccaaactgactgatccggatgtatgggaagtatatgtaaacactatcaatggcatgaacccgtacctgaagcaagtatcagacaattatgcagatttctgccagcgtttcggcaaaaaagctgttgatgctaaattggcaaaagaaacttcatacggcgaattggcggaaattgaagccttatgcaactatgaaggaaaagatttcaatctgaaaatgatccgtatcaataatgatatccgggaacaaaagtatgaagcggcagctacccagattgatgcgatgattgcagacaccacagtcaatcagcaagagttaatcagtagactgaaatttatcgcccgtttgggatacaaagcagaggaacttcccgaattctggttcaacaaatgtgtaggctatctgcaatacattgcttataaccaaacagacagagatgatgctttcatccatcaggaatatgcagccgccttggaaatggtgcttcgcaaactgaacggcaaagcccccatccctgcctgcctcagcacagaacccgcatacggaaaaaaagtctataacatgcgtcccgatgcattgaaaatgaaacctaaaagaaaaaaataagatgagaactctaaaatccatcatggtacttggccttgcgctgagtacctttaccgctacagaagctgcaaagctcacttttaaggtcaccaatcccaatgagaaggtcaaagtgagattgactttcagccaaagtggcgaacaaaaagaagtggcgattgatgccgctggaaacggcaacatagaaatcacaggattcactccgcaatatgtaaccatgcaatacacacgcggacgccgtactctttatctggatcccaatcaagaccttaccttgtcattcgacagtgacaacatgtggagaaacacaacctttgaaggagcaggtgccgctatcaacacctatctgggaagcaaagagctccaatcactcggtatgcccgatatgaaaatgcaagaggccgccctcatacacaaaggagacagcctgtacgcagccaattgccaagtattggaagccgcaaaacttccagccgatttcactgcacaggaaaaaatacgtttgcaattctatacgtattattatttctccaaatacgctttgtatcatcctcattttggaaaggatgacaactatattccttccaaagcatattatgaaaaactggaagctattactccgatcaatgccggtttattagctctaaaagaatataaggcttttcttcccgatgctatcagcgcctttagtaataaaggaaaaacagttgcatccaattctacagaacaaagtgtaaactacgtagatgcaaccatacaagatgaaaaggttgcagaatttctgattgaccaatttgtttataactttgtagacaataacgggctggatgaagcagacgggctgattgtcctattccgcaaacatgtgaaggatgcaaagtccatagaaaaattcaacgcactttgtaccaagtgggaaaaattaagatcaggcaatccctcagcagctagcttctcctatccggatataaatgggaaaacagtatctttggcagatttgaaagggaaatatatctatattgacgtgtgggctacctggtgtggcccttgccgtggagaacttcctgcgttaaaggaattggaagagaaatatgcaggaaaggatattcattttgtcagcctgtcatgcgacaagaacaaaaaggcatgggagaacatggtaacaaaggatcaactgaaagggatccagttacacatgggaacagacaggacctttatggatgcttacctcatcaacggcattccccgttttatcctgctggatcgggatggcaaaatcatctctgccaatatgacccgtccgtcagatcccaagacagcagagaagttcaatgaactgttaggactataaaactctctcttatattaaacattaatctaacgataggctttcttcgtgaggagagggcctattctatttgttttagccaggagaacgatacagaaagagaataaaagacacgaactatacagatcttacagtattgtctaaaacacctgtaatttccgtataattcgtgcccgaacaatttaaatacgatgatttttattgtaggaatgaaatcagcacaccggcagccacggcagaaccgataactcctgaaatgttacttgccatacaatattgaagcacatgatttttggggtcatacttcaaagcaatttcattagccacacggctggccatgggcacagcactcaaacctgtagccccaatcagtggattgatcttcttcttagtgaaaagattcaccaacttcacaaacaagataccaccggaaatagacaaggcaaacgccaagaaaccacctatcacaataccgatagtagtccaattcaaaaatgcctccgtagtcattgtcgcaccgactgacaaccccaagaagatagttgccgcattcatgatactatttgaagctgcatcaaacaaacgtgaagtatcactacctatttccttaatcaagttaccaaacatcaacataccaatcaaaggcactgcacttggcacaaacagagcgaccaccgtagtcactacaatcggaaatacaatcttcagcacacgaagattcttgatttctaccgaagaaggatatttcttttcctgttccttcatattgatactcaattctttcttcgtacaccagattttcacaaccaacggaatgataacgggtaccagagccatatacgaataagcggcaatagcaatcggccctagcaaatggggagccagtttaatagtggtaaagatagcggtaggaccgtctgctccaccaataatacccaatgaagccgcctctttcggagtgaaccccatcaagatagctaccaacaatactgtgaaaatacccaactgtgcagcagctccgaaaatagaaagccgcaaattacgcaacatcggaccaaagtctgtcaaagcacctacccccataaaaatgataggcggaagaaaaccggtcttaatcaacatgtagtagataaagttcatcaggcccaagtcgtgcgcaatttcgtgcaacggcatttcccagatgttcttcagtgctccattcaccattaccatgccgttttcatcggcctggacaacccccatctcaccaccgggaaagttagccagcaacactccgaaagctatcggaatcagcagcagcggttcgtactttttcttgatccccaagtaaagtaagatgaacgcaatggcatacattatcaagaattgcggttcagcaataatattgctgaaagcagtcatatcataaagtctttcaaatatatcttccattatactattttcattaatacgtcatcctctgaaaccgtgtcacccgaattagcgcaaatagcagttatagtaccgtcatattccgcacggatcgcattataggtcttcattgcttcgacgtaacaaatcacatcacctttattaaccttttcacccaccttcttcggagtttcctgggcattctttactaggaagaatttaccttccaacggagaaagcacatctttcccttcccctaccggagcaggagcagcttgtgcgggaactgcacccgaagcagctgtcagcgtagcaggatctacagcaccatatgccactgtaacgcgataaggttgcccgttcacatccaccgtcaataccttggtcttgttttcagcttcgacaggagtagtggcattcgctttctcctcacgacgtttcttcacatctgccaagaagtcttcttttgccttcccgctcttataagcttcatactgggccggatgcatggcatactcaaacagttcttcgtcatcctgtcctttatcccattgtttttcaagcatcatcttgcgatatttttccaactggtcgggataattgtcctgcggattgccatcaaagaacttgcggccttcacgttctgccttttcaataatttcaggggccagtttacccggtaaacgtcccgctttacccaaaatcatatcccaaatatcatcggcaatcattccccaacgttccttacctttctccatagccattacattcatcatggcaaggttcttcacatactggctgaacggagtaaccaaaggaggataacccacacgcggccatacgtaagcaacttcattgaacaacttgatcaacaattcatcctgagtcataaacggcaggttacgttttgccttgtacttgttgatagattccagattcgtttcaagatcggccatcaaacttcccatcatgccgcccggcaatcccggagcaatcagtaaagaattcatcagacggtttttgggactgatatataaaccaaggaaatcatccataaactcctgaatcatggaacgcactttcatatacgcttccatattaatttcgggcactttaaatccggcatctttcaacatggcttgcacactaatcaaatcagcatggccggttccccatgacaatggttccatacctacatcaatatagtcgcaaccagcctggcatacttccaaaatagaagccatattgaatccgggtcccgcatgagagtgatactgtataggaatatttttaatcttcttgattccggcaacaatctttcccaatgaaacgggacgtccgatgccggccatatctttaatacagatttcatcggctccggcttctataagctgcttggccatattcacataatattccacagtatgtatcggagaaaaagtgatacagagcgaacattgtgaaatcattccggcttcgtgagcatagccgatagaagggataatattgcggacatcattcaatccgcagaaagtacgggtaatatctgttccttgcgcatgtttaaccttatagaataatttacggacatctgccgggacgggactcatgcggagaccgttcagcgcacggtccagcatatgagtctggatgcctgcttcgtggaagggtttcgtccactcgcgcacagctctattcggattttcaccaaacaataaatttacctgttcaaaaccaccaccatttgtttccacacgggcgaaacagcccatttcaataatagccggggcaaccttaaccaactggtctacacgaggcacgtacttacccgcactctgccacatatcgcggaagaccagactaaattttacttctctttccatttttgataaatgtgtttttctttttttggattataacttctcaatctttatcacctgacctttacctgctgtcaaaatctcaactgccgccttaatagcatccatagcaccagtatctgccgtaggtgctacagcaggtgcttttttgggggtctcttcgggggccactttgttgacaacagtaataaggtacttgcttagatagataacgatgaggagaatgacaaagacggtcgccataccgaccaccatcaacatcaatccaactcctatgttctccataattttcagtgttattaatagtacttactacactcataggttattcaaagcctaaaaagtgctcaaatttagccatttcggctttacttctatcataaatggaatacaaaatatgcaaaattatcagaaaataagaagagtctaaagaaatgtgcttaaaatccggaacagtcatcaggtcaagaaattaacagtaccttcatccactgtaaaaggaaattgaatctgcctgcccgatgacactccgaaaggtggttttgtgattttttaaagaaggatttcatttaatggtttccgcttcttttctgtaggttcatcctccgcataaccgaccggaatcaaaacggccggttccaaattttccggcagtcccaaaacctcactgcattgcggagcatcaaaattacaaacccaacaagtacccagtccttgttcggcagcagccagacaaagatgttctactgcaatagcaatatcaatatcagcatgatccttattatcggcacggcgatgccaagactcattatgatccacacaagccactatgatacaaggagccgtagcaagccattcccgtttataacatgaatacaacgctttcagtacggcctcatctgtaacaatacggaaacgccatggttgaaaattaactgcagatggtgcaaaacgtacacattccatgatataatccaacttttcagcctcaacaggacgattggcatatttgcgtgcagaatagcgcgccttcactaattctagaaagttcataagcattattattagtttgcatacaaaaatagtaactttgcaccgataaaagaagtacaaatatgaagaaacttgtaatattcgacctggacggcacattactgaacaccattgccgacctggctgccgccaccaaccaagccttacaatattatggctatcctacacatgaaacggaagcataccgcttttttgtaggaaacggaatcaataaattatttgagcgtgctctgcctgaaggggaacgtacggaagagaatgtattaaagatacgttcacaattcatcccctattatgatgagcacaatgccgatttaagccgcccttatcccggtatctccgaattattaaaaacactgcaacagcaagggatcatgatagcggtcgcctccaataaataccaggcagctacccgaaagttaatagcacactattttcctgaaataaactttgtggaagtattgggacaacgcgaaggtatccccgcaaaacccgatccatccatcgtaaacgaaattatgacaaaagcaggagtcaaacaggaagatatactttatgtaggtgattctaatgtagatatgcaaacagcgcatcatgccggagtaacagctataggtgtggcatggggattccgcccgcgcacagaattggaagccttgcatccggctcacatcatagaaaaagcagaagaattacttccacttctcctttcatgattattttcattaaatacataattcatcaagcaccttgataagcgatttatcggggggcttgtcttttttaattgcctcagaaaaaggcatatataccacctcatcgttataaatgccaatcattacattgcgctgtctgacacataacaaacattacactttatagaacttccgaacatttcacccttttgttacgtttatataaatatagtataaacaaaaaaataaaaacgtattatgtcagtcatttataaattcttatttccatccaagcccgatggcactgctatgtcacttctgatattagctttacgaatcctgtttggtgttttactcatgtcgcacggtgtacagaaatgggccaactacgatgtcatgtccggcagttttcccgatcctttaggaataggaagccaactttcactggtactggctatttttggtgaaatggtttgttcgatggctttcattttcggattcctttatcgcttgacaatgattccgatgatcttcaccatgtgtatcgcattctttgttgttcatggttctgatcctttcgccgttaaagaattagcctttatttatctggtagtattcatattattgtatatagcaggaccgggtaaattctcactagatcatttcatagccaaagcacttgcctcccataagaaataaccgattcagatatgtttcaagaaacgttctatatctgcttccaattttttataaagaggtgataacttatagctggtatgtttgcggagtacaatgtctactcccaactgccggcgctgatagctggtcagttcattatgaaactgcatattatgctctgccagttctttaatctccgtttcacgttcacggcgtaacacattgcagacaggtactaacaatctcatcactacactatccataatgtgatgtccttgaataaacatataggtattgtcctcattcactcccaatttggcaaattcccccttcatcgcctctatttcctccaaggctttcggatggcggcgttccagctccaataatttacgcctcaccctgcggctcatactctctaaactccgttcaagatgatagacactgaccctatctaattttacatacgaacagaaatcaagcaaagagaattcggaaagattatgttttctataaaaccacaccgaccagatgaacaacggataagctatttgagaatacatacgcataaaagcgacaaaatccaccaatggatgatcattcaacgttgccatgacacaaacctcatgcaatgcttcagcataacactgatagttttctatagcatatgcataggtatgaaaaacatatttgttatttattatataacgtgaggtatgggtagccccctgcaacagataatcataatcactatctacacaagctatcatattttgtcccaaccgaggtcccagttcattcatcagcacagacttcttacctttagccaaagtggttttcgaaggaagcatcacttcgaaataacgagtttcattttcgtattcacctaacaaggtacgccagaatgaaatatcatcataactctcaacgtatgcaataatcttgcgtcgcgaacatttaggcttcaatttgttggccgcaccaatatataaggaggacagattctcggacaatctttttcccatagtatcgtcgttagaaattgtttattttgtaatatcactcacctcggtcactgcatccagccagccatccataatcacagcaggcgaatgagttgtcaatacaatctgtacattaggattcaattgccgtatcaatgaaataaggcgttgttgccattccacatgcaaggatacttcaggctcatccataaacaaaaccccgcggcgattgtcttgcaccagaaccgtcagcaaaataaccaaaatctgcttctcgccggaagacagttgataaggataaagtatatctccatcctgttcaaacaaaatctcattgcttttacgaatgattttcttaccggtctcaccaaacaagtcatccatcagattctggaattttgtcttggggtaagacatctcggcggcacgaagctgaccgtcaggaccaccggaggtaaggcactcgatgatgcggttaccgatatttacctgataatccagataacgccgttgcaactgataaagttgccaatccaattctgtcttaacattcttatccgccatcttttcgagaagttccgaatgaatcaacggacggtcaaaactacggattacatcaaagtgtatctgggtagcatcttccggagagaagacaaaatgtacaccgggagccgaaccgttactcaacgctccaccttccaaagccgtcaggctattcacagatctgttcaggatagtgctcttgccgataccattcactccgctcagaatattgacatccggacgcagttcccatgagatatctttacggccccaaagccgctttatctcgatacgttttatataatcagcttgttttttcatttttgatagatttacttgtaagcaaagatagaaaatataaaaaaaacctcctacatttgcactgttatttaaggtaaaaagaatggctattcaaaagtacaaaggacatttggcattgctaggcgctgccataatgtggggattgatgtccccaattggtaaaacggcgttagaaaacggtatttcaggcctttccctcgctacatttcgaatgacaggaggtgctatctgtttttggatagcttctattttcgctcctaaagaacaagtaaagccgcacgacttgatgatgttgttctttgcaggattgttgggtatcgtcctgaatcagggatgttttactttcggactatcactgacttcccccatcgatgcttccattgtaacaaccacagcccctatcgccactatgattgtcgctgccatttatctgaaagaaccggttacagggaaaaaagtgattggcatttttctaggttccatcggagctttaacactcatactgagcagccagggctcaacagatggaaaaggcggaagtattccgggagatttgctttgcctgttggcacaaatcagtttctcattctatctggctattttcaaaggactgatcagcagatacaacatatttactttaatgaaatggatgttcacctatgcagccatctgctttattccattttcctatcatgaggtctcgaccatacattttcacgaaatttccacttccacatgggcctgtgtagcctatgtcattgtaggtggaacattccttgcctatattctgatgatgatcggacagaaaacattgcgccctactgtcatcagtatgtacaactatgtgcagcctattgtaggaaccagtgtctctatcttgttaggaatgggaaccttcggtgttgccaaaggaatagctgtggcactggtattcacgggagtttatattgtaacccaaagtaaaagccgtgaacagatgctggcagaacaagcagccaagaaagaataacctcaactacactgcaatccgaaaccagacactcttcaccgaccataaaagccgtatccactctacttttgagtaacgatacggcttttatgtatttaaaggaattctcagccaattggctcctccaatttcagtttctccaaatatgctttcgtatccgcccaaagctgtcttgcctgcggatgattcataaacttatcctttacttttttaggcttgcaagaagcaaacatctgtcctgtaacttctttccatcgctcatccaaaagcaaactgacagctgtcgcagctccttgcttcggagtacggatacaaggacggaacagtatgtcggtcaacggatcaaaccacatatccatacggatgatattggtagaaacaataccgggatcggcagcattgacggtgattccctctgctttcaacctttcagaaagttcacgggtaaaaagccacaaagccaactttgtattactgtaaacagggatacgccaaaaacttcctctctttccacgaacaaaaaattcaggagtaatcttccctatggaatacgtacaagaaaccatgttcacaatccgggttccctgccccatcagaggtaataatttcaaggtcagtaaaaaaggggccacatagttcacggctaccgtatattccaaaccatcctccgttgtaatcaaacctccggaactcatggttcccgcattgttcatcagtaagtcgatatgttttccacgccccaacaaatcttctgcgatattagtcacagaagccatagaagaaaggtcaacctgtctgacttctatctctttattgcctgtttccaaaatcaactggttcttacgctcctctcctttgaaaagagtgtagcacaacataattacatgataaccggcctgtgctaccgcacgggttatttcggttcccattcctccatcggcaccggttattatggctaatttactcattggttctctaatttttctatttcacgttccaagcaaaggggcaatttctcttccaaatgtttgtggcatgccatatcaatagtgtacattctcgcaatgcaataattactatgaccgcaattgcaacgcgccttttcttcagtgcgcaaccgattcacaaaaccaggttcattcagcagcgcccttcccatctgtacaaattcaaaaccatcatccaatacctcatctatcttttcacgagataccagcccccccacatatactaacggaatttcctttatttctgttctgaatctcaatgcatcttccaaaaaataagcctctttgaaaggtactgtcggaatcatccatttgcctaccatacgcaccccatatttcagccaccaacagttcatataatgtgtcatactttttataggcatcgctccccgcatgacatacataggcgctttgcttacaaaacctccactcagcaccaacgcatgagccccgtcctgtaccaaccgtttcgctacctgcacagcttcatctatttccattcctcctttaaaaccgtcacgcatattggtttttaccagaacggccatgtcattacctgcggcacgcatcacttcctccatcaccatatccataaagcgcatacgattctccaacgagccgccgaactcgtctttacgatgattggtgtaaggtgaaagaaactgactgataagatagccatgccccgcatgtatctccaccgcgtcaaatccgacctcacgcgcccagttgaccgactgaccgtatgcctttgccatctgcggcagttcctccttgcgcaagccacgcacgaaagtaggcgaataaagattaaaaccggaagaagctcctacgggtgttaccccacaaatacttttgtgcgacatatttccacaatgtcccaactgaatgcttacggcagccccttctttatgaaccgcatcggttatttcccttaatcccggtataatttcagggcgcatccacaattgcctgtcgaaagaaaggccactctgtgtaactgctgcataagcaatagtagtcattcccactccacctgccgccaccgagcagtgataatccttcaattgccgggacggagcattgcccggacacatactctcaaaagcagccgaacgaatcgtacggttacgcaaagtcagcggtccgatagaagcgggagtaaataatttagagttcatcattcatatgttatgtttcgctttcatcatttcctgaaacagaaacgatatactattcaaattcaataaataaaaggaatcattcttttctttttccctaccgcatccttaccaaactcttcccgataacggttacggatggaattggcacgtggagccagattagcaaacgtccacagcacaaacacccatgcagcgggcgaacaagtgagtacggcaaaccctatccattccaccaactcgccaaaatagttgcccgaagtgacatatcggtacattcccttctgcggcaaataatggcgtgtatcgcccggtttacgtaaatggcggatcacactgtcggaatgtagattaatgcccatccctataaagaacaaaataaccccaagccaaaaagaaggagtactgagccaggcatctgtatagagtccttccggagccagatagaacaaccattcgccctgcatcagtccgttcaggacattaaagaccactcccatcaacataatggcaaggggcatccggctctttcctttcatcaggaaagggaagataaaagagcgctggaaataatgtaattcaaaaagaagaaaaaagaggaaaggagcggcatcaaaacgcacgctgctgttccaccacagataaagcattacaaggaatacaggcgcttccatcagtacccaacctaatttattgttcactgaaagtccccatttcggggtgtggaacataccataaccggcacgtacataatagagggctacaaatacaatcaccgcaagtgcggacattgccaatagcaaaaattcaaaagtctgttgtcccatactcgttcctccctgtattaaatttagtaagtcactaacaaatttaagggaaaaatcagaggaaagcaacaattaagagatttttttgcaagaaaaggatacgatttttatcgcagagaagactttacttagagagaaatgtactattttctacaggttttccattgatttccgacttccctcccccgccaatcatcaaagtaccatcacgttgcatttcagcatcagacatatacaggaagctcgtaacgccattagcaaactggacatgcttttttattgtacccagacttagacacagaaaaaagagttgggataagatatttcaaaattatattaagagcagtttattttagattttcatcatcttggattaaccaattgaaaaaacaaatgtttagcgtaatatttaaggaacagaggtaacgattcagcaaccgtgcaaatttcaataatttgtggtgctatgctgtcaaataattatttactattttttcaatagacaatattttgatctcttgtcagtttttaattttcgtatctttgccacgaatttcaaacgaaagttctatgacacaagataattcaattgtaattagagaatatttgacgacagataaagaagttgtcataaatttaattaaattaaacacacccaacttctttgcaaaagaggaggttaatgatttgagcaattatttggataaaggaatagagctctattatgtcttgctcgttgacgggaaagtggttggatgcggcgggataaatttcgcagaaaaaagaaccattggaaaaataagttgggatattatgcatcccgactatcaaggcaaatctttaggtaaaaagcttttaagatacagaattgaggttttaaaggctattcccagtatcaaaaaaataacagtccgaacctcgcaattagcatataaattctatgaaaagcaaggattcacactgaatgaaatcaaacgcaattattgggctgacggttttgatatgtatagtatgcaatataatgaattataattgtaaaatattcaatagtaacgtatcatcccacacgttattaaccttccggcatacacgttactaacctttcaaacgtcttgttcttttttttaaaggccttgttcttttcagaaaagaacaagacgttttcattgaaagaacaagagctttttaaaatttgacctgttgttttttcccataacggcatctacatgccgaaacgccttatttttccttcagatctttcagcctgctcgcaaacgccctgcccgtcggcattccggctgaaggatatgcattgtgaaatgtttcagccggaaaatatccttcagaaaaaccaattccctaagaactggaagaacaccggtccggctgaaggattccaatcccggctgaaggattcccgagcccaattcttcagccgaaaagccgacgggcagggcatttgcgagcaggctgaaagatttgaaggatttttcaaggtactctatatagagtattatgaacgaccatatctcactgaaaaaagtaagatatcttcgtggaacatgtacgtggtgttactttgctcggaaacatatcttactttgtccacgaagatatcttacttttctttacaacaatacagacctcattgccgccaagctaaaacaataataccaaagcttatcgccaaccgaggtgcctctaaaccgttatctctgtttcaaaggcacatattccagttcttccaacacattcttgtatgccggacgaataatgcgttttccttcaaaattcagctcctcattgcggtgtgcgcaccaccccacgatacgagccatcgcaaacaaaggtgtaaatatttcctgtggcagaccaatcatttcatatacgaaacctgaatagaaatcgatattactggacaccgtcttgccattattcttaatctttccgaacatagcgatggcacgttcttccaacaattccaggaaagcaaattcttcttccttgcctttttcttttgccaaatcacgagccaattctttcaacaagatggcacgaggatcggatatcgtatagaccgcatgaccgataccataaatcagaccggacttatcatacgcttccttattcaacatacgggtaaagtaagtatcaatttcgtccacattggtccaatccttgatattttcctgcaaatgatggaacatatccgccacctggatatttgcccctccatgaagcggacctttcaacgagccgatacctgcggcgatggccgaataagtatccgtacggctggacgaaactacacggacggtaaaagtagagttattaccacctccgtgttcagcctgaagtaccaacagcaaatcaagcgtgcgcgcatcaagttccgtataatcctttttcaacatatacaggaagttttctgcgatagacagtttttcatgcggatgacggatatgcaacgaacgaccatacgtggcatggcgcaacatgttataagcgtatgcaataatggtcgggaatttggatatcaagtcaatactctgacgcatcaggttatcacgcgaagtatcatccgcctgcgggtcaaaacggtacatttcaagcacgctacgggccagaatgttcataatgttatttccctccaactcaatgatattcattttggtcttctgttccaacggagtattgtcattaatcaactcacagaaagacgccaactcttccttgtcaggcaaatgaccggacaataacagataagccacctcctcaaaaccaaaacgtttctccttaatgatactatgtgccaaatcttccaaatcatacccacgatagaaaagtttgccgggaatcggcttcaatcctccaccgggaatacgttcataccctactacattgcctatcttggtcaaccctaccaaaacaccggtgccatcttcgttacgcaatccgcgctttacatcaaacttcttgaacaattcgttctcaatccgggttgcattcttcatatcctcggagagtttgtaaatgatatattctttcttcatatccgtgagtttttaggagtttattctttctattatttcttttgtaaatgccgacgtgccaagcgagacacctccgggcataaaacgggcaaggtcatgtgtggcacgtccctcgccaaaactggattccaaggcattcactatcagctccgccgccttattccagccaaaatgttccaacatcatgacagccgagaggattaatgaacaaggattcaccacatcctttccggcaatattgggagccgtaccgtgagtcgcttcaaaaatggcatgaccggtattgtaattgatgttcgctccgggagcaattccgatgccgcctaccatggcagccaactgatccgagatgtaatctccgttcaaattcaaggtagccaccaccgaatattcttcgggaatcaataacgtattctgcaagaatgcatcggctatgcagtcttttatcaccaacttgcctgacgcaatggcatctccgaattcacgttccgccagttcatatccccatttcttgaagccgccttcagtaaacttcatgatatttcctttatgcaccaacgtcactgacggcaagccatgctccaaagcatatttacatgccgcacgtaccagacgttccgttccttctttggacaccggtttcacgccaaatgaagaagattcgggaaagcgcactttagccactcccatttcatcatgcaaaaaacgataaaacttctcagcttccggcgtgcctgcttcccattctatacctgcataaatatcctccgtattttcgcggaaaatatgcatatccaccttctgaggctctttcaccggagataccactccgctgaaccaacgtacggggcgcagacacacatacagatccagcgtctggcgcaaagccacattcaaggaacggataccacctcctacgggagtagtcaacggaccttttatgcccacaccatatttcttgaaagcctccatcgtctcatccggcaaccaggaacctgtttcgttgaaagcacgttcacctgccagtacttccatccattctatttcatgttcattgccatacgccttcttcacggccgcattcactatggcttgcatagcgggagtaatttctgctcccactccgtctcctgtaatataaggtactgtctttttcatcttttatcttgcatttaaagcagagccggcacggaaccaacctatctgctgttcattataagtatgctgtacttcaaaaccatcctgagtgccatcttcatggtgtaaagtcacagtcagatttcttccgggagcaaagtccgccaatccgctgacggtaatcaaatcatgttcttgaatcttgtcatagtccgctttgtctataaaagtcaccgccaacattccctgcttcttcagattcgtttcatggatgcgggcaaaactcttcgccagaataacctttacattcaggaaacgaggctccatagcggcatgttcacgactggaaccttctccataattttcctccgcaactaccatagacccgatgccttgcgctttatactgcttagccgcgcccgatacactctcataggtatttgtcaatcggttccacaccttgttcgtttcaccattgaaagcgttcaccgcccccatcagcatattatccgaaatattttccagatgaccacggaaacgcagccacgggcctgccatcgaaatatggtctgtggtacatttaccttgagccttaatcagtaaaggcatatccgtaaaatcctttccatcccatgccggaaacggagccaataactgcaaacgctgtgattcgggattcaccttaatttctacctgtgcaccggcaggagccaaataaccgggattaccttgagtgaaacctgccgacggcaattcatctccctcgggaacgctcaatttcaccttctcgccttcttgatttatcaacgtatctttcaacggattgaaacataaatcaccggcaatagtcagagccaataccaattcaggagaagccacaaatgcatgtgtattcggattaccatcggcacgtttggcaaaattacggttgaaagaagtgacaatcgagtttttgcggacaggatcatcggtatggcgtttccactgtccgatgcacggaccgcaagcattcgccataatagtagccccaatcttttggaaagcatcaatcatcccgtcacgctcggcggtggctcgaatctgttcagaacccggattgacaatcaaaggagcagccacagccaaatgtttttcagctacctgacgggcaatggaagcagcccgacttaaatcctgataagatgaattggtacatgaacctatcagcccgacttccatcttacgcggataaccattaaccaataccttttcggcaaactctgaaataggtgttgcggcatccggtgtaaacggcccgttgatataaggttccaactcggacaaattaatttcaatcacacggtcgtagaaagcagaaggattggcaacaacctcagcatcggcacgtaaatcatttgccacttttccggccatctctgctacagactctcttccggtagctttcagatacacagccatccggtcgtcataggggaacaaggatgtggtagcccccacttctgcacccatattgcagatagtagccttaccggttgccgaaagtgaagctgtcccttctccaaaatattctataatggcattcgttccacctttcacggtcagaataccggccaatttcagaatcacatcctttggcgaagcccatccgttcaagcttccggtcaaatgaactccaatcagtttcggcatctttaactcccattccataccggtcattacatccacagcatcggcaccaccgactccgattgccaccattcccaatcctccggcattaggggtatgagaatccgtccccaccatcattcccccgggaaaagcatagttttcgagtaccacctgatgaatgattcctgctcccggtttccaaaacccgataccgaaacgcgaagaaacatctcgtaagaaatcgtatacctcacggttggtttccgtagccgttgcaatatccgggcccgctcctttatatgcctgaatcaaatggtcacaatgcacagtagaaggtacggcagcggaatcctttcctgcattgataaattgcaacaatgccatttgcgccgtcgcgtcttgcatagccacgcggtcgggacggaaattcacataatcctcgccacgttcataattcttcagttgagcatcatcataaagatgtgtatacagaattttctcagccaatgtcagcggacgctgcaacacggctcttacccgacctatcttcttttcgaaagaagcataaaaggcctttaacatgtccaagtcatataccataccttttactatttataattattacagttttaaatctattttatttttggcaatataggaataatatttgaattcttgtgttatctataatacgtttaacaaaataaaacataaagtcctacctaaaggattattattatctttgcaattcttatagaaaaaagcatcattatgaaccaacatatacccctttctaatataattaacaaactacaacgcaaagagttgttactaaaattagaatatgattacgaaaaagagactttcaggcaacagactgaagcaatgggcatcgggcgcaaagtgaaacggggtatgtgctggtatcctatatcggcaggcagaagctattataactcattgaaccaattggttgtagaagttgaaaggcaagaagacaaagacatagaacatgtatttgaattcgaccgtccggtatgcttttttacgcaaaatgcatcaggccaattacattatttcaattttacggcaactgtcaactacgtggacgaagaccgaatggtaatcgttctcccctcggcagatgcattgctcagcatacaggcaaccgagctacaattgggagtacagctttattttgatgaaaccagttaccggttgatgttcgaagcgttgggacaagttctcaaggcaaaagggaatcgtctggcagagttacgtgagatttttcatggcaaccaaaaggcagaaactttcagtttcggcttcacccgtttcccttggttaaacaatacgcaggaggaagcagtaaataaagtgatgcatgccaaagatgttgctatagtccacggtccgcccggaaccggtaagactaccacattggtagaagccatttacgagacccttcaccgggaaaatcaagtgatggtttgcgcacaaagcaatatggctgtcgattggattagcgagaaactggtggaccggggcgttcccgttctccgtattggtaatcccacccgcgtcaatgacaaaatgcttgcttttacctatgaacgccgttttgaaagccatcccgattatccgcaattatggagtatccgaaaagcaatacgcgagctctacggacgttcgcgcaaaggagcggagcgtgagaatatccgacagaaaataaactcactgaaagaccgtgccaccgaactggaaattcgcatcaacgaagcattgttcggcgaagcacgtgtgatagcctgcacactggtaagttccgccaacagaatattgacaggacgcaaattcagtaccttattcatagacgaagccgcacaagctctagagcctgcctgctggattgccatccgcaaagcagaccgtgtcattctggccggtgattattgccagcttcctcctaccattaaatgcatggaagcagctcgtggaggattagaccggacactgatgcaggagattgcagacaacaaacccgacactgtatccttgttaaaggtacaatatagaatgaatgatgaaattatgcgtttctcttcagaatggttctatcagggtgaactgaaatcagctcccgaagtaaaatatcggagtatattggactatgacacaccgatagaatggataaatacggaaggaatggaatgcaacgaagagtttgtgggtgaaagcttcggccgtatcaataaagaggaggcggcactctccatttcccaacttaccaactatatcaataaaataggtaaagaccgttttctggaagaacggattgatgtgggactgatttctccttataaagcacaagtacaatatctccgtcaactgataaaacgagatactttcttcaagccttaccgacaccttatcaccatcaatacggtagatggttttcagggacaggaacgagacgttatcctcatcagtttagtacgtgcaaatgaagagggacagattggttttctaaatgacttgcgacgaatgaatgtagcaattacacgtgcacgcatgaaacttattatattaggagatgcctctacgctgacgaaacatccgttttataagaagttatacgaatatatcttggcgctgcaagaataaaagaaggagggcagaactccatgacactctttttcagattgtcattcattttgctctccttaaatattttttattaaagcacgttcttcattcctctacttgatttcccgttatcggaacaaataatattcagaatcacaaaagaagggaagctctcagttgtggcataatttcaaataattattaagacaatttactcataaacttctctttgtccacaatataacgtacatgtgtaccttctccaatcacgcccttgctatcttgcgcccgcacttcaaaagtaagttttctgccttccacctcttttaatacggcagtagccgaaaccgtgtctcccacagccgagggcttgatatgagtagtgttcatcatggcccctactgtagtagaaccttcaggcaactcatctgccacggcactcatggcagcattctccatcaacgccaccatagcgggagtggcaaacacattcaaatcgccgctacccatggtggcagctacattttcttttgaaacgacaacagtcgaagtataagttaatcctgtttccatcatgctgtttttttattctaaatgcaaatgtaactgaatatcgtatatcatacaaatctatttttccacattcatcttttactctctcatcaaaatcacaaaaaatgtataacagaaatacaaattcacacttcaactgcctgccacaaaaatcataatgtttaaaaaccccaaagctgtccggccctatgaaacatccgcctgtttacctagcataacctaggggataataaaattacaaccaaacgccgtccttatctatctttactttaagctctttatcgatctgtttgttttccaaatcaagtatataccattcattatcaggtgtcaccacataatcagcatcatctatcacatagtctgaatatttttccataaccgatttttttaccgcttccggtaaatttgccacctgtacatcccagcttgttcccatccattcgttccgctcattgaaataaacctctttctctctgttttcatctaaaatagtaacttcctgcaaacctttttcacgttctatttctacaattgtcgcattgggatatttctgcttgacaatagctataatgccgtttgcatcaggctgcggcaaataatcatcataatcttcttcgtgtccggtatctacaacagtttttaccaatatacctgtagacgaataaaacaaatccagctcggattctcctttctccacctcaatgacataaagagtttccattccctcacgagtcaacttatccacatcatccacccgccaatcagcatatttgcctgctttatgggcagcaagtacaggttcgggaagattttcataacgaacatctgtttctgtcatataccaggcagccgataacggattgaaccatgcagaatgctctccaccatcccaataaaaatctgctacagcataatcacctttcagctcccattccacgtctttggcttgcggatattttgcattaaatgcagcctgtacttcttttgaaaccaaatgtgtgttttcaggaacatcactattgtcatcatcactacaaccactaaaagttagtgcagcaaaagctgcgaaaaataaaaataacatccaattctttttcataattacattgttttatagtttctttttgatgcaaaattcttataggattctgaaaagaaactgaaatcatagagaaaagttcaaaagacattcgccaaacagcaaataacagaaaaaccatacctaacagcccatttgcactgaaatgaccttaaagcccccgatacctacttttaaattcttataaaagaagaactaataaagacaaaacaaaatctcttccgaggtttttattacctttgcaatcctatttgaacagaaacgaaaaaaaatatgatagtttgtattgccgaaaaaccttccgtagcccgtgacatagcggatgtactgggagcaaaaaccaaaaaagacggatatatagaaggaaacggatatcaggttacctggacattcggacacctctgtactttgaaggagcctcatgaatacactccctcatggaaagcatggagtctgtccagtcttcctatgattccacctcgtttcggcattaagctaatcagcgatccgggcattgaaaaacaatttcgtattatagaaggactgatgcaaaatgccgatgaaattataaattgcggtgatgccggccaggaaggagaacttattcaacgatgggtcatgcagaaagcaggagcacactgcccggtgaaacgtctatggatttcatccttgactgaagaagccatacgcgaaggattcagcaaactaaaagatcaaaaagaattccaacctttatacgaagccggattaagccgtgctatcggcgattgggtattgggcatgaacgccacccggctctataccttaaagtacggacaaaacagacaaattctatcgataggacgggtgcagactccgactttggcactgatagtaaagcgtcagcaagaaatagagaacttcactcctcaacaatattgggtactggctactttataccgggaaaccacattctctgccatcatccgcaaaagcgatgaggaactggctcaggaagaaagcgatgctaaagagaaccccaagaaagccaaaaaggctgaagggaacaggggaattcctcccatcaccgatcttgctaccggacaggcacttatggaacgtatcaaaaatgttccttttaccgtgacagaagtagcaaaaaaacaaggcacagaagcacctccccgtctttttgacctgacttccctacaggtggaatgtaacaaaaaatttgcttattcagctgacgaaactctaaaacttatccagtcattgtatgaaaagaaagtgactacttatcctcgtgtagatactactttcttaagcgatgacatctatcccaaatgtcccaatatcttggcgggactaactccatatacagtatttaccgctccgttggcaggacaaaagctcatcaagtccaaaaaagtatttgacaattcaaaagtaacggatcaccatgccattattcctacgggacaacctcctgtaaatctgacagaaatggagaaacgggtatttgatttggtaacacgccgctttattgccgtattctatcccgactgcaagtttgccactactaccgtaataggcgaagctgacagtatagaattcaaagccacaggaaaacagattctagatcccggatggcgcgttatctttgccaaaccacaaaccaatctgccagaaggtatgaccgatcccgatgcagaagcccgtgaaaatgacgaagaacactccttgcccgcttttgtgaaaggagaaagcgggccgcatctgcccaaactggacgagaagtggacacaacccccacggccatatacagaagcaactttactacgcgctatggaaactgccggtaagctggtagataatgacgagctacgcgatgcattaaaagaaaatggaataggacgtccgtctacacgtgcagccattattgaaaccctgtttaaacgccattatatccgtaaagaacgtaaaaatctgatcgcaacccctaccggaatagaactggtgggactaattcgcgaagaactgttgaaatccgccgaattaacgggaatatgggaaaagaaactacgtgaaatagaaaagaaaagctatgatgcaacgacttttctaaatgaattaaagcaaatggtaagtgaaatagtacacagcgttttaagtgataatacaaaccgccgcgtcaccacaatagaggaaacagcgacgaaaactgcaacaacctctacggtcaaacagccgaaaaaaaaggctgggacctcacgaaaaaacgcttctccagccacgcccgctcccactatcccatccgataacgaattggtgggaaaatcctgcccgctatgtggcaaaggaacgattataaaaggaaaaaccgcgtatggctgctcagaatggaaaaacgggtgtacctacaggaagcctttctgataatcacattttccttgtacgaagccaaacaaatttgtatattatagaatacaaacaagtctgtacccggagaagcattgcgccagtctataaaaaacaatatgcacaatcttcccgaacaaatctatggctccttttagcatacaaaagaaagttcttcgggtaaataaccgcttcggatacgccattcctgcggatagaggttattggcccgattgccaatgttcttggcaaatcctaatggaatgtttttataagtcaaaagtatataaccacgcggagcagaagcatccaatgtgatcgcttctttacgcaaataagcaatagcctgttcataggtcaattcaaaacgagagaaaccatcatgattcagcaatgtgctcattgccaacgaatgatccggtataacgtcttttcctttcaactcacctatagtaacacccgcatgaacaacttttaattcctgacggaacagatcatattctgaaagatggacattggggaaggctatcaccttcgtgcctcttacctcaaatcggaaatcctccgcctgctttaaccaactttttacttctttgggaaaaggaacaaactgagacaagctccccttttctccttttctcttcttttttgttattttctctttgtcatcctgacaacgaatacaaggaacaacatgagaaatggcagcactcttcctcaatacagccaagaaaaatccttctcctttcactctatgaggcaaaaaacgataaacaggaaaatcctgtcccgccaaatttcctattatcccccattccgacgccactggcactttcagtatctccgcacccaattcatcagcaatccaagccacattttcctcatcttcttccctattataagtgcaggtactataaatcagcagaccaccgggtttcaaagccgaccatatatccgctaaaatcctacgctgacgttgccaacaaacctgcacattgtccgtactccattcctctacagccacaggatccttccggaacatcccctcaccggaacaaggcacatctgccaagacaacatcaaacacctctgtcaaagaagtgaaatcggccggatcgttgttcgtcaccacaacttctgcatttccccactttatcaaattttcagccaatacctgagaacggttacgcatcacctcattagccaccaacaaactacctacggggagaactgaacgcgcatgagtagacttgccaccgggagcagcacacaaatcgagcatcactacaggtccggtaatataagtgcgtaatacctgttccacaaacatggaagatgcttcttgcacataatagcaaccagcatgaaacaacggatcgaatgtaaaagtgggccgttgcgataaataaacccctgcagatgcccaaagtaccggttctcctgcaacttccccactccacttcgtacgattgacacgaatactgacaggaggctccgtctgcaaagccgcttccaacgcgcgataagtttcttctcccatccattccagggttcttgcttcaaattctgatggtaatttcatgttccttcctttttatgttacaaaaatacgatgatattttgggattatcagaaaattttctgtctatttgcaacctatttccttattcgttccgtctaactagcagaaaacaataataaagatataaaaacatgaaacagttactttttattttgaccttactcatagggacttgcttcgcaacccatgccaaaacaatcaaattagtaccttcagcccttgacagcactcggatggatacagtcgttataagcaacctgcaagatgtagatgaagatcagaatgctgccatgcatgacattagttcggatttcggtgattggaatagcggtcctcctacttcggtagcaattgtcgcactcatcatctgttgtggactccctttctttatcgtagctattgtactttggttcaggtacaagaacaaacaagccaaatacaaactggctgcagaggctctggcagcaggacgaaccattccggccgaactgttcaatgaccccgaagaacaaggaaatgctgtaatgacaaaggggatcaagaatatattcttaggcattggtttgggagtattcctttgggtactgacagaagaagaaggattggcagctatcggattccttattttctgtatggggttgggacaagtattgatagcttacactaccactccacacaaaaagaaaaaagatgatcctttccctcctacccgaataaaccaagatgaaaacggagtcagatcaatgaaaattgaaaatattgaactgggacgtaacaaagagagcaaagaaacacaaaacataaagaacaatatagacactccctacaacgaagaataaaaatgagccaaatcaacgacatagcgttggtagcacaagtggtggtctttaaaaacacccgggcgtttgatactttggtcaaaaagtaccaatcgcccatcaggcgttttttcctgcaccaaacattgggagatacagagctcagcgatgacttggcacaggaaacttttataaaagcatacaccaacttggcttcatttaaaaatttgtccagtttctccacatggctttaccgtattgcttataatatattttatgactatattcgcagcaaaaaagaaacgtccggactggaaacttgggaaatagacgctgtttaccaaacagaacaaaggcaagtaggtgaacacatggacatatatcggggattgagccaattaaaagaggtagagcgaacctgcatcaccttattttttatggaagatcttccgatagaaaaaattgcagtgattacaggaatgcctgcaggaacaatcaagtcccatttatcacgcggaaaaacaaaattgacaactttcttaaaacagaatggttatgatggaaaacgatgatacattaattaagaatttcatgcttgccaacaaacatgaaattgaggacaatggattttcacgcggggttattcgccgcctcccccaaccagcccaatggttatcggatatactcagtgtaacttgcgccattgtctgttgtgcattattctatattttcaatggctttgaaattctatgccagacaatcagtgacatagttacttcccaaacttattatttggtaagtgatactaatttccaatcactggttatcgccactgcggttcttatcatcatcggcttacaacgtgtatgcagcctgaaatggtgaaaactgaaatagaactgggttcatgctcggaaaaagaaagattttgtgtatttttgcaatctataaaatgaatatccgaacatgaaacaatatttagacctattaaaccgtatcctgaccgaaggtgttcacaaggaagatcgcaccggtacaggaaccatcagcgtattcggtcatcaaatgcgcttcaacttggaagagggtttccctttggtcaccaccaaaaagctgcatttaaaatccatcattcacgaacttctgtggtttctgcaaggggataccaatgtgaaatacctgcaagacaacggggtacgcatctggaatgaatgggccgatgcaaacggagacttaggacatatctacggctatcaatggcgttcctggccagattacaatggaggctttattgaccaaatttccgaagcaatagaaacgatcaagcataatccggattcacgacgcatcattgtcagtgcatggaatgtagccgatttaaataacatgaatcttcccccttgccatgctttttttcaattctacgttgccaacggacgtttaagcctacaactttaccaacgcagtgcagatacattcttgggagtaccttttaatatcgcctcctacgcattgttgctgcaaatggtagcacaagttaccggattacagaccggtgattttgttcatacactaggtgacacacatatctataccaaccacttggaacaagtaaaacttcaattgagccgtgaaccccgtcccttacctcaaatgaaaatcaacccggatatcaagaatatattcagttttaaatatgaagattttgaattggtgaattatgatccatggccacacattgcgggtaaagtatctgtttagcagttatggtgaataggctgcacaagcttattcatcacttaccactaatatcactaaacattcaccactaaccactcatcactatgaatatttcaattatagtagcaatagcacgcaaccacggcattggatttgaaaataaattattatattggcttcccaacgatttgaaacgttttaaagctttaacaaccggacatactatcatcatgggacgcaaaacctttgaatcacttcccaaaggagcacttcccaatcgccggaatattgtattaagccgccgggaaggagcagtctttgccggagctgaatgtttccctgcattggaaatcgctttatcccactgcaaagaagaagaagaaatatttattataggcggtgcaagcttgtataaagaggcaatgcatatagcccaacaattatatatcacatttattgatgacacatccaaggaagctgatgcttattttcccgaaataaagaaagaggaatggaaagaaacaggcagagaagatcacccgacagatgaaaaacatctctacccgtatagttttattaattatagccggataaagtaacgattaatcttcatcagctaaatcgaggataggcatttgtctcttgatagcctcattaaaagatataatagtttctgaacgagccaagcccaatggttgcaacttatcatgaattatgctaagcaaatgatgattgttctttgcataaatcttgataaacatatcatattgtcccgtagtgaaatgacattctacgacttcaggaatatttttcaaagcctctgtcactgaatcaaattgttccggatctttcagataaagaccaatatatgcacatgtctcatatccgatcttttctggatcaataacatattcagatcccttaagaattcccagattagttaatttctgaatacgctgatgaatggctgcaccggatacattgcaagcacgggctacttccaaaaacggaatacgagcattactggctatcaacctcaaaatctgctcatccaaactgtctaattgatgatgtcccattctttttagtttaattttctgcaaagatatgacttttcccgacaatattcgtgcgattcataacttttattgtataaataccaataatttaatagaatgtcctatctttgcagaaaatgcaaagacgatgaaaaagacatttatttttaccttgtgcagtttattcagcatgactgtaaacgctcaaaatttcagtgattatttcgaagataaaacacttcgggcagattatatttttaccggagatgccaaaaaacaagaagtatatctggacgaactgtcaagccttccgcaatgggcaggacgcaagcatcatctagcagaacttcctttggcaggcaacggtgaaatcacaatgaaagacaaagcaacaggagaaaccatttatcgaacgtcattctctagccttttccaagaatgggtaagcgaagaagaagcaagtaggataaaaagaggcttcgagaattcttttcttttgccttatcccaaaaaagaagcagtagtgaccatatctctaaaagatgtatatcataaagtaaatgcctcactcacacatgaaataatccccaatgatattctgatccatcagaggggaacaaaccatattacccctcatcgctatcttctgcaaaacggaaatgccgcagattgcatcgatgtagcaatcatggcagaaggatatacagaaaaagagatggatatattttataaagatgcccagacagcgtgtgacgccctgttcagtcatgaacctttcaagaaactgaaggacaaatttaatattgtcgctgtggcaagcccttcggaagacagcggagtcagcataccgggacaaggcaaatggaaatctacagctgtaagttcacatttcaacacgttctattccgaccggtatctcactaccagtcgggtaaaaagtattcataattggttggctggaattccttacgagcatatcattattctagccaatacagacacctatggaggaggtggcatctataactcatatacactgaccacagcccaccatcctgattttcaaccggttgtagtccatgaattcggccatagttttggaggattagcagatgaatatgcatataccgaagccccaagcccgcaatatccatatgaagtggaaccttgggagccaaatatcaccacattaattgatttcgacagtaaatggaaagatatgattccggaaggtactgccatacctactccggtagctacagaaaatgccgacttatacaccaaggtgggtgtctatgaaggagcaggctatacacaaaaaggactttatcgtcctactaccgaatgcagaatgaagataaacgaagcacctgcattctgcccggtatgccaacgtgcattagaaagactaataaacttttatactgcgaaataggttcataacttaagactaaacaaagacagataaaatgattgaaattaaacaagtaaaaacacaagatgaggttaattatacctttgtggaaaaattaatgcatacggcattccctcaagaagaacgccgtgataccgtacagcagagagaatattctgataataatccccggttctgcaacaacattattttagaaaacggtaacagcattggtatgatcagctattggacaatgggagatttttactatatcgaacatttcgctattgatcccagcctcagaaacggagggtatggaaaacgtgtgctggaaatgataaaaaaacagttaaaaggtccaattgtattggaagtagaggagcctaatgatgaaatgagcacacgccgtattcacttctataaacgtttggaattcactttacataaaaagccctatatacaacctccctaccgtaagggagatagcggcctaccaatgctcttaatgacctatggagatatagatatggaaagtgattttgagaaagttaaaaagactctttacaaagaagtttacggacaagagatctgaacattcattcttcatctttttcttcaattccctgagccaccacacaggagtttgtcctcaaaaaatccattgtacgtactattactagccataggtaacggataaattcgtccataacaaatagaatggaaaacataaaaaaaaggaagctgtttttaacagcttccttttttatctatgcttatataactattactgacgttgagtagctgaatagtttattttcaaagcgtaagcttgacgaagtgcctgctttacatcctgtacaatacccatctttgtatctttatcaactttcaaggatactgtcataaatggctggtcttcttctttcatattctcacgttcctgataaatgtagtcctgaacttctgacacttcagcaaacttatcattcaactgaatacgactttcagcacccattttcttttggaattccggcaacggtttacctatataaataaaggaaaccaacgacttcttttccaacttttccaattctgttccttgaggaacctgaaattgaaccttcaatgtaacctcacgcatggttgttacaatcataaagaagaacaacatggtaaagataaggtcaggcaatgaagaggtattcaactcaggcattccacgtttacctgttttattaaattttcccattacttacctccatactttttaggttcagcttcagaaatcttctgcggataatattcacgaatagctttttgttcatcttcgttgcactcattataaagctttccaaatttagctttacctagttcattacgaagttcattatacgcagcaaccaattcattttgcacatcaatatatgcttgatagctagttccaacgtcattctgaacagagattacatgattttccgtaatcatacaatcacccagcaaaggaatattctttctatgcttttcaggcagattttcatcatcatacggattggctataaactcttttgccttttctttcaattgcttcacatcaatatagtccgtaccacacatcagctggttgtctttattcagacggacttgaaggatgtttcgttcctttacaataatatcatcatctttctgatccttgttttcgggaggaggcggaagccgtctcgccaaaccacggtcagtatccattgatgttgttatcaggaagaaaataagcaacataaaggcaatatcagctgttgaactggagttaattccaggtacgcctcttttttttcttgccattttacttacttcgttttaaattatttaatcaatgtagataatattatcttttaaagataccgctcaagtttactaaagtaccgattgcagccacaccaaacaagaaataaatggagtaaatcagcatatcagtaattttcaaccaacctgtatcagtgtaagcactaccatcggccaaaacaacaggagagtcagaacccataccgtaagaaacgaccaatactaccacaaacaagaccaagccgatcaaagactttattgcacttttaggattatctctcaaagcagcgccaaattgtgctatcgcaccaattacagttactgccacacatattccaaacattgcatacattaagtaaatcaatgtttccgtatgttcaggtgcattatattcacctaccggattattgtatcctacaaaatagaacattcccagcacgacaagaatcagcgcaaagcaaatgtacattatgtagtaagacactttatatgataacttagccatctcctaattattttttgtatttcaagttatatttagtgatcatatccaacaaagtgatagaagagtcttccatttcacttgtcaaaccttcaatcttagaaaggatgtagttatagaatacctgaagaatcaatgctacaaccaaaccgaagatagtagtaatcaaagccactttcataccaccagctacaactgtcggagaaatatcaccagcctgctgaatcttatcgaacgccataaccataccgattacagtacccaagaatcccaaagacggagccattgcgatgaacaatgtaatccaagaacatcctttttccaaataaccggcttgaactccaccgtaagaaacaactgaacgttctactacatcaataccttcatctattctcatcaagccttgataacaaatagaagcgaccggaccacgagtattgcgacatacagttttagcagcttcaacatcacctttttccaaagcagcctcaatgttagccatcaacttctttgtattcgtttcagccaagctcaaataaatgatacgttcaatacagaaagccaaacctaaaaccaatgcgatagctaccaatgacatgaagctggcatcaccttcaataaatttggtttttaactctttgtgaagaccaccaccttcttcaaccactgctgcttcagtagtctgttctgtttgagccggagctgcgtcttgagccataacaggctgaactgatcctaaagtaaggactcccatcactgcaagaattgcaaataactttttcattgtgtgtctaatttttaagattaattaattaattgttatttatttgttttaattgtcttccagtctgttgtgctttccattacaatgcggagagagcgggattcgaacccgcgaaacacttttggcgtttacacgctttccaggcgtgcctcttcaaccactcgagcatctctccttttcgggcgacacaatactatcttttttaaaatcgggtgcaaattacaaagaaaatcgggaactgcaagcgatttcagctacaaatgtattcttttttttcgtcttacgtagaattagccctgccaatatttaaattacctatcaaaattaataaactttaaaaacttattcagccattttgaacacttttaaagcattattggcagtaattctatccacatctttaaaatccagaccatagatttcggcaagtttcatcgctacattctttatataagaagactcgttccgttttcccctgaaaggcacaggagccaaataaggagaatccgtttcaagaacgattctgtctaaggggatatgaggtaagacctcagccagactactcttcttgaatgtaacgactccattgatcccaaagaaaaaacgagcatactctaaaacctgccctgcttcctccagcgtacccgtaaaactatgaaagataccgcttaactcagtttttttataaggttccatcacttcaaacaactccggaaaagcttcacggcaatgcaacaccaaaggcagatgatattccaatgcccattgaatctgtatatccaacgccttctgttgttctttcaaatatgtcttatcccaatacaaatccattcccacctcacctacagccacaaaaggatgttcaccggaaagcagctttttcatctcataaatacggaataacgaatcagccccaacagaagtcggatgaaatccaatcataggaaaacaataccccttatatgccgtacagacattcaacatcgcttccaccgtggtgtcatcaatattgggcataaagactttagatactccggaatcccgagcacgttctatcacagccggcaaatcctcatcaaactcctcaacaaacaaatgagaatgcgtgtcaatcatattatacttttctattcatcaaatgacaaacaaaagacttcagctcttcttttctttcagaaggcacagctatactttccaacaacgaaagcccctcgacataataagcgttaatcttttcttcacaaattccgccgatgcctatcttatcataaagagctgttacagcttttatcttttcttccggacaaaaagcagtagaagctatccatttttccaactccttccgttgtatcccatctgccaaagccaacgcattgatcagcataaaagtcttcttattgcataaaatatctccacctatattttttccaaacactttcgaatccccatacacatccagataatcatcctgtaactggaatgccaatcccattttgataccgaaatcgtataatttgcgggcatcatcttccgaagccccccctaatacagcaccaatttttaacgcagcagacaaaagtaccgatgtctttaaacgaatcatctccatatattcgggaacagtaacatcattccgggtttcaaattccatatcccactgctgtccttcacaaatttccaaagcagtctgactgaaaatatccatcacttgcctcaaataacgctccggacaattattcatcagccgataagccaacaccagcatggcatcccccgaaagaatagccgtattctcatcccaaaccttatgcacggtaggcttgtttctgcgcatatccgcacaatccatcaaatcatcatgcaacaatgtataattatgataagtctctatacctgccgcttgtggtaaaatatcatccacattctctttgtaaagctgataggaaagcaacatcaaaacaggacggatacgtttaccgcctaatgacaagacatactctataggagcatacaatccttttggttcgcgcacataaggcatcgtagcaagataagtatttaccttttccaataactggtctgcagaaaaagccataaattattttgattaaggggttctagaaaaagaggctgctttttaaaggcagcctcttaattaagatattaaagtattttattactgtaatttgaaagttacaggcactgtatatttcacacgtacagctttaccacgctgtttgccaggtttccatttcggcatggtcttgattacacggagtgcttccttatccaagtaggggtctacactacgcacaactaccgggtcaacgatagaaccgtccttattaacgacaaactgaacgataaccttaccttgcacaccgttttcctgagaaatagtggggtatttaatattcttacccaagaacttcaaacattcagccatacctccggggaattcaggcatttcctctacaacttggaatatctgctgttcttcaggttcttcttcttccacttctaccggaacatatttaacttccacagcctgacctgtttcttcagaagcctgaatggcagtttcttctactttagcatcgttttcaacgatctgaagcacttcttctaccttaggagcttcgggaggaggaggagcttgtttttgttcctgttccgtaatagggataatttcttcttcaaatacgacatcggttatacctgtttccgtagtcacttgcttgtcgcgatcagtccattcgaaagctacaaacatgagagcaaggataaacacataaccgataagcagccaggtactctttttaccttcgagatctgctttaggcgattttttaacttccataaattgtgttttaaaattaagtgtttctcactgagggcaaatgtaacacaaatcttttaaataaaaagtattttcacatgaaaaatatgctaattcattttattttcatccgatttcatagacatacacccaacttttatctatctttgaagcgtttttagtagtcacctatacattaattatatatgaaaaaaataactattgccattgacggttattcatcatgtggaaaaagcacgatggccaaagacttggcacgtgaaataggatacatttatattgatagcggtgccatgtatcgtgctgttacattatatagcctgcagaaagggttctttacggaaagaggcatcgacaccgaagcgttaaaaacagcgatgcccgatatacatatttcattccggttaaatccggaaacacaacgccccatgactttcctgaacgatacaaatgtagaggatgccatccgcagcatggaagtttcctctcatgtaagtcctatcgccgccttgggttttgtacgtgaggctttggtgagacaacaacaggaaatgggaaaggccaaaggaattgtcatggacggaagggacattggaaccgttgttttccccgatgccgaactgaaaatatttgtaaccgcctcggctgccatacgtgcacagcgccgttatgatgaattaagaagtaaagggcaagaggcctcttatgaaaaaattctggaaaatgtggaagagcgtgaccgtatagaccaaacccgtgaagtcagcccgttacggcaagcggatgacgctatcttgttggacaacagccacatgagcattgccgaacagaaaaagtggctgaccgaaaaatttcaagcagcgataaatggttaacatagagatagacgaaggatctgggttctgcttcggagtcaccacagctatccgtaaagcagaagaagaactggcaaaaggaaacactctttattgtctgggagacattgtacacaacggacaggaatgtgaacgcctaaaaaaaatggggcttatcacaataaaccacgaagagtttgcccaattacacgatgccaaagtactgttgcgcgcacatggagaacctcctgaaacatacgctatagcccgtaccaacaacatcgagatcattgacgccacctgtccggtagtattacgcctccaaaagcgcatcaaacaggagtatgacaatgttccggcaagtcaagacacacaaatcgtgatttatggcaagaacggtcatgccgaagtactggggctggtaggtcaaactcatggaaaagcaattgtcatagaaacacctgctgaagctgctcatctggacttcaccaaagacatacgcttgtactcccagacaaccaagtctttggaagaattctggcaaatcatagaatatatcaaggagcatatctcacccgatgccacttttgaatattacgacacaatctgccggcaagtggccaaccggatgcctaacatccgcaaatttgcagcagcgcatgatctgatcttttttgtctgcggacgaaaaagctcaaacggaaagatcttatatcaagaatgcaaaaagatcaatccgaattcatacctcattgaccagccggaagaaatagaccggaacttgctcgaggacgtccgttccatcggcatttgtggagcgacttccacccccaaatggttgatggaagaatgtaaaaaagcaatcttaaacgaaaaatagaccaataaaaaatagaaaattatcgttgtccaactgataatttgttaactttgcgacataaaaatattaaaatgggtatttatgggaacgattaaaagtattggtattttaacctctggaggagatgctccgggaatgaatgctgccattcgtgcagtcacacgttctgccatctataacggcttgaaagtatatggcatttatagaggttacaaaggattggtaacagatgaaattcaggaattcaaaagccaaaatgttagcaacatcatacaaatgggaggtaccattctgaaaaccgcccgttgcaaagaattcacgacacccgaaggacgggcacaagcttacgaaaatatgaaaaagcacgagattgatgctttggtcattatcggcggtgacggttcgttgaccggtgcacgtatctttgctcaggaatttgatgtgccttgtatcggtctgcccggaacgattgacaacgacctgtatggaaccgacaccaccatcggctatgatacagctttgaacacaattttggatgcagtagataaaatccgtgatacggcaacttctcacgaacgcttattttttgttgaagtgatgggacgtgatgcaggtttcctggcattgaacggcgctattgccgcaggtgcagaagcagctatcattccggaattcagcacagaagttgaccaattggaagaattcatcgaacatggtttccgcaaatccaagagcagtagcatcgtattagtagccgaaagcgaactgaccgggggtgcaatgcactatgccgaacgtgtgaagaacgaatatccgcaatacgatgtgcgtgtaacgatattaggacatttacaacgtggcggacgccccacagcgcatgaccgaatcattgccagccgtatgggagtggccagcatccaagcattattggaaggacaacgtaatgtaatgattggtattgatgatgataagattgtttatgtacctttcgctaaagctataaagaacgacaagcctatagacagagaattggtgaatgtacttcacgaactttctatctaatttcatccaccacagacaataaaaaaaacgcagatttaatgaataatcataatctgcgttttttgttttgcctgttggtagcaaaaccttatttcaaggttgagaaataagcatccaataactttttggcagcaacaaacgaagtcagtttgccattcagcacctcttcctcttttgcagccaacatagaaattatcttttcattattatagaaactatcacgcaaatgctcgttgatagactcatacatccaatacttggcctgttcatttctgcgatattcaaaataaccattcgctttcacaaaagcgaagtattcatagatcatatcccagatttctttaattccaataccataaaagccggaatacgtcattactttaggactccagcccgaatcaggagcaggaaacaaatgtaaagcattgcggaaatgactggcagccagttttgcttcctcaatattgctgccgtcggctttattgataacaattccatccgccatttccatgatacctctcttaatcccctgcaattcatcaccagtaccggccaattggatcagcaaaaagaaatccaccatagaatgcactgccgtttcgctctgccctactccaaccgtttcaacaaaaatcttatcaaagcccgccgcctcacaaagtatgatcgtttcacgagtcttacgagctacccctcccaacgaacctgccgacggactaggccgtataaaagacttcggatggacggatagtttctccatgcgggtcttatctcccaaaatactgcctttagaacgctcactactgggatcaatagctaaaacagctaattttcctcccttctcaagcacatgcaatccaaatacatcaatagatgtactcttgccggcaccgggcacaccactgataccgattcgcatagaatttccggaataaggcagacacttctctatcacttcctgggcaatagcctgatgttccggttttacactctccaccaaagtaaccgcctgactcaatacggtcacatcaccttttacgatgccttctacatattcacctacggaaaactcacgacgacgaggttttttacgtagtttcaaataaggattcacaatagatggttgctcaatacctttgttcactgtcaatcccttatattcttcactattttcaggatgttccatagctatttttttgaggttacttttacttttataattatcttcggattgttaggatcattggttatcatcaagacacgcggagtaccctttactttcttcaaattttgaccgaaagcagtaatcttcaacttggtagacgcacccggtttcaagacacgtttcttcaactggacccccaaagcagaattaaacacctgcaaatcaagaatttccagattagattttcctacattcttaacaataatcgtatgtgctttcttttcatcgcttttcagttctcccatctgcaactctttggcagaaagatgaatggcaggcggattcaagcgttcctgctggctgatatgcgagaaatccggcaataatatggcagaaaccggaatttcattttcctctcctaccttatctcccggaaaacgggatagataaacagaagctgttgtcaagcccaatttaggcagcttatccgtatcaagagtgatcttgattttacccgtacgtccccttcctaatttttccggagttgcaacagcactgaggtaaggaggcaaatgcatcagcacaggggtatatagtttatctgacgtattggcaaccaacaattccatagtcggtttatcacctttattggcatcctcaaactctatttcttccttatccagacgaatagcgccaatttgaaaaggatgtgtgaaagtgtaattcttaggatcggctgttacttctccccggatagccagataaataggtttattcgaggcattgcaataaatgcctacgctcttctgaaaacgtccgatggctttggcgtcaaaagtagaactgacaatcccggtctttcccggtgcaatcggttctttggtccaatcagcaaccgtgcagccacaagacgttgtcacattagatatcactaaaggtttatctcctttattagtgattttaaaggttgccgtcaccggatttttccataaaatagttccaaattcatgcgttgtcttatcaaataatgctttgggttgtgcctgtacccctaaggtcacaaccagtagtagacttactatcagtaaaatatgtttcatacaattattttatgctttttagatagcaaagatagataaaaaacatcctttacccattttttcagcctataatttattttatcttatgaataacatttatctttgtccctcattaaaaatcagataaattatgaaaatagtaaaacattactggttcattgccattgcattgattgcaatgataagtttctcttcatgtgaaagcgatgaggaaagaggatttgatatttcaggattatacggtaagacttggtggggcgaaatgggatttgaagatccatacggagagccgctttacagttacatcagattcacctcgggggcttctccagctcatggcgtaggaacagaagagcgttgct

SEQ ID NO: 3938 - DNA, 50276 bp, Unknown
  gut microbiota DNA sequence
ctttatagggtatataagtttgactgggaaattcaaaacggttggttgtatctatattattcagatggttatacatttataattgaatatccatccgtttcaggccgctatttttatggcacggctgaagatggttttgaaataagactagaatgggtggacggcagaagcataagaaaaaagtaagttagcaagctaacttactttttatgaaatcacacaattaattccagacatcccgtgtctttattccaccatcacccgatatcctcccgtatgccctccgaattccggagcataagcagactgaacagttgcaattccggcctgatattctcctgtccggttcacatacacctgatactctatcacataagttccttttctcatctgatcgataaagaactgagtcgaagcatctttggtagcctgataatatcccagcccgttgccccaacggaatcccgaaactgcctgtaacggttccatacaagctgcacggtcatccttgatctgaacaaaatccatatcacggtcagccttcacagtcaagcgaacggtaatcttatcgccaactttcaatggaactgattcattcaaagcctcatctcctttatataattgacggctgacagacaatccgtttccctgctcacctatttgatccagactttccagatattgggcataaacggctccccaacccattccggctccttctttatccacccttactttcttgatattcatcacatcaccggacaccgtcttcttgatataaccgatggcatcatctgccggagtccggatcacttctttacctaaagtaatctctactcctcctgtatttgccaataaatccgaagctcctgtagccatcaatgcatacaccgcatcagccgtggcaatcggcgtttcccaagtctgtgtctgtttctgcttcaacagccagcgtttcatttcatcgatcgctttcgtatcttttgttatacgctgtatagcttccatagcagccacttcagtcggaattttataactgaaccatgaatatcgggctttaggagtatcaaagtaacgtcccatttcatccgtcacaacagaatactccatcaatgactgcataaacagcctggcttctgccaccttaccggcttgctgcaagatgatagctcccaacgcctttccataaatcgtcagttcttttccctcaccggataacttgtctatgaaatactggttcacctttttatcaaccggagccttgccatccaaaacgcagatatacaaatacctgagaacctgctctgacggacggaggccgacggctcctttcttttcagcttctttcattgacttatactcttcggctgcctgcttgcctaaatactcgaaccctttttgaatcataggctgcatccggctgtcagcatcctgatgagtcaatgcattcagccggaccagcatttccattacctgagtggttacatagcggctgccttgcatacctttataccaactccatgcgccatcggcattttgcaattctcccagtttctctacagaaacagccagttggctattcattgtattcaggtcaaacaaagtggcgatacgctgtttttgttcggcttcattggtagcttctgtcagccaaggagtttcagccaacagtatatttttcagttcctgattcttttgcagattgctcataaaagtctccttcgtgccactttgagccttccagctatcaaagatttgcttgatacggggattttctttgactatacatgcagccaatgaatgggcataataagcggtagcccaagaaagagcatcttcattctgaggattagccactacaggcaaagcctgcacggcataccaagccggatgggcagtaaattctacggtcaaccgttgttcggaagccgttttgctatgcttgttaaacaggttttccaaagagaaagtatgcgcaccttccccattcacgttcagaggaacggtttccgtcacccactgtttgtctgtcagaacggggatgtaacgctgttctccatcactgaaggtatctccatccgctaccatccggcatgccattaccgcatatttgtcactcacttcaaaagtaaagttcacatgcccggtttctcctcccttcacatcaaacttctgtttttgtgaatagaataccttttctgtttccggattgaacaattccatgcggacagtccctttcactcccttgtccgacaggttcatcagtgaagcggcaatattcgctttatctcccacgcggacaaagcggggcatattaggctgaagcataaactctttgctggcagtagcggtagcttctatctttccataatccacattccgggtatgtgccaagcccataaacgtccatcgggtaaggctttcgggtagtacaaaggaaatactgacttcacctttttcattggtgcggagctgtgggtaaaagaatgccgtttccgcaaagttttcacgtatctgtatatcacccgtttctgccagttcttcagaactgcccatttctaccttttcctgtgcagacgtttctaccatttcttcctggagcaccatatcagtaacagcctcctggttcatcacagcatttgcggcactcctgcctctaatcttcaaagctcctgcaagagtggcacgaggactgcctccgtaacctaccaccatagcctccattcttcctgtagatggaatgatcaattcactatattccaaaggaaccgcacggagcctcttcaacgggaaatcaacatacaaataagcattccgcatataggatgtattccaataagtcaaaggaaccacataatgaaagtccactccaaagtccaacttatgtgcactatagattttatccagagaagcatcatacatagtagccagcatttcagcctcagccgggcttccatccggataaagtaccgtcagtttccattcctcttgctgtccaggacggagtttgtcacggaacgtagtccatttcagctgcaacttcttttcaggggccggtttcataatccgtgcattatgactgtaaagtctgccatctttcacaaatgccatacttaccagaatgccgtcaccatattccttcttataagggaagcggaaactgaccaccgagtcagaaagctctatacgtttgctttccaagcgcttatttcctgcaaatacatcataaagcagatagacattcttttcgctgctacctatatatacagtagccggagatgctgcatcaaattccagaccatcctgatagaaccaatccgttatcacgaaaggcggacgcttgtcgttcaatgaaaacagaaggaaattcttagatgccgtacactctctgccctgcgtatccttagccgagagcttcaaacgataattgccggaaggcagggcataaatagcctctggaacaaaactcttgttggcttccaccgtaccggtcaatacctttctgccttctttttcctgaccgtctttctgctcctccatttcgactacttgataagtaaccggagtatctaccggctcacccgaaagattcatggctgtcagttttatttccagcttcttttctttcaccaaattatcgggcagattatccatattcagcaccattgaagtgcttcctaaaggcaatgacaaattagcttgctgtgtctcacctgcaccatccgtcacatccgcctgtatgttgtacgtataataccacaacggagattctctcctgtccgagtctatttcaaaatgcaccggaacgctgaacttaccatccgcatcggtcattgcctctccctcccaacgggctgaacctctgcccataaaccgccagacccaggcataggaacgagatatattatagtgtaccctggcattctgcacaggcgcaccggcaaaagtctttgccatacccaccacttctatagagtcacccacttgatactccactttcacgggctcaaacgtgacatcaaaggtgggacgtttatattcttctaccttaaaactgacagaagtatcggccgcacgcaagctaaaataaccggtcaggcaaggagagggcaaaacaaactgtccgctgaacgagccaaaaccattcgtccgtacttccacttttcctgtttcattattattcgcatcatatagggataccgtatattttttatccgcaagcacacgcgtagaatccttttccatttcataagccaagccggatacatatacggtttgaccgggacggtaaatggagcggtcggtaaataattgcaaaacttctttcctcttgctctctttatagtaataatcgtttttccaaagattcaagatgggcatcgcattatcagccgccgtatgtgcattataccagtatttgttactattcaggaaatccagtttcaaagtaccctgtttatccgcctggtaggtctgttggggagaataacctccccccttctccgtataaatggttacttccgcctcagaaacaggctgtccgctcactgcatctaccaccaccagttccaacgtaccatccggcagaggacgataaatggtctttaaagcggtgacattcattaatgttccgtccgaaacgcccttcttcccatcgggcactgcctttaagaaataaattcccgcttgaggagcctgtatggtcagggtggtatcgacattcaaataatctgtagtaggtttcaaagaaaaatgctcctcgcgttgcaaacgggcatatttactttcaaaatgggtggttctgttctgcaatacggcagaggtaacgggtaaattcaccttatataactgcaaggtgatgccggtaaggtttttataatttactttcaccgactgctgttcacccggataggccgtagctatttccagtgaaaggcttgcattcagaatttccttttctatattcttcagttggttgataccttcgtaacgggggtatccggctattccttcacgaactatccgcaagcgctctacctgattattttgatactgtaggaattgtgccaaagccagataagcttcagggactgttttcacagccggataagtatgaatccacttccggagttcctgttggcatacgtcattcgagaagtttccggaaaaattgcggtacaggtaattcaatgcgtctatcccggtcagcaaccaaccctcacgctccgtttccgtatcgtatgctttcagcaaggactgataagtctgcatgacagctgccgtcaggtcacaatcagagacgggaacaaactgataagtaacaaactgatccatatccgtcatatccgcaggcagactgtttgtctgatttgctttagcagccgcctgccacctgtactgctgcatgatttgtatggcacgacgtgccagcaggttgtacagattatcacgaaaataccgtttactagcctctcccactctcaccataggtctcaatttctcgaccgggataagtaataaccggtctttatccttgagagaggcctgcaaataacccaatcctttttttacgtcggcaggcatggtcatttcacccagaatggaatacaatatagctttgtcttccatactgccggtttgggaagcccattgttccaaaccattcatatctaccttcaagctatcgggagttaaaagggaacggtactgcatggcagtgagataggctttcatcatttgcggtacattctgttccgcttttgctttatcgtagattttcattgcttcggaaataaccgacttgggcagatcctttcgttccaatacttccagttctttccacaaattgtcataggtttgtgcctgcataggagcaaatacgctcattaccagtaacactatcaaagataaataacgaattttcatatctacaatcttttagttcgtactaagtcttctttaacaaagaaacgaaatagatgtttaaagactgcatacgttttaattaaaataactaaaacagaaaaggaaagatctttcagcgcagccaaagcaaacgttgcagcaccagtcttttatagggtttcttcatgtcttcgggcaggaaggaaacatctatcagttccatccatttaatgatggaacgtcggaatttccaagcgatgttctctattaccttgccactgccccccggcgagctcctccgtatcctcgggcatgacaataaccgtggacagcaaatggtatgcaggcgtcagactatagcccatccccgtatcatacaatgaaaagttcttcaggtgccagccggataacgcaagaatccggcatcatagacaaaggtaaaaccattttcgtcttccgtcagcgtccccgcgtagatatatatcattcaggtatatttttccccttctcatacgctatgctcctttcctgcaggcactgctcccacttcatacccgaagagggcaagcacctggtttaccttgtctattcgcaaagtttgctttccttgttccaactcgcgcacaaagcgaagccccactcccgccttagctgccaaatctacttgcgtaagtccgaaccgcttgcgcatttccttaacaaacaatgacaatgaattattcataattacaccctttagggtaccaatatagcaaaaccagcgataattacaccctaatgggtataatttattagcttcttttgcataatatacccgaaagggtgcaaagtattagcccaaaccagcgcattacggaaaaccaggagtattcagcaaattcgtgatacaaagaaaaaggacaggaaaattccttcaaaagcttcagcctctccgcaaaccctttgccggtgggcattccggctgaaggattacacctgaaaatgcttcagcccgaagaaaaatccttcagccgcaccctcttggggtatgcatactccgcacagattggttccccaatgcttcaaaagtcctatatccaggcacttgtcaccgtatcgcacccctaaatgagcaaactgacacaaccggaaacatattctttttcatcaggataagtttgtattttctgtccatcacttaggtgaacacgccattccactttggtgaagatccattgtcacctgtataaaacggctgcttcactaaggtgaagcaataaagctgttacggcagtcaaagcaaactcttcctaatagtaacatcatttccaacaggcataaaagcaccagagaaaatgaacttccacaaacacatcccgaacagccaaaaactgaagcttccataatcgggctgaaggaatttccaaaggcaatccttcagccgcttcgccctattgacgggcttttgcggagaggctgaagcttctgaaacaaaaaacagggcaatgtccccggaggcactgataatcacctcaatggtagcagaaaccgacaagtgtacacatgaagcggcagtttccgaataaaataagccctctcccgcatatatagccggaaatatcgtatatttgctctgtactaaagaaatagaaccactatgaagaaagaagaattaatgcggaaagccattgagctttctatagagaatgtggcaaacggcggcggaccctttggagccgtaattgccaaagatggtgaaatcattgcgaccggagccaatcgtgtcacctcacaatgcgaccctaccgcccatgcggaagtcagcgccatccgtgcggcggcaagcaaactgggaacattcaacttgagcggatgtgaaatttatacttcgtgtgaaccgtgtcccatgtgtctgggagccatttactgggcacggctggataaaatgtattatgcaaacaacaagacggatgccaagaatatagggtttgacgactcttttatctatgatgagttaagcctgaagccttcggcacgcaagctgccttccgaagttcttttggcggaagaggcgataaaggcattccaacaatggacagagaaaagtgacaaagtggagtattaatagaaaggcgcggacgaaatccctatcatccgcgcccgaaatctttataagatcttaaagactattcttttaccggcgtattttccaacgtagctaccacgaaatcatagaacttgcctacagaaggaataaagcagcgttcatccggtgagtgaggagaacgcaaggtaggaccgaaagaaatcatatccaatcccggaaccaccgcaccgatgataccgcattccaaaccggcatgaatcactttcacagcaggttccgtaccgaattgtgccttataagactccttcatggctttcagaataggagaatccacattgggttcccagcctgaataaccacctgaacgggttacttccatacctgccatagagaaacagctttccaatgcagtattcagataatccttcattgaatcgcgtgaactgcgggccaggatttttatctccgccttgccaccacctatagaaacaatagccagattggaagaggtttccacggtatcggggatagtaggaatcatacgcatcactccattctgacaagcataaatggcatccaccagattatctttaatttcatcgggaaccatcatcgcaggcaattccacccgttctgccttgaagctgatcggtgtttcgtgtacatgatattcttcattccacaatgcttcgcactcctgcacaaattccagtacgtccgcttcttcttcagccggaaccgtaatgaccacttcacattcacgaggaatggcattacgcatattgccaccttgccaggacaccaggcaagcctcatcgtaagttatcacctggttcatgaaacgagccatcagcttgttggcattggcacgtccttcatttatttccaatcctgaatgaccaccgcgcagccctttcaaggtaactttcaaagcaatgtcagccggatctgtttccacttctttatattccaacactgctgtcaggtcttcaccgcctgcacaaccgatatacaattctccttcttcttccgaatccagattcaacagaatatcaccgtctaccgttcccggcttcaaaccgaacgcaccgaacataccggtttcttcgtcggcagtaatcagtgcttccaacggaccatgtttcagcgtcttgtcttccatgatagccatgatagcggcaacacccatgccatcatcggctcccaaagtcgtgcctttagctttcacccaatctccgtcaatgtaagtctcgataggatcattttcaaaatcatgcactgtatcgttattcttctgaggaaccatgtccatgtgagcctgaagaatcaccttcttacggttttccatccccggagtggcaggcttgcggtaaatgatattaccggcttcgtcctggaatgactctacgcctacactttttccaaagttcagcaagaactcttgcactttcttcaagtaacccgaagggcggggaacctgagtcaatgaatagaaatgcttccacacattctgcggagcgagagagagaattgtactcataacttcttagttttatttgtgaacggcaaagccgctaatccatatatacccaacaaaattaataaaaaagtttgtattccatgcactaataaggcaaaaattcccgcatcttcttttcccactccatagagcatcatcatcgttatgacagcaaaatgccacggacccgccccattaggagtcggaactactaccgcaatgctacctacagcaaacatgaccagtcccgccatcactcccaaattatcggaaaaatcgaaacaaaagaaagaaacatagaattgcaggaaatagcaagtccagataccgacggtataaagaatgaacagaggcatccgctttacatgacgcaaagacagtacaccgacccatacattatggagaatgcctttcaccttagcaaagaccgtcacattcctgatcagaaaaaaagccagcaccaatacggccagcacacagacgatagtgatatagaaatgccccgaagtaaatacctgtgccaaaaccgtggtatccgtgccggtttctttaaaaaaggtatcgaatacccttgcctgcattataagagttacccctgtaatcaacgacacacacagcgtatcaatcagccgttccgtaaccaccgtacccagcgatttggaaaaagatgtaccatcatatttagccaacaccccgcaacgggaaatctcacctacacggggaacaaccaagttggcggcataagacacaaagatggcatatacacaatcggatgttttgggatgctcgcccaacggagccagcgtaagcttccaccgccagccacgaaaaatatgactaaacacaccaaacactaatgacactaacatccacccatagttcattcctccatccaagacctcccacacccgggaaaaattgaatccgtgatacatccatatcagtatcgcagcccccaaaaataacggaaatgcaatctgcaaacctttatttataatcttttttaatcgagttcgttccaaaatctgtgtatattaatttagaatgtttacctttgcacgatgcaaagatactatcttagcgaaataaacctatttattaacgatagaaaaataacggaatgggattagtaaagccaaaaaaatttctaggacaacacttcttgaaagatctcagtattgcaaaagatatagccgatacggtagacgtgtgccctgacttgccaattctggaagtaggaccggggatgggggtactaacccagtttattatgcagaaaaaccgtccggtaaaagtggtggaactggactatgaatctgtagcctatctccgtgagaacttccctgccctggaagataatatcattgaagacgacttcttgaaactgaacctcgaaaaattatttgacggaaaaccttttgtcctgaccggcaactatccttataatatatccagccagatattctttaaaatgctggattacaaagacctgataccctgttgtaccggaatgatccaaaaagaagtggccgaacgcattgccgccggtcccggaagcaagacatacggcattctcagtatcctgatacaagcctggtacaaagtagaatacctgttcaccgtacacgaacatgtattcaatccgcctcccaaggtgaaaagtgcggtcatccgtatgacacgcaatgaaacgacggaactgggatgcaatgaaaaattgttcaagctcattgtaaaaacaacattcaaccaacggcgtaaaactttgagaaactctatttcttccattttagacaaagagaacccattgagcacagaccccattttcaacaaacgcccggaacagttgtctgtacaagagtttatcgaactgaccaaccaggtggaagcggcgctgaaaaacaagacggatattgtctatagcaatgatatcgcccggaaaggaacaaacaagaaagaataacacctatttattatattaacggaagaataggatgaataaagaggaattagaaaaagtagagcagctgatcgagcaaaaagactcagagcaactgaaggacttgcttgccggactgcatcctgccgacatagcagagctgtgcaatgaactggatgcggaagaagcacggttcatatacctgttactggacaatgagactgccgccgatgtccttatcgaaatggacgaagacgcccgtaaagaattcctggaaatccttccctctgaaacaatcgccaaacggttcgttgactacatggattcggatgatgccgtggacattatccgtgaaatggacgaggacaaacaagaagaagtcctctcacacattgaagacatagaacaagccggagacattgtcgatttgttgaaatatgacgaagacactgccggtggattgatgggtaccgaaatggtaatcgtaaacgaaaactggagtatgcccgaatgtctgaaggaaatgcgcatccaggcggaagatatggacgaaatctattatgtatatgtagtagacgatgaccagcggctgcgcggtgtgttcccgttgaagaaaatgatcaccagcccttccgtatccaaagtgaagcacgtgatgaggaaagaaccgatatccgtccatgtagatacccctatagacgaagtggtacaaaccattgaaaaatatgacctggtcgccgttccggtagtggacagtatcggacgcctggtaggacggattacggtagacgatgtgatggacgaagtacgtgaacaggctgagcgcgactaccagctggcatcaggtttgtcacaagacgtggaaacagacgataatgtattccgccagactacagcccgtctgccctggctgctcatcggcatgataggcggaataggaaactccatgattctgggcaactttgacagcacttttgccgcacatcccgaaatggccctctacatcccccttatcggcggaacaggggggaatgtgggaacacagtcctcggcacttatcgtacaaggactggcaaacagctcgctggatgcccaaaacacctggaaacaaatagtaaaggaatctgtagtggccgtaatcaatgctactattatttctatgctggtatatatctataatttcatccgtttcggggcaagtgccaccgtgacttattcggtttcattcagcctgtttgcagtagtcatgttcgcttccatctttgggaccctggttcctatgacactggaaaaactaaaaatagatccggccatcgctacaggtccgttcatatccatcaccaatgacattataggtatgatgctttatatgggcatcaccgtattactatcctgacacatttcactacagattacatagattgaaattcagagaaaaacagattcacacagaaaccggcaaagaatcacaataaaagagaatctgtatgaatctatgtaatctgcagtgcatttatcccccttgattctcctattttctccacttttaaggattttcctaaaaaaatcgggaaaaacagtatgaagttctaatttatttcttttaatttgtaaattgttgttataacaaaaacgcttactttaaaaatctatacgatggactcgaatgaaactatccgccctttaaccgaagttccagtggaacagacatctgaaactttggtatcatcttccgctactgcagaagaaaataacgctacgtatgtacctaaacaaacgaaagaagaggtcatcgaacgtttaaaagaaatcaacgaagacgcctgcaatgcagacaaacaagagttggatttattgaaacagaacttctacaagctgcacaaggctgagcaagaagccgcccgtaaggcatttattgatggcggaggtgctcctgaggcatttattccccaaccggacgatgctgaaagccgtttcaaagatatcatgagctctatcaaagagaaaagaagcgccatacaagcagaacaagataaagaaaaagaagataacctggtgaaaaagctcgccattatcgaccgcttgaaagaacttgccgaatctcccgaagatgccaacaaagcatacaatgaattcaagaaactgcaacaggaatggaacgatataaaacaggtgccggctgccaaggtaaatgaactatggaaaaattatcagcactatgcagaaaagttctatgacttgataaagctgaacaatgaattccgtgagtatgattttaaaaagaatcttgaaataaaaactcatctctgtgaagccgcagagaaattggctgatgaagaagatgtgatttccgctttccaccaattacaaaagttacatcaggaattccggaatacgggtcctgttgcaaaagaattgcgcgaagatatatggacccggttcaaaactgcctctacagccgtaaaccgtcgtcaccagcaacatttcgaagccttaaaagaaaaagagcaacgtaatttggatgaaaagaccgtaatctgtgaaattgtggaagcgatggaatacgatacgttcactactttccaagactgggaaaacaaaactcaggaaatcattgctttgcaagctaaatggaaaacaattggttacgcacctcaaaaaatgaacgtgaagatattcgaacgtttccgtgccgcttgtgatgagtttttcaaacgcaaagccgagttcttcaaatccatcaaggaaagtatggcaggcaatctggaaaagaagaaagcattatgtgaaaaagcagaagcactaaaagaaagcacagactggaaagcaactgctgatattctaagcaaattacaaaaggaatggaaaacaatcggtcctgtacctaaaaagtattcggatgccgtatggaaacgattcattgccgcatgtgattatttcttcgagcaaaagaacaaggcgacttcttcacaacgctcggttgaacaggaaaacatggttcagaaaaaggcgatcattgaaaaattaaatgcaattgacgcacaggaaacaccggaagaggatgcgggaaacgccattcgagaattaatgaaagaatggaacggcatcggtcatgtaccgtttaaagaaaaagataaactgtacaagcaatatcatggtgtcatcgacaagttgtttgacaagctgaatctttccgcatcacagaaaaaattaagcaattttaaatcaaccatcagcaaggaaggcaacctttatcgtgaacgcgaaaaactggttcgtgcttacgaaaacatgaagaatgaaattcaaacatacgagaacaacttgggcttcttgaccagttcttccaaaaaaggtagcagtttggttacggaaatgaatcgtaaagtggaaaaactcaaagcagacctagaattgatcttgaaaaaaattgaggtgatcgaccaatcaatgaaaaacgaataaaaaacagttatatgaaaaaagagtctaacgcaaatgcgttagactcttttttcatataacactactaattcttaagataaccaacacaaaataaaaaaagatcttctaaaattataattttagaagatctttgtctttgacaagtgatttgtctgttgggataccaggattcgaacctggaaaaacaggaccagaatctgttgtgttaccattacaccatatcccaattttcctatcaaaacacccgttttgattttgacgctgcaaagatacggctttttatttaatccacaaatttttgaagcttttttttctaatcaagattctttttttctccatttgccttcttttccggccttccttatccttcttgaccgtgtatcatcattctagacttaacataacaataaaaagattctctaactaaaaaaaacaaaaaccgaatatatttaatgcacattttttcgctagaatgagaaaaccaagtatctttgtgcattgttgtaaatacatatattagaataatcagttgttaataacattataatgaacgaagcagagactttagtaaaaaaaataacagaaggcattcaagaaaagaaaggtaaaaacattgtaatagcggacctcaccgccattaatgataccatttgcagctatttcgtaatctgtcaaggtaattccccaagtcaagttacagctatcgttgactcagtcaaggaatatgtacataaagaaataaatgacaaacctacgggaatagacggactgagaaacgcagaatgggttgcaatggactacagtgatgtactggtacatgtctttttgccggaaacaagaaatttttataatctggaacatttatgggcagatgccaaactaacccaaattcctgatctagactaatccaatacagaatcaaaatgagtgaaaataccaataataaaccaaagataaacatgccacgcttcaatttgagttggctgtatgttatcattgccatgagttttgccatcctctacttttccaatcaagaaggaggaattgacaaacaaataacatataccgagtttaaagatatgataaacaagggatatgccaataaaataattgcatacgatgacaatacggtagaaatgtacattaaaccggaatttgttaaagatgtatttaaaaatgactataaaaaagtaggtcgtaatccagccttgaacgtagaaataggttccatggagtcattggataaattcatggaaaaggcacaggaagaaggtcattttaccggatctatcagttatgaaaagaaacgcgactacttcggtgcattattttggaatatcgctccgtttttactgttgatcggtatctggatgtttgccatgcgccgcatgagcggcggagcaggggccggaggcgccaatccgttcaacgtaggtaaaagcaaagctcaggtatacgaaaaaggagacaaaactaaccggattacttttaaagatgtagccggacaagcggaagctaaacaagaagtggaggaaattgtagagtttctgaaacaacctcagaaatacacggagctgggaggtaagatacctaaaggcgctttactggtaggccctccgggaaccggtaagactttgctggcaaaagctgttgccggtgaggcggatgtacctttcttttcgctttcaggttccgactttgtggaaatgtttgtcggagtaggtgcatcccgtgtacgtgacttgttccgccaggcgaaagagaaagctccttgcattattttcattgatgaaattgacgcagtaggacgtgcccgtggcaaaaatccaagcatgggtggaaatgatgaacgcgaaaatacattaaaccaattattgacagaaatggacggttttggttcaaatagcggtgtgatcattttggccgctaccaaccgcgcggatatattggataaggcattattgcgtgccggtcgttttgaccgccagattcatgttgacttacccgacttaaacgaacgtaaagaagtattcggagtacatttgaagcctttaaaactggacgaaagtgttgatctggatttgctcgcccgtcaaactccgggattcagtggggcagatattgccaatgtatgtaatgaagcagcactgatcgccgcccgccatggtaagaatgcggttgggaaacaagattttctagatgctgtagaccgtattatcggtggtttggaaaagaaaaccaaaatcatgactgccgaagaaaagcgtactattgccttacacgaagccggtcacgctacgctgtcttggtttttggaacatgccaatcctttgattaaggtaaccattgttccccgtggacgtgcattgggagccgcatggtatttgcccgaagaacggcagatcacaaccaaagagcagatgctggatgaaatgtgtgccactttagggggacgtgcagccgaagaactgttcaccggacatatttcaaccggtgccatgaacgatttggaacgtgtgacaaaacaatcatatggaatgattgcttatgccggaatgagtgaaaagttacccaacttatgttattacagcaacgatgaatactctttcagcaagccttacagtgaacgtacagccgaactgattgacgaagaagtgaaaagaatgatcaacgaacaatatgatcgggcaaaagcaatattatccgaacataaagatggtcacaacgagctggcccgtctgttggttgaaaaagaagtaattttcgccgaagatgtggaacgcatttttggcaaacgcccctggacttcacgttcagaagaaattatggctttagaagctacagcaaaaccagtagaagtaaccgaagattttgaagagaagaattcttcagattctgaggaaaaggaaaaagaaaaaaaagaagcataacatcgtagaaagatctgtcaactatataagcattgtcattctgaatgatacaaagagtccgtaataatccagatatatccggattcttcatggtcactcagaatgataaaaaaacagatcttctactttgatttttgaatcacttaagactaacgaccgtgaaaagcaatttcttacaacgtgccataaccggaattatttttgttgcagtactgataggctgcatcgtgggaggggctgtctcattcggcatcctatttgccattatcagcgcattggcaatcaatgaattctgtaatttggtcaatcatgtagaaggaatacaagtaaataaacgtatatgtattctcagcggaatttttcttttcctgtgctttttctattttggaatagatccttcacaaacaggtatatttattccttatttagctttatttatttatctgatggtcagcgaactttatttgaaaaaagaaaacccgctgaataattgggcttatgccatgttaagccagatgtatattgccttgccattcgctttgctgaatgtattggctttccattcggacgaaacagccagcctttcacaatacaacgctattctcccactatctatttttatattcaactgggtgaatgatacaggtgcttactgtacaggcatgctatttggcaaacataaactatttgaacgcatctctcctaagaagtcatgggaaggctctattggcggcggcattttctgtatcatagcttctttcctgctatctcacttcttccctttcatgtctaccggagtatggatcggactagcattgacagtggtagtattcggaacctggggagatttaacggaatctttattaaaacgccgtctaggcatcaaagattcgggcaatattttaccgggacacggtggaatgctcgaccgttttgacagcgcgattctcgcaatcccggcagcagtagtctatctgtatgtagtttctttattttaactccgccaaatccaaaggattaaagcccggtacatcctcgccagtgagcggataagagaaaatatatgttttttcttccccgtccacaggattaaccaatacctttattcctttcaattcactgttttccggtgaataatcatctaatttaaaagaaaccataccaggtaccaatctgccctgacttccgttgttattatagcggagttccaaatgcgcatatccgtcctttgtccaaggaatcatctcattcacaaccagattaagaataggtttctgcggactgggaaaattcaacataaaacgtacattcagatagtcatcagaaggccacatatccttgatctgtactttcatatttccaatactgtccatattatcgggggtcaatccgataattttctgaacaggtactaaggtatagtcattcaaacggatattataagcaaatccactttcaccggcttccaaaaaagaataatttccaaaaatccgttctcctgccttcaaatcccggtaaggaacaatatgctgcaccacccacaacttctctccgttgtccaacaccaaataaggagcatcatactgaggttgtttttctacggtagccatagctatagtcaccgtactgtccggatcactttcatcattaccacaagatgaaaaggcgaatactccgctcaaaagaagcatcgcccctaacatagattgaaaaaaatatttcatatacttccagggtttaagttgtttacccgaaagaacaaaaagagatcgtgaaaagtttatttcttcaacaaagctaccatttcacgggctgctgtccccgaagctcctgccggacctaaaatctgaataatacgatcatactcttccaacaccttatttctgtataccttattatataaaagagattctaactctgaacgcacgttatccaccgtcatcgtatccgccaccagttcacgaaccacttccttgtcggctaccagattaaccaacgaaatatatttcacttttagaatatgccggcgaagaaaagcgataaatttccctaccggagtatagtaacacaccacttgaggaacacggaaaagagctgtttccaaagttgcagtgcccgaagtcaccaatgccgcctgcgcgtgctgcaacaacctgtaggtctgtccgaatatgattttaaccggtacattcggatttatataatccgaataataggcagggtccatccccggagcccctgccagcaccaattgataatctttggtaaacggagcagcagcctccagcatcatcggcaggttgtctttgatttcctgtttccggctgcccgccaacaatgcgataacgggcttttcggacaagccattatccgccacaaattccggaaatccatccggatgttccttacaataagcatccactgcatctacacaaggattacccacataatgaacagggtactgatgtccggcaaaaaactcaacctcaaaaggcaggatggaaaacagttcgtccacatcccgcttgatatttttaatcctatactctttccaagcccatattttaggagaaatataatagtagacaggtattttcgtctgcttctttataaactcggctattttcaggttaaagccgggataatccaccagaatcactacatcaggagcccaacgaacaatgtcctgcttacattctttcatattccgaaagatagtacgcaaatgcaacaacaccgggataaaacccatataagccaattctttgtaatgcttcacccgcgttccaccaacagccgtcatcaagtccccgccaaagaaacggaattctgcttccggatcttcctgtatcaaggcacgcattaaattagatgcgtgcaaatcgcctgatgcctcgcctactatcaaatagtatttcatacttccagattccagtttttcaactcattcatcatcccataagcagtcacatcaatttgggtcggagttaccgccacatacccatgtcctaatgcccagtgatccgaatcttccgcttccggttcatagttatcaaactctccggtcagccagaaatactctcccccccgaggatgcagactacgcttccattcattaatccaagccccattcgtctgacggcagatgcgtacccctttcaaggaagctgtatccggaaagttcacattcaagcaaatccccaaaggcaagccatgctccaggacctgctcagtaatacggcgtatataaggcagcgatgaagagaaatcagcatccgcaaaatgattacataatgaatatccgatagaagagatccccttcagacacccttcaatcactacccccatcgtaccggaataatgcacattcactgaagaattatcaccgtggtttattccacctatcaccacatcgggacgacggggaaccaccgtatgcaatgccagtttcacacaatctaccggtgtgcccgtacatttatacacagtcaaatcctcctcttcacgtaccttgtaatacttcacaggatgctcggaagtgatcgcccccgaagctcccgaacgaggaccgtccggtgccattacgattatctcacccattccacgcaacccgcgtatcaattcattcaatcccttagcttccacgccgtcatcatttgacagcaatatcaacggtttttctttcttcatatttttccactctttttctcggagcgtaaagatacaactctttgccggaactacccctcaccggaaaagaaaattatcttaatgttctacaacccagtgctaaaaatagaatagaattgaatgaaaatttctatctttgccgccgttgagttattaacaaaaccaatgagttatcaacagttttgctaatgtctgccgttttttataggtgcaatcacctattatttgttacttcgcagcgagaaaaactgattaatatgggaaaaattattgctttagccaatcaaaaaggtggcgtaggtaaaactaccacaacgattaacctcgcagcttctctggcaacactggagaaaaaggtgctggttattgatgcagaccctcaggccaacgcatcatcaggattgggtgtgaacatcaaagaggtagaatgctctatctatgaatgtattatcaacgaagccgatatacgggaagcaatttataccaccgacattgacggactcgacattgtttcttcacacatcgacctggttggcgcagaaatagaaatgctgaacctggaagaccgcgagaagatcatgaaaaaagtattagcccccatgcgggacgaatatgactatatcctgatagactgctccccgtcgttaggcttgataacaatcaatgcgctgacagcagccgattcagtgattatccctgttcaatgcgaatattttgcattagagggcatcagcaaattgctgaataccattaagattattaaatcgaaactgaatccttcactggaaatagaaggcttcctgctgacaatgttcgattcacgtctgcgtctggccaaccagatttatgatgaagtgaaacgccattttcaagaattggtattcaagacaattatacagcgtaacgtcaaactgagcgaagctcccagccacggcattcctgcaatattgtatgatgccgactctaccggagccaagaatcatttggcattggcacaagaaattataacacgtaacagtaagtaaacaatggcagtacagaagaaatttgctttaggacgcgggcttgacgcactgatctcgactgaagaagtaaagacagccggctcatcttctatcaacgagatagaactgagcaaaatatccgtcaaccctaaccaaccgcgtcgtgaatttgatccggtggcgttacaggagttggccgactctattgccgaaattggtatcatccaacccattacgttgcgtcaactgagtgaagactcttaccagatcatagccggagaacgtcgttaccgtgcctccatacaggcaggacttaaatctattccggcatacatccgcacagccgatgacgagaatgtaatggaaatggcgttgattgaaaatattcagcgtgaagatttgaattcattggagattgcactggcttatcaacatttattggaacaatatgcattgacacaggaacggctgagcgaacgtgtagggaaaaaacgtaccactatcgccaattatctgcgcctgctgaaacttccggcccagattcaagtagcattgaaaaaccgcgaaatagacatgggacacgcccgtgccttattgtccttagatgatcctaagacccaaatacgtatctttaatgaaatacagtcacaaggctattctgtccgtaaagtggaagaaattgtcaaggcactgagcagtggcgagacagtggacagcggtgggaagaagatcaaaccgaaaggctccaaattatccgaggaatacactttgctgcaaagccacctctgcggattcttcggttcgaaagtacagctatcatgtacagccaaaggaaaaggcaagatcagtattccgttcaacaacgaagaggacttggaacgaatcatggaaatactggattcactgaaaaagaaagaataaagcgttattactacattgaaaagaagaacatccacatataaactgtttacattcctgcttttatgccttatgatggctggaagcatgaatgttcacgcccaaaaggcacgcaaccgccgtatgggtataaagacagattctattatacaagtcaaagattcacttgtcattgacagcctgaaactgctggaagaacggcaaaagatagaaaatatggaagcacctgttgatactgccgctttagtccgtaaaaatgattccatacagaaagcaatggctgccgaaacaaaaccccggtttatcccgaactccaaccgtgccatctggctggcgttggtaattcccggcggaggacagatatacaaccgtaaatattggaaactgccgatagtatatggtggttttgtgggatgtgcatatgcgctgacctggaacaacagaatgtacaaggactattctcaagcctatctggatattatggacgatgaccctgataccaaaagctacgaagacttcctgcctcatggcatgagcgcggaaggtatggaggacacctttaaaaaacgaaaagatttctatcgccgaaatcgggatttaagcatattctgttttatcggtgtatatatactgtctgtcatagacgcatacgtggatgccgaactatctgattttgacatatccaaagacttaggtcttcaaatacaacctgttatttttaatgacggccggagcaggatacctaatacaataggcctgcaatgcagcttcaaattttaatcgcatgaaaaactttttaattggtttatttacatttataggaacaacgggaataagcgcacaaacccaaagtattaccgttcactcgcaaactacaggaaaagaagaaattattgatgttcctgaaagtatgcagtcagaaatggacagtctttactgggactggcaatctaagaatcacatcacattgggagagaactgcacaatggcctctaccaaccctgttgtaagtgattccatctatatggatcgtctgtcacgtattccctctatcatagaaatgccttacaatgaggcagtacgcaaattcattgatatgtatgccgtccgtctgcgcaataaagtatcctttatgcttgcggcaaccaatttttatatgcctatctttgaagaagcacttgatttatacgaccttcctcaagaactgaaatatctgccgattatagagtccgccttaaatcctgtcgctgtttcccgccagggagctaccggcttgtggcagtttatgctgggtacaggaaaaatatacgggctgaagaacaatagtctgatagacgaaagacgggacccggtcaaatcaacttgggcggcagcacgttacctgaaagacctgtacgacatctatcaagactggaatctggtattggcagcttacaactgcgggccgggcactatcaacaaagccatacgccgtgccggaggagccacggattattggacaatctacaactatctgcccaaagaaacccgtgggtacgttcctgctttcatagcggcaaactacatcatgacctattattgcgaacatggcatctgtcccatggaaacacagcttcccaacgctacagacaccattcacattaacaaagacctccacttacaacaagtggcagaagtatgcaacatcaacctagaccagcttcgcagcctgaacccccaatacaaaaaggatattattcccggtaacagcgagtcgtgcgcacttcgtctgcccaataactttgtcagtactttcattgaccgccaagacagcgtgttcgcttataagcccaatgaatatctgaccaaaagaaaaacggtagccatcaaggaaacaaccagtagcagaaaccgctcatccaagggaactctttatcataaaatcaaacaaggagacacattgggaggaattgctgccaaataccacgtatccatcagccaattacgtaatctaaacggtataaagggcaataatatcagagccggaagaagtttgcggatcagatgattgataaaaaatacagatttaacactatacattttctgaaaatacttgcttgaatatgttttttgtatatttttgcagtatagattataggaggcaaagatatgacggatgaaaagcagactcaggaacaggcggatgaggaaatgataaaccaagggtttcaggaacttttggacagttatctagcgaccaagcaccgcaaaaaagtagaaatcatcacaaaggcattcaattttgccaaacaagcacataaaggagtaaaacgacgctcgggtgaaccatacatcatgcatcccatagccgttgctaaaattgtatgtaccgaaataggactgggatcaacttccatttgttcggctttactgcatgatgtggttgaagatacagactacactgtggaagacattgaaaatctgtttggtcctaaaatcgcacagattgtagatggcctgactaaaatatccggcggcatattcggagaccgggcttccgcacaagccgagaatttcaagaaattgctactgaccatgagtgatgacatccgggttatcctcatcaaaatagccgaccgtctgcataatatgcgtacacttggctccatgcttcccaacaagcaatacaaaattgccggagaaaccttatacatctatgcgccactggctaaccgcttggggttaaacaaaataaagacagaactggaagatctcagtttcaaatatgagcatccggaagaatatgcacagatagaatccaagctacaagaaacacaagcggaacgcgaagaagtattccgtgaatttacagcacctatccgcgcacaactggacaaaatgggtatcagctatcaattgatagcacgagtcaaatccccttattccatctggaacaagatgcagaccaagcatatcacatttgaagaaatatatgatatcctggctgtccgtatcatcttctgtcccaaaaatccggaagaagaactcaacgagtgctttaacatatacgtatccatatccaagatttataaaccgcacccagaccgcttgcgcgactgggtaagccatcctaaagccaacggctatcaggcacttcacgtaactctgatgagcaacaaaggccaatggatagaagtgcagatacgcagcgagcggatgaatgatgtagccgaacaaggctttgccgcacactggaaatataaagaaggcggaggcagtgaggacgagggcgaactggaaaaatggctgcgtaccatcaaggaaattctggatgatccgcaaccggatgccatggactttctggataccatcaaactgaacctgttcgcttctgaaatatttgtcttcactccgaaaggtgaaatcaaaacgatgccgcaaaactgtacggcactggattttgcattctccatccatacattcttgggcagccattgcatcggagctaaagtcaaccacaagctggtgcccttgagccacaaactgcaaagcggcgaccaggtggagattcttacttccaaatcacaacatgtacagccttcgtggataaactttgccaccactgcaaaagccaaggctaagatacaggccatactgaaacgcgaacagcgaggtatgcagcaggccggtgaggaaatgttacgggaattcttctccagggagggagtagagtacactcccgaaaacatacgaaagatctgtaatctgcataccctcaagacacaggaagaattgtttgcagccatcggattcaaaacaatcattctaggagaaaacgataaaaacgaactgaaagacaaaccggtttccagtaactggaaaaagtatatctctttcgctttcggaggcagcaagacaaacaaggagaaaccgacagaagagaaggttcccctaccaaagatagacagcaagaaaatattgaaactgactcccgaagctatccaaaagaactatgtgatagcagaatgctgcaaacctattccgggagatgacgttttgggatatataggcgacaataatcgtatcatcatccacaaacgccaatgtccgttggctaccaaactgaaaagcagttatggcaaccgcttgttggctgtccaatgggaaacaggaaagtccttgtacttccctgtaaatatctacataaaaggtattgaccacatcggtctgttaaacaaggtaacagaaatcatttcacaacaattgaatgtaaatatccacaagttgaatattgaaagtaacgatggtatctttgaaggaagaatacagctatttgtgcacgatgtggatgatgtaaaatccatcactaccaacctaaggaaaatagatgagataaaaaccgtcacccgtatcgaaaagttcgaagacgagccgaattaaccaataccagtttcaccgcagattacactgatttgtccataacgattatctgcaactcgtttttaatccgtgcaatctgtggtgaatattcttaagtcaggtaatccagttctttacgcatactgaccaattcctcacgtatcagtttcaatctgtccaaaatctccgtagtacggatagtggtttccctgttcatcttcagtttctgcttagccccctgtaaagtcatccctttctctttcaccagatgatagaccagccggatattctcaatatcctctttacgatactgacggacattccctcccgccttcttgggcgaaataataggaaattccttttcccaataacgcaacaaggattcatttacatcaaacatcttcgccacttccccaatggaatagtaaagtttcaattctttattcggattataggccatggtaaattaaaattaagaattaaaaattcacggctagtcaaataccttaccgtgattggctgcaatctgtatcatcttgtcataatcttccgcactcaaatccatgaaataataattcacaggattctgcacttttcctttcacgtgcacttcatagtgcaagtgcggcccggtactcttgcccgtatttcctacctcccctatcacttccccacgtaccaccttttgccccgggcgaaccttatacttgcttaaatgtgcataccaagtcacgtacccgaaaccatgatccacctggatcagatttccataaccggtttcccatcccgcctttaccaccgttccgtctcccgtagcataaacaggagtacctatattggcagagaaatccattcccgcatgaaacttggctgttttataaataggatctatacgtacaccgtaacctgaagccgtcttcttcaaattcttattggataccggcattatggccggaatacatttcagcatctcgtcatgattcttgcacaaatccaccacctcgtcaaaagacttggactggatataaagctgccggttcaacatatccagcttctgagtggtattgataaccagatcggcattcgccatatcccgcaactgttcatagcggtttgtccccccataaccggccttacggactgcatccgatacaggatcggcctgcaacaccacccgatacaaattatcatcacgctgctggatatcctgcatcacccccatagcctcatccagacgatgggacaacacattatactgggccagcaaacgggtattctctatacggagctccttctcggacggagaaccaaagatcaataataagataatgaaactgcctgcccccaagcccattcccacaaacaaacggcgcaagatgcttaaggcacgctgcctcactgtggggtaaatgcggtcataagttcgggtcttaggattataaatatagtagactttacgcatctaattctgctttttgaagtttttaatgcacaacacatcaatattttgcacaattcttgacgacaaaaataataaaaccaattatctttgcaaatcctttttgagaatattaactagaagacaatatattataagcgacatgatgacagctaaagaaattagagattctttcaaaagctttttcgagtcgaaaggacaccagattgtcccatcggctccgatggtcattaaagatgaccccacattgatgttcaccaatgcaggtatgaaccagttcaaagacattattctgggcaaccacccggccaaatacaaaagagtcgcggactcacaaaaatgtttgcgtgtaagcggcaagcacaatgacctggaagaagtgggacatgatacctaccaccatactatgttcgaaatgctgggcaactggtctttcggagattacttcaagaaagaagctatcggctgggcatgggaatatctggtaaatgtactgaagatagatccgaaagatctgtatgccaccgtattcgaaggaagtcccgaagaaggactggaacgggacaacgaagccgcctcttactgggaacagttcctgccgaaagaccatatcctcaatggcaacaaacatgacaacttctgggaaatgggtgatacaggtccctgcggcccgtgttccgaaatccatatcgactcacgttcggaagaagaaaaagctcaaatccccggcaaccaactggtaaataaggatcatccgcaagtaatcgagatctggaatcttgtattcatgcagttcaaccgcaaagcagacggttcactggaaggtcttcctgccaaagtgatcgataccggtatgggattcgaacgtttggtgcgcacactgcaaggcaagacatccaactatgacactgatgtgttccaaccgatactgaaagccattgccgaaatggcaggaaccacctatggtcaagacaaccagaaagatatcgccatgcgcgttatagccgaccatatccgtaccatcgcattctcaatcaccgacggccagttgcccagcaacgcaaaagccggctatgtaatccgccgtatcctccgccgtgccgtccgttacggatatactttcctgggacagaaacaagcattcatgtacaagctgctgcctgtattgattgagaatatgggcgaggcctatccggagttgaacgcacagaaaacactgatcgagaaagtgatcaaagaagaagaagaatctttcctgcgcacactggaaacaggtatccgtctgttggacaagactatgaacgatgccaaagctgccgggaaaaaagagatcagcggtgtggatgcctttacattatatgacactttcggtttccccctcgacctgacagaactgattctccgagaaaacggcatgactgtaaacgaagaagagttcaacgccgaaatgcagaaacaaaaagaacgcgcccgtaacgcggcagccgttgaaaccggcgactggatcaccataaaggaaggtgacacccactttgtaggttatgactttaccgaatatgaaaccagcatcctgcgctatcgccagatcaagcagaaaaaccagacactgtatcaaattgtactgagcgatactcctttctatgccgaaagtggtggtcaggtaggtgatacaggggtgatcgtaagcgaattcgaaaccattgaaatcattgacaccaagaaggaaaacaaccttcctatccatatcaccaaaaaactgcccgaacaccttgacgttccgatgatggcttgtgtagatacagaaaaacgtgccgcctgtgccgccaaccactcttgtactcacttgctggacgaagcgttgcgccaggtattaggaactcacgtagaacaaaaaggttctttggtaacccctgagtcattacgtttcgacttctctcacttccagaaagtgactgacgagcaacttcgtgaagtggaacatttggtaaatgccaaaatccgtgagaacatccctttgacggaataccgcaatcttcctatcgaaaaggcaaaagaactgggtgctattgctttgttcggtgaaaaatacggtgatgaggtacgtgttgtccaattcggaaactctattgaattctgtggaggtacccacgttccggctacaggcaagatcggtatggtccgtattatcagcgaaagctctgttgctgccggtgtgcgccgtatcgaagctatcacgggtgccaaagtagaggaattgatggatacggtccaagatacgctgaatgacttgaaggcattgttcaacaatgcccccgatctgaaagtcgccatccgcaagtatattgacgaaaatgcaggattgaagaagcaggtggaagagttcatgaaagaaaagggcgccgcactgaaagccagactggtagagaatgccaaagaaataaatggtgtgaaagtggtgaaaaccatcattccgatgtctgccgacgtagtgaaagatattgccttccagctgaaaggtgagattcctgccaatctgttcgttgtaataggtagtgtggacaacaacaaaccgatgctgactgtcatgattagcgaagacttggtaaaagccggacagaatgcaggcaaactggtccgtgaagcagccaaactgattcaaggcggcggcggtggtcagccccacttcgcaacggcaggcggtaagaatcccgacggtctgaatgcggctgttgataaagtgatagagctggctgcattgtaatctattcgaatttcgtccatatttcgtatatatcaaaactccgccatctggtctgaaagccgatggcggagtttttttatctggtttactaagccttttcttctttatggataagggaaataaaaaggaagatttctatctcccaagcctttggagttatctccatagcctttggagttaactccataagcttgggagttaactccaaaggttatggagatagaatacaaacgttcaaaaaggcttagccataaagaaaaaaacattaaccaaacggttgaaaacatatcatcagtcattaacacctcactgactgcccgctcattccgtctgctccttcggccagttcactagatacagaatttccgtagcacgggtgaaagccgtatacagccaacggaaataatccggagtcaacatatcctccgtcatataaccctgatccaaaaagacccgtttccactggccaccctgcgctttgtgacaagtaacggcatacgcatatttcacctgcaaggcattgtaatgaggatcggctttcattttcttcatccgctcacgtttcactgttatatcagcataatcctccaataccgaataaaacaacttgtcattcaattctttaggcagtgcgggtgtttcagtatgcaaggtatccaacaaaagtttcacctccagttccataccatcatagtcggggaacgccagcaccacatcggcaaaacgaaagccgtatgcctcacgcacccgacggacacggcgaaccacagctatatctccattggctataaaatcaatctccttacaaccctccgtccaaaaatagttattcttcgccaccatcagcaggtcaccgctgttcagctcatcctcccgaaacagaatcgtattcctaattcccttattataaatattcgcccgtttattggaacggcagaccacaatcgtttcgtccatacctgcctgaccgtaacaatcattgattacctcaatcagctcactaccagaaaccatccggatatccggaaacccttccacacggacagaaggcaaagtgagaaaattttcctcggatatgtagcggcgcaattctgtcgcattccaaagaatccccgaatcatgcatctgacgaaccacctcagtgagctgcgcctcatatacttccatgccatacccgcgtaacttatcggccgaaagagccggactctcctcctctcccaccggaggaagctgcgccgtatctcctatcagcatcagacggcaacctgttccggcatatacatattgaatcaagtcgtccagcaaacgccctgtaccaaagaccgcccccgccaatccgtcattagcgatcatcgacgcctcatccacaataaacaaagtatgctgatgcaggttatcatccaaagaaaagttgtccaggtcatttgaaaagttgcgctggcggtaaatcttcttatggatagtataagccggatgctgtgcataatgtgaaaagactttagccgcccttcccgtcggagcaagcagaacacacttttgctgtaactggtccaaggtcttcaccaatgctccgataagggatgttttacccgtaccggcatatccctttaagagaaaaaccgagtccgattggcgggaaaagagaaaatctgctaaaaatttaacagctttttcttgttctaaagttggtttatatagaaaatttcccttaatttgctgcactaaataactattaatcataattgcgtaataaaaagttccttgaactgtgcgttattagatttatttgttttatttttgcgatgcgaatataaactaaaaaaaacacatatttatcatgaaaacagttattaatattgtattggctgcttgcgttatcggtttgatatacgtttgctacggcagtatcatgggaccgatcaacttcgatgacgctaaaaagactagagagaaacaagttattgcacgcttaattgacatccgtaaggcacagttggaataccgtaacctgcacaatggacgatatactgcaagcttcgacaccttgattgatttcgtcaaaactgcaaaacttccgtttgtaaagaaagaaggagttttgtctgatacacaactggaagccggtatgactgaaaagaaagcgatggcaatcatcaacaaagccaaaaagaccggtaactggaaagaagttgaaaaagaaggtttgatgaacttcaaacgtgatactttatgggttgccgtaacagatacaatctatgctccgggcttcaacgcagactctttgagatatgttcccttcggaaacggcgtacaatttgagatggttacccgcagcgatactaccaaatcgggtgctcctttgaacttgttccaagctcaaactccgtatgaaacatatttgggcggcttgaatactcaagaattggctaaccttaaagaccttcagaccaaattgggtaaatattgcggtttaagagtgggtgatatcgaacagcctaacaataacgcaggtaactgggaataagaatgactgaacgtatcgattttacaaaatcggaacaatatacattatccatccgcctcagtgcggatggattttctttttctatctataacccactgacagataatgatttctgctttgttccgcatccggtcaacaccggatattccatgacggccaatctgaaagatatgctgactaaaacagaagcgctgaagtatccgtataaacgggttaacatcttgtatgactccccccgtttcacccctgttcctttggaattattcgaagacgaacagatggatacaattttctatcataattttcctaaagctaaaggaaataacgagattgtactttgcaatgtcctgggaagaagcaatgtggtaatactttttgctatggacaaacatacccatttgttactgactgaacattttcctacagctcgtttcttctccaccgccagcccgctgactgaatatttcgcccggaaaagccggttgggtaacagccggaaactatatacatacatacgcgagcaacaaatggaagttttttgttttgataagggcaacttattactgatcaactcatttccatgcaaacaaaccacagaccgtgtgtattacctattatatgtatggcaacaattaaattataatcaggaaagagacgagctgcacttgacaggaatattagaggacaaagaagaattactgaaagagttgcgcaattatctgcgccaggtattcgtcatcagccccaaagcggaattcaaccgctccgagataagtaaaatagaagagataccttttgacatgcaaaccttattattatgcgagtaatcagcggtatatacaaacggcgccgtttcgatgtgcctcatacattcaaggcacgtccgacaacggatttcgccaaagagaaccttttcaatgtattaagtaacaattattttgacttcgaggacggagttacagccttggaccttttcgccggtacgggcagcatcagtatagaactggtttcacgcggttgtgaccgggttatttcagtagaaaaagatccccagcacctttctttcatctcacaggtgatgcgtgaagtgaagaccgacaaatgttttcctatccgtgctgatgtctttagatttatagacaaatgcagcgagcaatttgatttcatcttcgccgaccctccatacgccttgaaagagttggaaagcatccccacccgtattttcgaaagcgggattttaaaggaagacggattactggtactggaacatggcaaagagaatcattttgaggatgacccccattttattgagcgccgtgcatatggcagtgtgaacttctctttcttcaaagcaacggtgccagcaaccggacaatagattcttgtgctttttgataccaaggacgctttatccatgtttttctctgcaacaggatggcgtccttctggtcttgcaggaaaatacctttcaacagcaatgctgaggacggatcatacataaaggcattcacctcaaaattatgctcaaagctacggaagtccatatttgtagaacctaccgtagaaagagtatcatcactgaccatcagcttggaatgcaaaaaacctttctgataaaggtaaatcctgacacccgcacgcatgatatcatccaaataagataacgaacctaaatgtgttatccatgtatcggcacgtgccggtatcataatgcgaacatccacgcctgccaaagctgccgttttcaatgccatcagaataggttcggtaggcaacaggtaaggtgtttgtatataaaaatactttcgggagctgctgatagctatcagtagcccttgcataatatcccgccattcgcctacaggatcggaagtaacaatctgtatcagagcctttccaaagattccgacttcggggaaataacgggaggaagtgataagggtacggtctactacataccaatcggtcaaaaaagcagtctgtaacccatataccgcttttccttctattttaatgtgagtatcccgccatatcccccatggaaagcctttcatatagcgcaaagcaatgttcatccctcccgtataagccacacgaccgtcgattactactattttacggtgattacgataatttaccttactggtaaataaaggaaaacggactttcaaaaaactgcgtgcctcaatacctgctccccgcatttcatcaaaaaaagcatggggaactttccagcagcccacatcatcatatagtaaacgcacttctactccctgccgcgctttatctatcaacaaatcgcgcagcaacctgcctgccggatcatcctcaaaaatataaaactgcaaatggatgtgatgctttgccttactgatttctttcatcaatgaatacagcatggaataaccatccgtaaaaacttccgtcgcatttccttcaaagggcaaagcattattcactttccggaaaaaacgcatcaactggtgctgttcatcaggacacttaaacgccttttgcgcctggtattctgccatgggacgttttatgagacgggtgaaccctttcttgctgatcaatttctccttacgtgtgcttctgccgaaaaagaaatagaacacaagccccacaatgggcaggaaaaagagcacaagtacccatgccattgttttaacgggattacgattatcaagtatcactataaagatagttccgatgataatcacaaaataaagcacgttaaaagcaacagcaaagatttcattaaagatactccactctaccatataattccagtaatttacttataagcaaacttataaaaaaaatcccaacctataacaatatagattgggaaaagattaagatatagtttcatttaaaaaggacgccggccatgtcttcccggaccgggaccaaaaccgggaccgccgaatcccctatggctattcatcatcttgtcacgggcggctttacttccaaaaatattcagacgatagataaaatgtaccatacaataactgttgatactgttgtattcggtaaccgaacgtacatccgctgtcaaagaacggctgatattgctctgttgttttaagatgtcgtacatttcaaaactaacagttgcagctcctttcaatagactttgtgctatttgggcattccaaatcagttcattattgttcaaactggcatcatcatatcctctacgggactggttggtgatattagtagacaatgtcatctgccatggtaaagtgacattggtactcgctccatatgagaatgtataaggattctggttcttttcaggacgcagcttgctacgttccgctgtatactcaatagaaccattcaatgaaaattcaaaccagtcattccgataggacccattcagattctccgccaaagtcaaaccggtagtcgtattcttatcatcatgcaatgtttccttattgtataagaacgctacctgattccggtagctcacacgagaaaaagaatttatagtaaactttttattcttcaaagccgaattaaaaccgaacaatccaaacgcattccagtttccattgatattctgaggagttgaagtagtaccacccgtattctcatcatataccgtactattactgatactattctgagtagcagtgaaatttacatgagtcattatgccacgctgcttctcggcattataagtgttataaaacaaacgcatggtatgagcaaacgaaggcttcaaacctggattacccacacggatattcaacggattggaattatcgacaatcggcaacaggttttccatactaggctggctactacgcccacgataagtgatacgcaactgacttactttggagaagcgataacgaaaatccagattcggagcaaaattgaataccgttcttgtggtatcagtcatgtaatctcccttcttataggacaatttcgtattttgaggctgtaaggacatgccggcactcaactgatatttctcccggataaatcgtagtcccaaagaaatatcatgattaaagtatttatattcagcatccttactcaagctatccacataagcagtttcatagttttcgggtaatccgtcatttatatcccaaggataccccaaatcgtatgtcgatttatcactcttgctattcttatattggaatctataactaaattgcaggaaagtagcccgtgctataggttcgctataagtaaactgtgctgtataattataatttttagtaggcatcgtaatgtattgattacgatgttctatagaatcccctcctaaatagttctttatctgataataacgggtttccgattgagcatactgatcgctgtcatcatctccatatccaaatgaaccacggaatgtaatgttacgtccctcattattcagtttccggttcagctgcaatgttgcattagccgacaaactatttgatttggacagattatgttcattggtagcattaatacgagtatcccttaacggatcatcagactctatattgtcaaagttcaaataatcattgggatttaccacatactgataaggatcctcattaaaagtacctgactctgcaactgaagctccccttgtcttatcataagaaacattcggccggaaaataatattggtcattgaatcgggacgccattccatacggaaatctgccttgaaacctgtttccttattactattggctttgtttgaattggaataagaatcccccgactgcaaaaaacgctgtgaagatccgactgttactacatctgcatcacgatagttgtaacgcatactacctcccaattccagtttttctgtttctgtagcaaaattcgctcctagcattttagtcgcgttcaatccattgttacgcctccaacgaggtcctccccccgaaaatccctgatcattcacattattggcggaaccaataatagaaacctgagttttatcataaaaacggttaatcatagctcttcctgtataacggtcttccgttccggcgcctaaatccacgtttccaaaccagccttgattcatccccttcttcaccgtcaaatcgagcactgtttcctcctcaccatcatcaatacccgtaatgcgtgccaaatcggatttcttatcataggttttcagtttttccaccatatcgactggcaaattcttcaaaccggtcttcacatcaccgccaaaaaactctttgccatctaccataatcttttttacttccttaccattgattttgatattaccatcgtcatctatttctgctcccggaagttttttcaccaattcttccaacatcgccccctcaggagtacgataagcagaagcgttatagccaatagtatcttctgaaatggttacctgcggagcctcggctacaataaccgcctcacccaacatgatagcatcggtgggtaaagtgatcgttccaatattaacactcggtttaccagctgtcagctgcaaagatttttcctgagtaaggtaacctacaaatgaaattttaagtacatatttccccggacgggcagcaataaagaatactccgttgttattggtaacatttcctaccaccattgtactatcgggtagagaaagtaactgtacggtagcttgtccaaccgggcttttatcatcaccatcaatcacagatcccgtcacggttatgcgcttgccactttgcgcccaagagagagttgcacaggtacataccagtaacaacaataatactaacttcttcattttttctttttccttgaaattttaatgcctaatgtcctttggacactcttgtcgacaaaaggtttaacggaaaaatgtatttatttcttaaacaatcggtcaacccggcttttttgtacaccaaattccagacaaataacattaaaaaccatataaactatagcaatggaattatccgcttcttccagatttccattatatactcctctgaccaacattacaatataataaatgcccaacaaataaatagcataacaaatagccttgatacgtattcgggaaatcttctcattctcatccttcacttttgccaagaagatcataaacaaagaaaaccagataagtaacttgatagaagcctttgtaaacaacaggttactatcgtttatcatgccaaacataaacatgaacaacggtacgaaaacagacaacaacagaacaacatatcccatcgtcctacaataaaccggtaaaattcctttcattattttatattttaacgtacaaaagtaattatttgtaagcaaagaacggtcatctttttgcttttttacctaaatttgcaggcaaataatagaaaatatgagtaaacaagaagttattatctgccataacttagaagaaaatctcaataaggcaataaaccaatgcccacatgacaaattatttgtcttggctgacgaacatacacgtgaactttgcattcctgttttatcagaatttgattgtattaaaaatgcccattttatttatataggggctgaagatgtgcacaaaaacttggaaacactggcatatgtatggaaagagttgggagataaaggtgcaagccgtcattcgctacttatcaatttaggtggagggatggttacagatttaggaggattcgccgcatcaactttcaaacgagggatcaaatatattaatattcctaccacactgctggctatggttgatgcatctgtaggaggcaagaccggaatcaatttcaacggattaaagaatgagatcggagtcttctctcctgccgaaagtgtattgattgacgctaattttctaaaatcactggatattcgcaatctattgtccggatacgctgaaatgttgaaacatggtcttatcagcacccatgatcattggatagaattgttgaaatttgacttcaacaatatagattacaaggtcttacagagtttagtcggaaaatctgtacagattaaagaagatatagtggaacaggatccttttgaaagaggaatccgcaaagctttaaatctgggacacaccgtagggcatgcttttgaaagtctggcattagaaacacagcatccgatattacatggttacgctgtggcatggggaatagtttgtgaactttatttctcccatatcaaaactggttttcctaaagacaagctacgtcagaccatcctgttcgtcaaagaacattatggagttatgccttttaattgcaaacaatatgaacgcctctatgaattcatgaaacatgataagaaaaactcagcaggcattatcaatttcactctattaactgaaataggaaatatacagattaatcaatcggcaagtaaagacgaaatttttgaaatgctggatttttatcatgaatccatgggttgctgatctcccttcaaacagatggaaaggattgtacaaactttccatctgtccgatacaataaaaacatcttttatttattcccaattacaatcgatcaaacttttaacaatcaagcaattagagtatttataatacattagttaaaaaacaggccaatcatttaaaaaagacaaatataaagcaccttttttccgtaaaattgttcctaaataccattgatcaacttttcaatgcttcagaaaccctatttttgcattatataattggttggtataaatgttatataaggaatttgaaaagaatagagaagatatattagagaatgaattttgcatgcaatctaatgcatcaacattgcccattacagattgcccttcttatacccctatatgtactattggaatctgtatacaaggaaatgctaaaataagaatggattctcaagaatatactatacacccacatgatgtttttgtctttatgccgggactgctagtctcagtcatagagacaagtcctcatttcacaacaaactattttacactttcaaacacatttttctatgatgtaataaaaactatcaggagtttttctcctcaatttttctcttacatgaaatctcgtttcctttatcccttgccggaacaagagatgcagtatttcatgaattattatacgttactgaagagtcggatcaaacttcccaaaagtttttccagagaagcaattatagctctgctaagaattatattcctagatttatataacgattttgaaaattacatcaatcatagaaataatacaagtacaacacgtaaagaagatttaacgcatagattctatacgctaatgatggacaactacagagagcataaagaggttatcttttatgccgacaaacttcatgtttcttccaaatatctgtctgaagtagttaaagaaaccagtggaaaatctcctaaggactggattatagattattcattactggagataaaagaattattgaaaaacagttctcttaatattcaggaaataacaatcagaactaagttcctgaaccagtctgctttaggtcgtttttttaaaagacacaccaatatgtctccctctgaatatagggaatcgacttattagtttcatcaataccttgcataaaaagatgcacttttaatgtaaaaaagtacagagaatatttgcaaatacaaaaaaaagccgtacctttgcatccgcaattcggggtgtagctcagcccggttagagtacgcgtctggggggcccaaaagatttattataaaacatttaacataaaacactaatatagaaagagttaaacaacaaagtttagctcttttttctttttcatctacaactatcctaaaactttcattacaatttaatgcaaatagatgcaaatcaatcatcaacatattcatttttttaaaacttattgttattgcctaaagatagaccatagtcctattttagacaacaaatttcgacaacatctattcaatgtatcagtaatgtcacctctttcattattcattcactatttttttaaacaacttatctcttaatttagccttctaatatcttttctatcccaataagtaaagtgagtcagcctttgctttttctataatttcgtccataaattattgttcaatatttatatttgttgtatctttaggctgtgatagagagtcgggagagaaagttgataacgtcacacccttctctaaagaatattgcaagggactactgctattcacctctttcttaaaagcagtttcttcggaaactacttttcttaatttatcttcttcttttcgagaagcatcataagacgttaacacccaaagtttatttctaaaattatcgttttcatcataaaaacaagcacagaccattccaataccaatatcattctcctataaacattttccatctatcccttaaacgccatatcatctttaacaaaatagaaatctctatataacaaaaaatgctacttgataagacatcaaatagcatttatacttttcacaatatatcaaattcattcctttttttcatccgtttccgaatttaagctgtttaaaattagtcttacagactctgtttttaacttctctacttcttctttagaaggttcactaacaactattgatattgattctccatcttcttcccatctaggatgtataaaccattcgcgcctagcatctataaattccttaacaattcttcgcaaatcatcatccaataaagaaagaaccttgctgcgtattccatagggaattctatatctataaaaagcttctgcaatccctcctgttatacaagccagtgtatcactgtcaccacccaatgaaacagccaaccttatggcatcctcaaaactccgactctctaaaaaagcaataagagcttcgggaactgtaccttgacagctttcatcaaatttataatcacaacgaatatcatcgcaacagcgattcaaatcatagccaaaattatctgtgataaaactgcggatatattcttttgatttaccttttcttgccaaataaatagccgatgccgtagcctgagctcctttgattccttcagggtgattatgagtaaccacagctgtctcttccgccacgtttattgtttcttccaaagaatcaaaataccatcccacaggactaacacgcattgccgaaccatttccccaactattataaggcttaggattcttttcatgcagccatttgtcgaaacgagcaccatatccacccataggaaaaggatatttagaaccataatactgcatcactctcaccaaatcacctccatgaagcaaccaatcagccacagctatcgtcataatcgaatcatcagtatagaaagattctttactgaataaaggaaaatctttcgtctttatattattaaactcatatacagagcctataatatcacctgcaagtgagcctatcatattaataaaaaatcaattcataaacatttttactcaaaaaacataatattctacaatacaaatatgatagatttttatataaaactgtcaaactttgttttcccacatttttctttccaaaaaatcattcttctcttgttcatccgtttttcctaaacaatgtaacaaaattatacccaaaacaggagtgaacagaatactaaaaaaaacccaagccccattctctctaccaagccgtacagtcaacttagaagcacatcctattaaaacaatatataccacaaatatagctatactataaagtgttcctaataaactcaagatctccataaattctacatttaaaattatccctcatcattttttttctgtagaaagttcaccattttctacaaatgtacccaaaatttcccacttattctgatattctataatatctttcttgaatatatcaataggaccaccattaaattcctttcttctctcaacaacaatatggctaggaacaatataaaaatcaggatgaacagataaatcactaaacttattattataaattacaaaaacataataatgattatccttatccactgcattccctacaggaatagcattccccttacgtacagacttcacatcaacagaaatccaacttccgtcatccttagtaatccttatgtcaatactcttttcattacccaaagtcaaatatgcttttgcacccaaacgatacaacatagacaaaaccaaatgctcactcgcaattccagtctgataaccactactcttcttttccataatcaatatatttgtatactattatttactaaaaccagtattaaacacgctgtttatcgctgattcattccattaatatacaaatatatttaataaattattcctatcaaaacatttattacataattttttctaagtaaaagaaataggaaaaggaaacaccaagtttttttctaatgaacattgatagaaaatctcacaagcattaaattaaactactgaaaagcctgtttaattacgttttattccatttcctacaaaaaagtgattatttacctatcttgcgtctgtttctttgttaaaactacattttaaacccttaaagaacgatcagccattctattcaataagtcccaacgatatggagaaacgttttccacagactttttcatttcctcataaaaaacactcaccttattagtcaattcatctataatagaaataaagttttccttatccagtagtaatttctctgcttctttcataacctcctttatatcatatttatttttactattgatttttccttgtgcaaattccctatccaaaacttcatatagattaaattgatccattactaaagcaacacaagaacgctgaaactctttcttgccaccaaacctgagtaaatcaacttccgatacaaatcctttctgtataatcatgtagccatcataccatttttgcaatacccgcaaatagaaaacaggactatacaagtcagcccctcttactacaccgccaaaaatcgatgtaacttttttgaaacgaaactcatatcgcagcacgtttattttttttaaacattctaaattctcaacctccctattctttttcatctccgtctttttatcataaaagcaaagctgcgaatcatacttgtcaaaatacaaagtttcttgttttatattagaacgaaaataaccatcgctatgaagcagacaatcccaatatacccaaggaacattaaccatagaaaaacagataccaatatcaatcctattgattacagcctgtcgcataggaacattcaactcattactcaatttatttatcgattttctgacatcccatacagacaaacactctgcataattataacccttgaaatatttaagcaaactaccttgcactatcaaagtagtatttcgcacttcaatcttcatattcttcaaaaaacctaccactctatttgaagaagtagactttatcgatatcctacacggaatctcttctaaaaagcaaattgcattatccaattcactttcttttattacaaattttattgtatcatacataaaagtatcctcttcctttattattaatataataatattatttcacttattattataaactcaatcctgagattccaaaaactcatcaatagtccctatacgatggcgcaacatccaatttagaatctcagaacgtctaaaacgcaggaaggaccttttgttcagagtggatttataaaaaggaatttcgtgattagaagtctttttataaatcgtgctgcgagaaagacttgttattttacagacttcgtctataccaataatatcagacactatcatgatgctttctgaaacacctgaatttattctcatgcctttttccttacttgattctgctgtagaaacagctttttttctttttatcatatcttttttttaaaattatgatgcaaagaaagggcactacaattaatttttcaaattcattttgcgacacaaagcaaaaacaaaatcgatatatacatctgaatatcaaatatatatatcgatttaaaaaagcgcatttaattcaaggaagttattttaagacagtatacgagctatttccctccgataatcatcataagccgtggctctatgatggctggctattttcaaatcaccaccatctttatccgcaaaaaacaagttaaccaatgaagcagaaaattgtttagtcaactcttcgacagcaactctcaatagagcctttgcacctgttctagaggtattcacttttattttatgcgttacatcagaagcttcagatttaaatatcttaaaaaaattactgaattcatctttgttacaaaacagagatttagaacaaagatattcataaacaagtttcaattgctcctccgaataacaggaatacatgggagaattgccggttcgtttaagacaatcctttaataaacatgagtaattatgaagatttatattttccaaatataacaaatcaatcaatagatgcgcggcataattccaatcctgctgaatacgtattccaattccactctccttttcatatcccagcgaatttatcttattacggatatcgtctaaagtgacagacaacttgttcaaggcataataacctctcctaaaagcctctatattatcaccctcatttattatgccgtatttttcatattgattttcaataagttcatttatccgaaaatattctttttcaagcgaagacttatcatagccgacaacattacggatgtgtttctccaattcggcagcatcaataatatctttagtcatcatcaatttcgcgataaaattttcatattttttctttctcataattttaattctttattattatataatgatttcaatgtaactttctctatttcagcatctccaaaactatccaaataagtgtttgtcgtgctcaagtccttatgccccatcacctgaccaatcatttcacggggaacgccactgctctgtaaagtcattgccatagagtgcctgctgacgtaacttgttaatttctcttgaaaacacaattcttctcctatttctctcagtctctcattatacctgcccaatctgctgcgaagatgattgtacagcttctcaccgacataatccttggaaacaaaaggcaacaaataatcacttaccaacaaggtattatctcgaaaccactgaagcagcaggcacaattcatttgtcaaagggattctgatgaatctcgcgtttttactatgctccgtcttatgacgcttatagacaaggtattttcctcctccttccgattttatattatcacgcttcaaatatgccatatcaatgaagctcattccataacaaaaataggaaaacaggaaaagccgccttgccacttctctaggcttattcgcaaacacagtattcatcagcttgtccaagtactcctgtgaaagataccttttacgggtttcttcctccaaagcagagatacagaaaccgtctttcccgaaaggataagaattacctgaatattcctttgttttgatggcacggttcaatatagcactcaaggttttcatatcatgtttacgggtattaccgctccatcctctcttctccatgaattgattataggaattcacatactttatatctatctcctgaaaacagagcacatgaagtttcttatcaaacagcttcagattataaaggagcctctcccacacgtgtgcattacctatatgtcctgtggctttcatctcctctatgcagagaactgcaaaatcaagaaacttaccctgcttactcttatataaaaaagcatcagcaaactgattcaaagtccagtctattttatcatgctcaaaatcaagttcaacattctgaacacgtgccaataattggactaatcgcgcattatactccttgtaattaggacagacacgcttgtcacaacggaaacgctcacttttttcgtcccattcttctttcttgccataaagacctaaagagatatacttatgcttcatgttttttgttatccgcaacgagacaggataacttccattctttcttttatttgccgaatgaagcaataatttgaatgttgccatatcaaactaattataaattaataaatcaagtgcaaaaataaaaagaccacagtacaaacatcttataaatgattcataaaaaaaaagttaaaaagaatagcaactccacgaattccaaaaactttcatttctctaacatattcctaaaactttagaaataacttaatgcaaataaaggaaatctaataccattacagccatcaactattccactgagcaacagaagcttataaataaagccaattaaaaaacgttttttttgagcaaaaaagcgcctgaaaattttgcaaattccccgtaaatacgtacttttgcacccgttaaacaaaacaacggggtgtagctcagcccggttagagtacgcgtctgggggaattgaataagattaccgataataaaattacaacaatatagaaatcaaggagttaagctaacacttaactccttattttttacctgcgaatatcctacgaataaggttttcgggaaacttggtttatttaatccgattattgccttttgtcatgtggattttgcattattgcataacaattcttacaagcattctttgatgactctattagtgtattaccacatatatccaataaatatc

SEQ ID NO: 3939 - DNA, 41321 bp, Unknown
  gut microbiota DNA sequence
tattatcatcaaccttgctttttctttctgcgtttactttaaattggttttataaatgaacatttcgggtggcggaatggttttaatacatcagttaataaatcattaaaatgaagcgtatgaaacgtaaactttggataagaataggtgccgtgttgttggcaggattgctgttatggtggctcttttgggctattttgatcgatgaggacgagaatgaacaaagtctgcctgaaacagaacagatagagtgatttgtcataagacaaaaggatgatcttcaggcatgggtacgaaagaatagattggaatagtcggtataacattctgtttgctaaagtctatagaacaatagaattagttctaagtttatggcaggaaaatttgttttggctttctttttttgttcttttgttcttctgtctgaaaattaatatccattttgcatctgtcttctcagaaataatcagtatattcgcttcattaaccaattagacatgattgaatatgaaaacaatgaattattctataatcagatgtatctgtgcattggtcatcggtgtgttgctggtggcatggcctgaggctgccattctttatctggttattacaatcggtgtgttgtttctagtaccgggactcttttctttatccgggtatttgattcgtggcaagcaggatggcagtcgttttcctattgccgggcttggcagccttttgttcggattatggctgatgattatgccggcattttttgtcggtatcctgatgtatgtgctgggtgctgttttggtactggcgggaatcagtcagattgtgaatttatctgctacgcgtagttggacggtggtaccgggaggtttctttgtgatacctgtgttggtgctgattgcaggtattgtggtattatttaatccatttacggctgctgctgttccattcatcattctgggagtgagcagcattgtatacggactgtccgatttgataaacatcatccgcttccgtcagaagaaagaaccggggatgcctgaaatagaggatattactcctatagaagagataaaagactaatccgattgatatgaaaacacgaggaagctatattttatatcttttgattttatgtgtggttgtaggttgtaagggaacttcttcaccttccaccgcgtccgaaacggatgagtatgccggaacatgtgagggggaaaaagcgaaagctattttgtgggtggattataaaagaggacgtaagataacggacgggactccgataagaacggtaaaggtttatgcggatgttcatgccgatggaagtctgaaagtgctttcctggtgtaaaaagcagccgatgaaggtagaaaattacttattgaaaagagtggaagtttaccggatcaggaaagaaatattcgaagggggatatctgaaaccgggggaacagtatttgcagttacgctatctgccgggagaggtgaaataatatgttgtaggaagcattgaaattcgtaggaaaaggtttttgtttcttttatattccttatctttgtgtaacacaaattgttagaaatatgaagaaacaaatcttattgtcttgtgcacttgcctgggctgtgatggcaggtgctgaaacgattgacattactactttccgttatgccggaccctacgttgtacaggctccttttcaggtggacagcgtggatgtgaattcaaagacttttgtatccggacgtctgttggatactcatctttctgtggacgtattgcaacagggaactttatttacaggcggggttttgccgggaagtgactcgggatatgccttgcacatgatgggttttgtgttggagaatactcgttatgccacagccaagctgaagattgacgggctgaaaagataccagctttatgtagatggaaagaagcaggaaggaactgaactcgctttggagccggccacccattctgtagttattaaatatctttctgaagcagggaaaacagattccttgaaagtgagtgtggatacggatcaagagggaagcatttcacttaagcaagataacaaaaagctatatactttggcggatgtgttgcatggaactcgttttgccggagtagggctttcccctgatggcagatatttgattgccaattatcgtacgacttatgtaggtggtcggtcggccggtagtacgcgcattactgaacttgccagcggtaaggttttggcggagcgtactgagaatatgcaatggatgcctcgttctaaccgctattattatacccgtacaggggtggatggcagacagctgatagttgtggatccgcttaccggaatggaaactgtgttggtgaataaattacctgacgggtatttccagttcgcacctacggaagactacctgcttttcaccatgacccaggaaggtccgaaagaacgtaaagaaatttatgaggttctggaaccggatgaccgccagccgggatggcgtaaccgttcttatctggctaagtatgatttgaagaccggtttgttgcagccactgactttcggttatcacaatgtctgggctgccgatatttccaatgacggccggtatcttttgatgatgaccagtcagagccgtctgaccaagcgtcctactactttattctcactatatcggttggatatgcagactttacaggcggaactgctgatagataaagatggttttatcagtggagcccgtttttcacctgacggaacgcaggtattggtatccggctcgcctgaatcgctgggtggaatagggaaaaatgtaaaggaggggcagactccgagtatgacggacggtcagctttatttgctgaatatagctgataagagagtcactccgctgacgaaagattttaatcccagcgtacagcgtgccgtgtggaataaggtcgacgggcaagtctatttcacggccgagaaccgtgactgttacagtttgtaccggatgaatcccgctgatgggaaaattcagcaactggaggtttcagaagatttggtcaactcattctcattggcgcaaaatgctccggttatggcctattatggacagagcgcctcaaattccgaccgtttatacaccatgaataccaaaaagatgaaatcatctttgttggaagacttaagtaaagacatattgaaagatgtggagctgggcgaatgcaaggcctggagttttaccaattctcgtggtgataccatttatggtcgttattacctgccgcctcattttgacgccaaccggaaatatcctatgattgtgaattattatggtgggtgcagtccggtcagccgtaatttcgaaagccgttatccgcatcatgcatacgcggcattgggctatgtggtgtatgtgatagaacctagcggtgctaccggtttcggacaggaattttctgcccgccacgtcaatacagctggggaaggggtggcacaggatatcatagaaggtacaaagcagttttgtaaagaacatgcttttgtcaatgacaagaaaataggctgtataggtgcatcctatggcggcttcatgacacaatacttgcaaacacagaccgatatttttgcagcggccatctctcatgccggtatcagtgatcataccagttattggggggaaggatattggggatattcgtacagtgaagtttccatggcgaatagttatccgtggagcaatcctgatctttttgtaaaacaaagcccgttgttcaatgcggacaagatacatacgcctttgctgttcttgcacggtgatgcggatgtgaatgtaccggtgggagagagtattcagatgtttacagcactgaagttactggggcgcgaaacggcttttgtggctgtaacgggacaagatcatcatattgtagattatggcaagaggattcagtggcagaatacgatctttgcctggtttgccaaatggttgcaggatgatgcgacttggtggaacgctatttataagccgaaaaacttataacttttatataggtgtaagagactttggaatgttagtattgttagtatgtataagcttatatgttagtatgtgtaggcttatacgtactaacgtctgaccttacacatactaacgtgggctgagtctgttttcactatccgttttccctatactgtttcggtgacattcctgtatatcttttaaagtatttcccaaagaatgagatgtctgggaaattaagtgaataggctatttcctgaatggtaaagtctgtggattttagtttggcttccgcatctgttatcactagtttggcgatgatatctgtaacagtttttcccgtaatcttattgacagtagtgctgaggtgctgaggggatatatgaagcaggtcggcataaaaagctacactccgttctttcgtataatgtttgatgatatattggaccaggcgtttcacaatttcttctccacggttgaaagtacgtgtggttacattggtgttctgatgaatgctgcctacaccgtgcaatatagtgagcagcatggtgctgattaactctttattgggcttggctcccatacgtttcatttttatcagcaaccggaaatagtcttgaaacaactcggttatttcgggacgcagagggataatgggtgtgtcaatcagggctgaaagatagttcatggtggaattgaagagatttattccgttcagcaactctttgttgaatcctatcaagtacagacgacagtcgggactttgccggtgaacatgtacaaaggtttctggcagaatagtgacaatgtcgttcttttgtatcttgtgttcagacagatggatcgttatgtcacattcacctcgcaggcacagaaggaacaagcatccttccattcgttgcgggtagtggtaaatacggcctaatgatcctgtcatgtcaatttctgcaacgaaatccttattcgatttaaataagttaatgtcatctatatacttcataaaaataaagaaggttttgattatgcaccacaaatatagggcagttagagcagataacaaagaaaatgcttaaaaatagactaatatatcttactgttagcacttgtacgcttttaataattataagaactttgcagcgaaactaatagtgaagataaacagtatgaaaggtaaaaatttgtctattatggcaatgattgcggcagtgttctgttcttgcggacagcaacctgcacaagaacgcggtcctcggcccgtgaaattggcggaagtgacctcgttaagcaggatcgaaaaatcgtattcaggtgttgtgtcgcctgatcagttcagtgacttggcatttaaaatgtccggtccgttggtagcaatgaatgtactcgaaggacaacgggtgaagaaaggacaggtagtggccgaaattgatccgacagattacaaactggattatgacgctaagagggcttcattccaaaaggcgtcatcacaaatgcaacgcgcagagaaactgttggccaagaatgctatttccatgcaagagttcgaaacgacccaagcttcgtataccaatgccaaatcggcatttgaaaatgcgcaaaacacattgaatgacaccaaactacgcgctccatttgatggctttatccaaaaaaaatatgttgaaaactatcagcgtgtacagccaggacaaggagtggtgtgtttgattaatccggctaaattgcaagtggagttcactatccccgaaacgaatatttcttatgtaacttctccttctactatttacgtagaatttgatgcctataaaggaaaattatttcaggcaaaagtaaaggagtatgtagaggcttctcccgatggggcaggagttcctgtattcctttacattgatgatccggaatttgatttgaaaaaatataaggtatcggtgggcttttcttgccgtgttattgtcaatattgagaatgatgtggtaaaagaaggaattacagtgcctttgtccgctgtagtgtttgataataacttgaatagcaagatcgtatttatatataatccgtctacacagaaagtagaactgcgtaaagtcagtgatgagggaattattgtaggacgtaacgacctgatagtatccggaaatattgaaccgggcgaacaggttgtgtctgccggagcgtcttatctggtagatggccagcaagtaaaaatattaacagaataaaaaaggagagagcatatcatgaatattccaaaatattctttggagaaccggaaggttatctatttctttttggctattttgttgataggcggagtaatctccttcttcaagctgcctaagaaagaagatgcgccttttgtgataaagactgcggtattggttacccagtatccgggagcgaatccacatgaagtggagaaactgattacggaaccgattgaacgtgaaattcagtccatgacagatgtatatcagattaaatcggaatcttatttcggactgtctaagatttctattgaacttcagcctacgattgatccggattatatgcctgtaaaatgggacgaattacgtcgtaaagtggcgaatatacaacctaagttgcccagtggggcgtctaccattactgtaaatgatgactttggtgatgtgtatggtatttattatgctttgacagctgatgagggcttctcgtataccgatttgcgtgactgggcacagcgtatccgtactcagctgaccccgattgagggagtacagaaagtaatgttatacggagagcagaccgaagtgatcaatgtcaagatatctacctccaaactttcggcattgggtattgatcccacttcgattatgggcatcttgcagaagcagaatatacaggtgaatacaggagatatagcgacagaaatttatcagttgcgcttgcgtacggaagggacttataccagtctggaagatatagaaaaccagttgattatcagcaaggacggacgggaagtccgtttgggggatattgcaacagtggagcgtggatactatgatccgccttcaaccttgatgcgggtcaatggtaaacgtgctatcggtataggtgtggccagtggagcaaaggataatgtggtggctgtgggtaaagcagtggacgaaaggttggcggaaatagagcaattgttgcctatcggcattgaactgacctcgctttatcctgaggacaagattgctgatgaggcgaataatggctttatcctgaatttgatagaatcattggttattgttatcctgattatctttgtggtgatgggatcgcgtgccggtatgctgataggtagttccttacttttctcggtaggtggtactttgcttattatgttgatgtggggggtaggattgaaccgtacttccttggcggcatttattatcgccatggggatgctggtggacaatgccattgtggtaacagataatgcgcagataggtatcaagcgcggaaaatcacgttatcagtcattgatagagggagccatcaagccgcaatgggcattgctgggcgctacttttattgctatctgctctttcctgcctttgtatctggcaccggcatccgtggctgagattgtgaaaccgctatttgttgtattggctgtatcactgggattgagctggattctggctttgtgccagactacgacttttggtaattttattttgaaagaagctgttcccggcggtgcaatgaaagacccgtatgatactaaactctatcataaattcgagaagtttctgaccttgctgattaaacgccgttttgtgacattgaccacggtttttgtaactttggtgctttctttggttattatggctgttatgcctcagagttttttcccgaaaatgaataagccttatttccgtgctgatctggtattccctgagggatttagtattcatgcggtagatcaggatgtgatgaaggtggaggattacttgaagaatcatgagaaagttaaatcatattcggtgacattgggtggtactccgttgcgttactatttggcaagttcttcttttggaccgaagtctaactatgccaatgtgatggtggaaactaaagaccccgaagatgcagccgaagtagaacagcagttttatgagcacatgactcagaactttcccaatatcattacccgttcggcactttttgctttgtctccggtgcctgaagctgctattgagatcggttttatcggtgaaaaccccgatacattgaccgcattggttgaaagggcgaaaaaaatagcccgccagtgtgatatggtgacggatatccgttccaactggggagataaggtgcccgtgtggaaaccgatgttctctcaacagaaaggtttacgcttggggattacccgtcagcaggttgccaactcattccgtacggctaccaatggtttgcctttgggagaatatcgtgagggggatgtttccttgcctatcctgctgaaagatgaggatgtggaaaaaatgaacttgaatgatgtgaaaagtgtgcctgtattcagtacgaaaggaaattccgtgaaagtggaacaggtaatcgataatttcgctttgggttatgattataatgtagtccgtcgctttaaccgcgagcgttgtatgatgatgcaatgtgaacctaaacgtggagccaatacgatggctgcgtttaaacaggtgcttactgccgtacaagagcagatgcagttgcccgaagggtataaaatgaaatatttcggtgagcaggaaacacaggatgtaagtaatgctgcattggcgaagaatattccgctgactttcctgttgatttatgtggttctgctgtttcttttccccagcaactaccgcaagccggtattgattatgcttatgttgccgctggtgtttatcggtgtggtatggggattgctcttgtttggcaagtcattggacttctttgccatcctcggtctgttgggattgattggtatgaatatcaagaatgccattgtgctggtcgatgaaatcggacttcagttgaaggatggaaagggggctgtgcctgccgtggtcgaggctaccaagacacgtatcgttccggtgaccatggcttccggaactactattctgggtatgcttccattgttgggcgatgccatgtttgcaggtatggcggctaccattatgggtggtttgttcgtatcgacggtactgaccatttttgttcttccggtaacttattgtattttctttaaaatcagagcagacagataatgaaaactaagatgatctatattataggtatggcttgtatgaccggtacactttcggctcagactgtcgtggattattctacctttgaacaaaaggtactggattatagccaaaccttaaaacagagtgtggcacaacgtacagctatgcagaaggctatgaaagcggcaaaaaccgctttcttcccggctgttgatgcaacgggaagctatcagtatcgtattaacaaatacgagatggatcttggcggaatggctgttcctatggagcacgattcatacagtgccgaagtaggggtatcacaacctatttatgccggtggaagcatctatcacaattacaaggcttcccaaatacaaacccagatggcggataagtcggtggatttgacaacggataatattatctatgctgctgaagccagttattggggaacagccgcacaaaaagaaatgtatgaaacgatgtgccagtatgtgcagattattgagcagttgaccaaagtgctgcaagacaagtacgatgatggctatatcagcaagacggatctcattcagatgcagacccgtttgaaagaggctgaattgcaacgttccagcagctaccagtcttatcaggtcgccttgcagaatatgaatgtgctgatgggattggaaccgctggctgaaatggatttgacggattctatttctaccatattgcctatgcctgcttttattggagcggaaacagccttgaatgtgcgtcccgattatgctatctcacagttggatgtggattatcagaaaagacaggtaagtctggctgccgccaagtacaatccttctctttctatcggttttaaagagacatggggaacacagatgttgaacatttcgggcgaaactatgtttaatagtaatgtgtatgcctctattaaattgccgattttccattggggagcccgctttaaatcgacggctgcacagaaggctattttattaagcaagcagtatgcattgcaagataagcaagaccaaataagcaaagaagtggcgaaggcgtggactagtctgaccgagaatacccgtcagataagtattgccgaggagaactgcaaactggcagaagagaatttggatttgaacacttttagttatactgaaggtaagttgactattttggatgtgctttctgcacagctgacatggatacaggcatatacaaaccttatccaatcttattatgagcagaagattgcgttggctgattacagaaaagcaaccggtataaggtatttaggacagaaataggtaaattcagaccagattcttattatataaaaaagtcacaataaagcaggtttggctatctttgtatccagacctgctttatttgtttttattcagtttatgtttactgtaaagcttgttttaacagtggaaaaaagaatagattacaatgaagaaaatatcattttggatcgtaatctttatatgtatggcagatgcggctttggcagtcacgcaagagggtgggctgttttatttgcctgaagatacgacaatgcaacacaaagacagcacagtacagaaaaggacttttttcaaaaagtttctggactattttaatgatgctaataaagataagaatcataagaaatttgatttcagtattattggcggaccacattacagtacggataccaaactggggctgggactggtggcggcggggctttatcgtaccgatagaaatgacatgcttcttcctccgtccaatgtgtctttattcggagatgtttccactgttggcttctatatgttggggatacgcggaactcatatctttccgcaggacaaataccggctggattatactctttatttttattcctttccttccaagttttggggaatagggtacgatatgggtaaggtagatgccaatgaatctgatttagatcgctggcaagcacaagttaaagctagtttcctgtttcggatagcggataatctatatataggtcctatggtatcttatgattatgtgcatggtaagaatatggaacgccccgaactactggaggggatgaatcttactactgctaattatggagtgggcctttctttggcatatgattcgcgcgatgtgttgaccaatccccataagggatattatttgaatattacccagtgtttccgtcctaagtttttaggaaacgattatgcattcagtactacggatttgcgtaccagttattatcatcctgtatggaaaggaggattgttggcaggagaattacgcggtacttttaatttcggtaatccgtcatgggccatgatggcgttgttgggaaactcgtattccatgcgtggttattacgaagggcgctatcgtgacaagcataaaatagaggggcaggtggaattgcgtcagcatgtatggaaacgtaatggtgttgtagtttggataggggccggaactgtattcaataagttcagtgctttgtgcatggacagagtgttgcctaattatggaataggttatcgttgggagtttaaaaagaatgtaaatgttcgtctggactatggatttggaaaaaatggacagtctggttttatctttaatataaatgaagcattttaaagaatttattcagtggtgttgtgagccacaacggttgttcgttctgttcatcgttgtcttggccattcccaatgtggcattgttttttacagaacagcaaatgacactttgggcacgtatttgtaatgtcattctgccggtatcggtttattggttgattatgacattggggcgtaaacctggaaagactatttggatcttatttccgtttgttttctttgcggcattccaactggtattgctatacctgttcgggcgttctatcattgcagtagatatgttcctgaatctgacaactactaattccggggaggcgctggaactgttggataatttactgccggctgtaattggtgtttttgttgtttacattcctgctttggtcttgggaggtttttcatgggcccggggtaatcagttggaatattcttttattcgttctcaacgtaagtatgccttggcaggcattgttgcaggagcgttattgaccgttatctgctatgcgacgcaacgtgattatcaagtaaagatcgaaatgtatccggctaatgtatgttataatctagtattggctgcagaacgtgcgggcgaaacagccggatatgcggaaacttcaagggattttacttttaatgccagtgccgcacatgatgaaaacagccgggaagtttatgtcttggtgataggggaaacggcccgtgcctgtaatttcggactttatggttatgaaaggaatactactccattacttgataaaatggagggggtggtaactttcacggatgtgcttacccaatctaatactactcataaaagtgtgcctatgttgctttcggcagcttcggctgaggattatgactgtctttatagacagaaaggaatcattaccgctttcaaggaagcaggatttcatactgcctttttttcgaaccagcttcctaaccattcttttattgattttttggggatggaggcagatgattggaagtttatcaagaaagatgctccgaaaggagccaatatttcggatgacgaactattgtttctggtagaaaaggagctaaaggcaggtcatcaaaaattattcatcgtgctgcatgcctatggatcacattttaattataaagaacgttatcccgaatccatgtctgtctttaaaccggataatctgacagacgccaaatatgagaataaagagtatttgatgaatgcatatgataataccatccgttatacagatggtttcctggcttctttgatcactttattgcagaaaacaaactctttttcggctatgctttatacttcggatcatggagaggatatttttgatgataatcgaaaattatttttacatgcatccccagtcccgtcttattatcaactgcatgtgccatttttaatttggttgtccaaaacatatagagaaaagaatgtggaagtacatgaagctatattgcagaaccgtgaaaaaccggtggcgggaaatgcctccgtgtttcataccatgctgaatttggcaggggtacagacaccttatagggcagatagcctatcggtagcaaacagacaatatctcattcgtccgcgttattatcttaatgaccataatcttcctaagtcattggataagataggattaaaaaaggaagacatagaacagttcagacggaataatcttgtttttccttgatgtgaaaaagatttaaaatggttggagaattataatagaattacgtattaatgattattttcgcacagctttgttattgtatttattacgaaaactattataattcttttattatgaaaaacaagaaaaacaatttctatctgatgggagtggtgtttatagccattctcggcggtttacttttcggttatgatacagctgttatttcgggggcggagcaggctctgcaaaaacatttgggattagatgctttctggcatggcgtgactgcttccagtgcattgataggttgcgtcattggcagtgctttttccggttattttgcttcggggctaggacgtcgtaattcgttgcgtctggctgctttattgttcttcctgtctgctttaggctcttattatcccgaatttttatttttctcgaaaggagatacttcgtttgcattgatccttgcttttaacttttatcgtatcatcgggggaatcggtgtaggacttgcctctgctgtttgtccgatgtacattgccgaaattgccccttccgaaattcgtggtaaattggtttcctgtaatcagtttgctattatttttggcatgttggtagtctattttgtcaattatatgattaaagatggtatgccggatgaagtgcttgtttccgatggttggagatatatgtttggttcagaagcggttccggctgcattatttggcattttattgtttttggttcctgaaactccgcgctatttggctatgacccatcaggatgataaagcgttttctgtacttgaaaaagtaaatggaacagataaggctaaaactattttgtctgaaataaaggctgtaacttccgagaaaacggaaaaactgcttacatacgggctgacagttattgtagtcggcatcttgctttctgtatttcagcaagctatcggcattaatgctgtgctttattatgcaccgcgtatttttgaaaaaatcggtggcggtggcgatggtatgatgcagactgtggtaatgggggtagttaatattctctttacattgattgccatctttaccgtagagaagatgggacgtaaacccttgttgattgttggttctattggcatggctgtaggtgcattctgtgttgcgttttgtgatgagtttcaggtggaaggtattcttcctgttctttccatcatagtttatgctgcattctttatgatgtcatggggacctatctgctgggtgttgattgcagagatatttccgaatactatccgcggtaaggcagtggctatcgctgtagctttccagtggatattcaattatctggtttcttccacttttcctgccatgtatgaattcagtccggtatttgcctatgggctttatggcgtgatttgtgtgcttgcagctctgtttgtgtggaagatggttcctgaaacaaaaggaaagactttggaagatatgactcgtctttggaaagaaagagcaagataagttggtgcgatgccggaaacggtgtctttcataccggagaatagaaaccatccctttcaacttaacaaatagaaagttggacgcgaaaatgccctcatgccctcactttggctctaactggtttataatgaactgcttattagtgatggtagtatctgtgttagtgagggcattgccctcactaacacagatgcttgaaaataaattattctaactttatcatgtgatataaagtaccttttctgctggcttttgggtgaatgttcagtttgcggataatgtgtctgtattaatttatcttgttgattgacaggtttttcacgcttgtactcttgcaaataattgaaaatcttcatgtgcggtcagcttttctcccttcttctctgtagtggcggaatagaagtgacatttaaacaactgttccaaaggcgaaatttactcaaattcggtgttattttgccaaaataccttctcattttcatcattcaacccataacgttcgttcttataaagcagctgcatggcttgtgcagcgagttggcggtagtctatgtatgcatatttccctgtctcttatctgttttctcccttttattttctcacttttatatgtttgtaattgcttattcactactgtgactaagtttaattacagtagtggttaaagttaactacaatagtgattagacttaattacattcgtgattaacagatattgaacttttaatcgtcaaagaagaacagtatgatacaaactacgacaccgttatttatgccgtttgtgcaaggaagaaaaactgaaaaaacagggggcttaccaaataaccggtttataggcttgtgaatgtatattatattgtgaatgagtgtcttaagagatgagaatgaggaataaggagtgagggtaatgactttacaatgagtgggttatagttggaaatgagggcatgagtgggaacaacttatagagcatcattatgacatatttaagtatgctcagcatagatgccccatacattatcttgctgtaatgtataaaaaagagccgtatcattacttgggagtagagttgatacggctctttttatggctgataaagggtgtcaaagtatcctcggatgaaaagtccttttcctcaaaggttgtgttttgacacctttttctttttatcaggatgggattgttttatttcttttcccctattgttttcagcatttcttgtacggctgcttccaactgctggtcttcacctgccaatgccttttctggagtattataaacttcaatgtctggagaaagttggtgattttccgcatattgtccacgcatatccatacaacccacctgaggaataccgaacacaatactcgggtcgatctggttttcccaccatacggcagtcattgtgcccggaaccggagcaccaatcagtttgcctatctttaattccttgtaaacccatgggaagccatgtgcgttactgtaattgtcctcgcataccaatacgcaggatggcttgagccatttattgaatgggtcgctgcctatgtattgtccgcgtggaacgaaacgctgatattccttgccgcttaataaagtggccaagtcatcatgtagccatccgcctccattgtggcgtgtgtctacaataatagcttctttgttgcggcagcgtcccaatacttcactatatacttcgcggaaactttgactgtccatgccttttacgtgtacatagccgatgcggtcttcggataacttatcgactatattgcggcaacgttctacccaacgtttgtacagcaagttactttgttcgcccatgctgatagctttgatggtgatatcaaaacgtttgccggtagccggattatatatggccagtaacacttttcttccggctttgccttccagcagcgggaagtagtcttgccctttcacgataggtttgccgtcaattttctcgatgatgcaaccgggagtaacatccgtttttttcacggcaaatgggccttttgccaatatttctttaatttttaacccgtcaccatcataagtttcgtcatagaatactcctagggtcgctgtggatagtataggaccgtttgagtagtaacgtgctccggtgtgcgaaccgtttaactcacccagcatttcactcagcatttcctgaaaatcataattgttattgatgtatggaagaaagcgtgcgtatgcttcgtgatagcctttccagtctactccgtgcagatcttttacatagaatttatcttctacttgttgccatacatgatcgaaaatatattcgcgttcaccatagggttggtagtcgaagaaagcttcgaattctacaggtttggtttcaccactgctgacagtgactttcttgataccaccttggctgcaaaggaacagattctcgcctttcttatcaggaagcagggctccgccaccgacttttttcatgacgattttagtcttgttttctttaagatcgtgttcccataaatcatatccgctttcgaaggctgcttgataatatagtttgtcacccttcggagttaatacagcatctcccaatcgtgaagaatttacagtcagacgaatcacacggtcacggctgttttcaaggtcgaaaaccagtggctttacttccttcttgtcatcttctttcttggagtctttctttttatcttttttatgatcggccttctccttctcttcactcttctctttgtctttcttttccgagtcttccagtaaggcaagctcttccttgctcattctgaaacggtcgtatgcgtccaggtcgaagaacatgatatagatatccgcttcagcaccccagcttccgtgactgcggaatcctgcgcggtcactttcccaaatcatggcttttccatccaatacccatttggcattgccgtcactgtatccactttcggtcagattatgaatttctccgttaccagatgcgttgaccagtgcaacatccttgttattccatccgccaatacctatgtagttggtaagaatccatttgctgtccggactccattgataccattggtcgccgtcactataagaatattcgtacttgccgtccatgacggtgcgtacagcttttgatttcagattcagaacacggatggtagtacggttttcaagaaaggctacttctttaccgtcaggactgtattgaggttggaatgaagtgatatccgaattggtcagtctttcctctttgatatcggttgcgtaagcgaactgtttttcttcctttttagctagactggtttgataaatctgccataatccgtttctttcggcagcgtaaacaatacttcttccgtccggagaaaagtgaatatcgcgttcctgttgcggagtattggtgatttgtttagtagtgctgtattctgttgatgtgacatatacatctccgcgtagtacaaaagcaatttcctttgcatcggacgaaagggatatctctgttgctccgctacgcttgatctggcggatgagatctttgtcgttcttgtcggtgacaatggaaatctgaactttttgcggaatggcaccttcttttaccgtgtagatttcgccatcatatccatagcataatgttccattggaggcggcactcaggaagcgtaccggatgtttggtatggttggtaatttgtttggatgtattaccgtcaatatcacgtttgaaaatattaaatgagcctttttcctcacttaaataatagaatgatttatcatctgaagcccaaacgggagtgcggtcctcaccattgaaagcagtttgtttgcgaaaggtacggtttccattcagagaacacagccaaatatcgcgggtaatggatgaagtgtgatgtttacgccaagggtcttcatatccttttttgtcatggtagagtaaagtattgcctgtatgattgatactgatatcttccatcggcatggaagagaagaggatggggcgtccgccttcggtattgacttcatatacttgttggaattgtccggaggggaattgtgcgtcttctgctgttggcattatattggctagaaacagaatgtgtccggcatctttataagccaccggtgtttcattacccgaatgggtagttaatcttttggggatacccccttccttgtttacctcaaaaatatccatacttcccattcggtctgatgcgaaagcaattttttttccgtcagggctccagatgggtttggtgtcgtgggcagggttggttgtaatctgactggccctgccgcctgtagagggtactgtgtagatgtcacctttataggtgaatgcgatggtggttccatccggagaaatggcacaataacgcatccataatggattgtcctgtgcatacgtggaaattgacaacaaaattgccgccacacctagtagctgtcttttcatgtggataaaatgttgtggttaatactaagttatttcttttttttcaggaaatatcctctgattctttgcatgatcttgataccggtccgtactccgtcataaacggcgattcctgtattgatatgttgcataatgccttctacgcctcctttgtgttctacaggcgcaaaaagttcatgtatggtttgtaccatttcttttttagcttgctgtacttcttccaacttctcagcttttcgttgtgctatcacttccaaagtgatgatgggcgttttattaggagtattctctttcataatcagttgtcatttaaaagcaagttggcaaggaaatttaccataggctgaacaatcagccgtttgcggaataaaacgattaacagaatcagcagaataatgcatccggtaatgattccataactggccataagcccgcctacatgaggtgcgagtacataggccaatgtaaatgataagtagaaaagggcgataatacctaatatcaataatataaagacaaggatgagggttgatatcagtatagtaagtttttctactaaatgtagttttacataatccttttgtaactctgcgtactttttaagctctgccagaagttgttgcagattatctatatttttatcgtttgcaaacatgcgtggagttttgatttaaaaattattgtcattccggacttgtatccggaatgacaatacacttttgtgggcgttgcttattcttttacctcggctgcaatttcatcgaccagattttccatatctgtgcgacttaatttgatacctcttttacgtaaagcatcagcaattttgctacgagtgtcttctccgctttcaggagcaaataaaataccggctgctgcaccaactacggctccgcctaggaatgcagctaaaatacttaatcctttcatagttttttgttttttgtaccttacaaatctaacaaataaaactgaatgttgttgtttattttgtctatttttgaatagaaattggagattcttctctgattaactaaatttaactccgttcttgctgtgaaagctgttgatatattgctacttttgcaccaatataatggaattaaactagagtattaatttataaaagattgagtaatcatgaaaaaattagttgtgttgggtatgggattgtgcgtagccttggcattttcctcatgtaaatctagcgaaagtgcttacaagaaggcttatgaaaaggcaaaacaacaggaattggctgaagctcctgccgatcaggtagaagcgactccggttgaagctgctccggtagtatctgcccccgtgacaactgctcctgttgccggtccggttcgcgaagagaaagtagaactggtttcaggtgacggcttaaaagcatatagcgtagtatgtggtagctttggcgtgaaagcgaatgcggaaggtctgaaacaatatttggatggccaaggctataatgccaaagtggtttataatgctgaaagaaatacgtatcgcgttatagcatcttcatacgatgaccgtgcggaggctactcaggcaaaggaggaatttaaggcaaaatatcctaaccgtgacgatttccaaaaggcatggttactatatagagtatattaatgatttctttttggtaaattaagaagaaaatatagtctatttttctttattaaaagcggcaactgtgaagttgccgcttttttttatagctttgccggttctaaacaacaataaaaactaagggtatgaaatattatggcagattatcggtcgctgctcttttggctatagcaccgctgtatggctttgcccaggaaaaggtggtacctataaaatacggagatatggatcagtggataatccgtaaggttcatgagtccggtgttataggcggcaataccaaacttctttatgagataggccctacaaaggaaatagatggtaacaaaccttataagaatatgggagggtctccttggggaacctctaatgtgatggctaaggtagtgggcattgttaaaacaaataattctgtttacagggacaaacgggacaatggatattgtgctcgtctggaaacgcatatagagagcgtcaaggtattgggaatggtgaatattactgtattggcagccggatccatttatttgggtgatatgttggagccgataacaggaaccaagaatgctgagaagaatatgaattggggagttccttttacccaacgtcccaaagctgtccgttatgattataaggtaaagatgtctggtgagaaagatcgtatccggttgacaggcttcagcaagaaaggtcaggtggcagggcaggattgtgcgataactgttttctttttgcaaaaacgtatggaggacgctgaaggaaatattactgcgaagagggtaggaactatggtggtgaagtatgataaggactcggatggttgggtgaatggtgctacttatgaagtgctgtatggtgatataaccaagcatccgtcttatgatcatgaaacgatggggttgagagagcgagattatactagaaatagtaagggagaaagtgtcttgattaaagaaacaggatgggcggaggccaatgagaatcctacccacatgatactgcaattttcgtccagtcatgggggagcttttatcggctctcccggaaatacgctttgggttgacaatgtgaagctggtctattgaagataagtaaatgcttttgtttgtgtaatgttgcaggtgcaagatatatatcttgcacctgcaacattatatgccctttgtttatatatcctgggagtattttaaaaaagctttttgtttgtgatatagcccggtatcttgttacaagattcggtaaatgctgcctctggtttccggaattgtatagccaagattcgtagattcttgttatacggtttgtttgctgttgctgcttatgtgataaaatgcagttgaagaaaaaaagagggagcatcgtttgttacgatacccccttctttaatttatcagagttttatcaggtagcaatgattattttacttccagaataactacgcggttcagatagttcttgccaaacatgttgtctgttccacccatagcaactttttcaagttggctttcttttacgccttctgcaaccaatgcatcgtaaacagcctgagcacgtttttcagacaaagtctggttgaatgaagcagatcctgtagctttatcagcgaaacctgcgattttgtacttagcgttaggattagctttgatagctttagccattaactgtacattaaccatgccttccggactgatctttgctttaccgatcttgaagaagatagcaacttctgcagcgctaggaacttctttaatcacttccttgactacttctttcggaacttcacgaaccacttccttgatcacttctttttctactacacggtcttcaactttagcaaacttcttgccaccaaaagtatagcttacacctgctgtgatcatacctgtaccttctgccttacggtgatcgctgatgttaccgaagattgaaggagcgattgcaccacgagcttcaacatcgatagcccatttattgtttaagttaaactttaaacctaaaccggcagaagcgcctatacgagctttagcttttgcttcaccggatgtagaaacaccagttctttcacctgtgttgccatcgtaagtataaacaacatttgcagattttgcaacagataactgaggacctacaaaaccataaacttcaaagaaacggttaggattagcgcctgcaaataaagatgacaagtttaccattgcatcaatattcgctccaacatagttcttgttgtgttcgtgatagccaatttcttgtaaacataaactttgccatattccgttcacttgaccgcgtattccccaagtcggagtaatatatttaccaagcgaaatactgaaattcggagatattctgttaaatccatcgtttgctacagagtgtataccaccacctacgctaataaaaatattatcgctccatttcggagtataataattagtttcttgtgctttaattgttgttgcacatacgcctgccaataataaagacagggttaaaaatttatatttcattatattatgtttttagtgattaaatcaaaatattaactggctattagtctgcaataataataccaccaccggcattgctgtcatctccatgtccatgaccgtggccgtgacttggagcatgtccatgacccggtatttgctcatttttaggagaaactatagtattgtaagaatcgactgtgaagcttgcaacaggatttccatctcttttaggtgatttttcgattatctgataaacagatgttgttttcatatagtccacaaaaacactaaaacgagaatgtgctaatacctgtacatcatttagagtcactttgtcttctcggacacctttattataagcatctataatgttctttatttcgctgtcgtctccctcataatcgttctttataacttcactaccttcttttttagtgtaagttactgtaatgtaataccaataatcactggtattatccttgaacccactgtgtttagttgtttctatttgagaattactactttcttcttgtgcaaagaaattctcgcttaagataatagtaacttcttttgcaccgaattgacctgcttttagtgcaggaatagtaactgatgcagaaccagtcattcccttgtattttgcatttatattaatggattcactagctagttcaggtgtaccttcgtaggttccgttacctttactgaaagaaatttctgcactttgagttacatctgtacctgtagtcgcatcaataaccacgggggttataataaattttgcatttacgggggtaacctcaattccaatattttccttctcacaagaagtaaacattgttgttgtcaatgctactatggccagtgccaatttagcacttaaaccacttaaaaatttgttttttttcatctcgataaaattaaaattttaataattctgatttaataaaatatggattaaaactattactttccattatgttgtcactcgtttcagctttatattgtttataatattttcgttcatttcctgcgttataaataattcccatattatttgagaagtttacacgcggtatatatttatgtcttttgtttttataaaaaggaagcgcgacttgaaacctgaatccaccattactgttggcatgttctgctttcattgcgtaaaaacctatggacgcatatcggaaatgacgtatcatttcaaacttgatacctttttctcctaataaatatctttctccttttaagctaaattgtgtattatatctcggccaataaaagtttcctccaattgtccatgttgttgtcattttcgtatcataatgtagcttgaagccattccaataacctatacctacataaccaatacgtgcttctatagagaaacgttcgtctttaaacggataaaacaatgataaatcacttccccatctgtctgcattaaaatagcctatagttgctttcccatatatattatatggcagacggaaacgctgggaaagggttatatgtcccggatgaactttatcttccaatatcccatatccatcgttatacacaggtatctttatctgtcctgttaacttacttcctggccataaggaaacttcaatagctgggcttaagtcaaataacacctgatatatttgtgtaataatcatattcatatatgataattgaggatataccataatatctactttaaacagcgaactgttctttttcttttctttcttcaccttgtcccaactgtcacctatatcataactgactttccagtcttcaccgcttaccactgttgtgtcaccggcaagaggctgataggtcagtgagacctgaggtatattatagttggtaacaatcaacttacaagatttgtccttgggtaatcccatcgactgtatgatatctacagcctttctgatgcccaacgcttgaattttgtaagcactgttttcaaccacataaactctttcttcaggagtatctgtccatcttacattttcaaatcccatttttacaagactgtctgttgttaattctcctgttgattggctgaaactttttaatggaatcataacaagcaacaatatagctatacaatacaacaaacatctatatgaaactcctttggaagagctctgatttttcattttataacaaatacctgtttcgatttaacaattatgcggcctctacgttaaaccacatattcggtgcaaaaataagtactattttttaaatagcaaataaaattaaacgaaatgaatcattccttttgaaaaaacagttgaaaaagcatattttaatctttatatataaaataggtatggaataaatttgtatttttgcaaactatatgagtagaatattagcgatagattacggtaaaaagcgcacaggtgtggctgtgacggatgttttgcagattattgcaaacgggttgacaactgttcctacacaccaactactggactttattctgaaatatgtggaaaaagagcctgtggaacgcatcattgtggggcatcctaagcaaatgaataatcaggagtcggaaaatatgcgtaatattgtcccttttgtcaatcaactaaggaaaaaattaccggatataccggtagagtttgttgacgagcggtttacgtccgtattggcccaccaagccatgttggatggaggcttgaagaaaaaagacaggcagaacaaagccttggttgatgaaatcagtgctacgataatcttacagtcttatttggagtcgaagaaatatatttaataaataaaaacagattaagaaaaatgatattacctatttatgtgtacggacaaccggtgttgcgtaaagaagcagaggatattaccccggattaccctaatttgaaagagttgatagcaaatatgtttgaaaccatgaatcgtgcagatggtgtgggcttggctgctccgcaaataggtctgcctattcgtgttgtaactattgatttggatgtgatgtctgatgacttgcccgaattcaaggatttccgccgtgcctatataaatcctcatattttagaagtgggtggagaggaagtcagcatggaagaaggttgtttgagtttgcccggtatccatgaaacggtgaaacgtccggaccgtattcatgtgacttatttggatgaggaactgaaagaacatgacgagtgggtggaaggctatttggcaagggtcatgcagcatgaatttgatcatctggacggaaaaatgttcattgatcatttgtctgcattacgcaaacagatgattaaaggaaagctgggggccatgctgaagggcaaggcgcgttgctcctataaggtcaagactataaaatgataactccgcaattttgatctatgcgccaccagtggcgcatttgtgggaaaaccgtatttttataaatacaaaatgataaaacggatactctatacattattaataatgttccctgtagtggcttcggcacagataaatacggacagggtgatggcgatagggcgtaatgcgctttattttgaggattatgtcctttcgattcaatatttcaatcaggtgattaatgcaaagccttatttgtctgatccttatttctatagaggtctggcgaagataaatttggatgattttcagggggcggagagtgattgttcggaagctattgagaggaatccgtttgtggtaagtgcttatcaggtgcgtggattggcacggatccagcagaataattttgcgggagctatagaagattataccaaggcgttggagtttgatcctgagaacataggggtatggcataatatggccctttgccgtatcagacaggaggattataagggggcgaagaatgatctggataagctgatcgccatttccccccgatatacaaaggcctatttgatgcgtggtgaggtggatttgaagcagaaagatactttggctgccgaaaaagactttggcaaggcgattgaaatagaccgttatgatgcagatacatgggccagccgtgctatccttcgtctgcaacagcagagatataaagatgcggaagccgattttgatcatgccatccgtctgtccacccggaattcaggtgtttatatcaaccgtgctttggcccgttaccatcagaataacctgagaggagcgatgagtgactatgatattgcattggatattgatcccaataatttcatcggccattataaccggggcttgttacgtgcacaagtaggcgatgacaaccgggctattcaagactttaattttgttatcgaaatggagcccgacaatatgatggctattttcaaccgtggtctgttgttggatcagacaggagattataaaggggcaattaaagattattctacggtgataaatgaatatcccaatttcttgctgggatatcagtacagagcgcaggcgcgtaggaaaataggggatgtgaaaggtgctgatgcagatgaattcaaggtgttgaaagcacagctggataaacagaacggagtagatcctaataagcagactgccgataatacggagaataataaaacccgtaagaagtccgataagaacatgaacaactatcgtaagatagtggttgccgacaacgaagagggagaagaaaaatataagagtgactatcgtggacgcgtgcaggataagaatgtgaatattgttccccagcccatgttcgtgcttacctattatgaaaagcacgatgatgtgaaacggcaggtcaactattataagttcattgaaacattgaataatcagaaagtacttcccggccgtctgattataactaatgaggaagctcctctgacggaagaacaagctacaaaacattttgcatccattgacgaacagactgctgccattgtggctgatccgaatgatgtgaacaaacgttttgcacgttcattggacttttatctggtgcaggattttgcaagtgccattgaagatttgaatcaggctattattatagaagatcatttcttcccggtttatttcaaccgtgctctcatccgttataagcagctggaataccagaagatggaaaaagagtatgatttgaaagccggtccgggagagaagagtgcagtgaaagctgcggactatgaaatggtaaagcgcgatttggacaaggtgattgagctggctccggattttgtctatgcttattataatagaggtaatgtgctttctatcttgaaagactatcgtgcggcaattgttgattatgacagagccatccagttggatcctaaatttgcggatgcttatttcaatcgcggcttgacacatattttcttgggtaacaacaggcaaggtatacaggacctgagtaaagcaggtgagttggggcttttctctgcttacaatatcatcaaacgctttacggaacgaaaagaataacatttttttgctaaaaagaggataagtcaaaaagatttcgttatttttgcatcctcaagaaagaatataaatagaagattatgataaagataacattccccgacggctccgttcgcgaatataacgaaggagttactggtctgcagattgcagaaagtatcagttcacggctggcacaagatgttttagcttgtggcgtgaacggtgaaacgattgatttatctcgccctatcaatgaagatgcaaacttcgttctttataaatgggaagacgaacagggcaaacatgctttctggcatactagtgcccacttgctggccgaagcattgcaagaactttatccgggcattcagtttggtatcggtccggccattgaaaacggtttttactatgatgtagacccgggtgaagcaatcattaaggaagcagatctacccgctatcgaggccaagatggccgagttggctgcaaagaaagagatattggtgcgtcagagcatcgctaaagaggatgcgttgaagaaattcggtgaaagaggtgagacttataaatgtgaattgatttccgaactggaggatggacacatcaccacttatacacaaggtgcgtttaccgacctttgccgtggtcctcacttgacctctaccgctcctatcaaagctatcaagctgcttactgtagccggtgcttattggagaggacaggaagaccgcaagcagatgacacgtatttatggtataactttcccgaagaagaaaatgctggacgaatatctggtaatgttggaagaagccaagaaacgcgaccatcgtaagataggtaaggaaatggatttgttcatgtttaccgatatggtgggcaagggacttcccatgtggttgccgaaaggtactgccttgcgtatccgtttgcaggatttcttgcgccgtatccaggcccgttatgattatcaggaagtaatgtgtccgcctattggcaacaagaacctgtatatcacttccggacactacgccaagtacggtaaggactcgttccagcctattcatacacccgaagaaggggaagaatatttcctgaaaccgatgaactgtcctcatcactgtatgatttataagaattctccacgttcttataaggacctgccgttgcgtatcgcggaattcggaaccgtatgccgctacgaacaaagtggtgaattgcacggactgacccgtgtgcgcagttttacacaagatgatgctcacttgttctgtcgtcccgaccaagtgaaggaagaattccttcgcgtgatggatatcatcaacattgtgttcaagtctatgaattttgagaatgtggaagctcagatttctcttcgtgacaaggtgaaccgcgaaaagtacatcggtagtgatgagaattgggaaaaagccgaacaggccattattgaagcttgcgaagaaaaaggcctgactgcgaaagtggaatatggtgaggctgcattctatggtcctaaattggactttatggtgaaagacgctatcggtcgtcgctggcaattgggaacaattcaggtagactacaacttgcccgaacgcttccagttggaatatatgggctcagataaccaaaagcatcgtccggtaatgattcaccgtgcgcctttcggatcaatggaacgttttgttgccgtattgattgagcatactgccggtaaattcccgctgtggctgactcctgaccaggtagctattctgcctatttctgagaaattcaatgagtatgcggaacaagtgaaagcggaactgagaaaattcgatgttcgtgctattgtggatgaccgtaatgaaaaaatcggccgtaagattcgtgacaatgaaatgaagcgtattccttacatgttgattgtaggcgagaaagaagctgaaaacggtgaagttgcagtccgcaagcagggcgaaggcgacaaaggaaccatgaaaatagaagaattcggaaaaaatcttgccgaagaagtttctaatatgataaataaatggtaactttgcagccgtttgcaaaagagcgcattgttaaacctttatgtattcttttgcgttaagataaagaaatactaattaaaataagaagaaacaaacaggaactaaaagttttttaatgaagaatgacagtttaaaagggcaacacagaatcaatgaacagattcgtgccaaagaagtccgcatagtgggcgacgatgtagaatcggcagtttatccgatagctcaagctttaaaaatggctgaggatcatgaggctgacctagttgaaatttcacccaatgctgttcctccagtttgtagaattattgattattctaaatttctttatcaattaaagaaacgtcaaaaggaacaaaaggctaaacaggtaaaggtaaacgtaaaggaaatccgtttcggacctcaaacagatgatcatgactacaacttcaagttgaaacatgccatcggattcttgcaggacggagacaaggtgaaagcatatgtgttctttaaaggtcgttccattcttttcaaagaacaaggcgaagtattgttgcttcgttttgcgaatgacttggaagaatatgcaaaagtagagcagatgcccttgttggaaggtaagagaatgactatttctttggctccgaagaaagcgggctctccgaagaaggcagaaacggatactgctaaaaaggaaaatccgaaaaaggcagtagaaacaaaagaatgaaaaaagagtgcgtaacgcgccggtatagtgcgttaccaccatttgaataataatttaaaattaaaaacaagatgccaaagatcaagactaactccggttctaaaaaaagattcgttcttaccggaacaggtaaaatcaaaagaaagcacgcttttcacagtcatattttgactaagaagactaaaaagcagaaaagaaaccttgtacactcaggtctagtagctaatgctaacttggatcaggttaaggaattgctttgcatgaagtaatctaaaaacaacgaaagcgtaaacgtattatttaaagtattaaccgaatgtctttagctttaagttcaccgtgtgaaacagtggcgctaacattcaaaaagaattaaaactatgccaagatcagtaaatcatgttgcttctagagcaagaagaaagaaaattttaggtcttaccaaaggttactttggtgcaagaaagaatgtatggacagtagcaaaaaacacttgggaaaaaggtttgacctacgcataccgtgaccgtaagaacaagaaacgtaatttccgcgctttgtggattcagcgtatcaacgctgccgctcgtctggaaggaatgtcttattctaaattgatgggtgcattgcacaaagcaggtatcgaaatcaaccgtaaggtgttagctgatttagctatgaaccatccggaagcattcaaagcaattgttgctaaagcaaaagcagcttaattcttctgtaaacggcgatataaagatttatgaaagagcaatctctaaggggttgctcttttttattgcggatgccttgtgatgtttccttaagaaatggaaacaacaataagcagaattacagagagttattttcttgcttattatttttaacaaacaaattctgctatactcttgtttatatcataaaaaggacgtatatttgtcatacggaaagagatgaaaagcgagccgcattagttggattgggaaactcatcaaactaatctgaaaaccgagacatagcttcatcttccaatggcgggccacgccttcgggtagcatttatgccggtggattacaaaggaggagagcactcaaaacctgtcattcggagtttcatcgcatcactggtgcggcttcattataaggcgatgctaattcaaaagattagcatcgcttctttttataaaaatagtacggatatgatattttacttttcaggtacaggtaattcggcttgggtggcaaggcagctggcgaaaggacagaatgaggaattgttgtccatagctatggaaatagacaggaacaaagcgtataagctgaaagaaggggaaaaagtaggttttgtttttcctgtatatgcatggggccctcccaagatagtacttcgttttattcatcagctaaagttggataagccgggataccttttctttgtctgtacttgcggagatgatacaggccggactgcacaaattttttcttctgccgttacccggaaaggttggcaatgtgttgccggctattcggttactatgccgaatacgtatgtttctttgcccggttttgatgtagatgataaagatatagaaacccagaaagtacagaatgctgttgcccgtgtgcgttttatcaacgaagaaattacatcaagggctcaaatgaaacaatataattgtcatgaaggtgcgcttccatttactaaatcctatttgctgcgccctcttttcaatgcttttctgatgtctcccaagccttttcatgcaacggaagcttgcattggttgtaagaagtgtgagaaggtttgtcctgtgggcaatataacagtgacggatcgtcccgtttggggaggtaactgtactcaatgtctggcttgttaccatgtttgtccggtacatgcagtggaatatggaaagatgaccgggaaaaaaggacaatacaaaggaaggttgctgaaagattctatagatacacattaaataatccattgggagggcggacctatagtccgctccttttattttatttttcgccggtttaacgcttgttgatagcgtcttgcattagcttgatgctgggctgctgtgaccgcgaaattatgagtgcctgagaaatcttcttttgcacacatataaatataatgatgctgtgtatagttcagtacgctttccaatccttggatagatgggattcggataggtcccggaggtaaacctgcatgtttgtaggtattataaggagaatccacttccagatgtttgaaaagaatgcgtttcagtccgaattcctgtaaaccaaattttaccgtcgggtctgcttgcaacaacatccctttattcaatctgttaatataaagtcctgcgaccatgggcttttcgggaccattggtcgtttcttcttccacgatagaggccagggtggacacttcttcaggagtaagtccgatatgttgagcctttttcagcctgtcattattccaaaaggcagcatgttctttttgcatccgtttcatgaaagcgtcagcactcatattccaataaacctcgtaagtattaggaataaaaagggagggtagtgtctcttgggtatatcccatttgtgcacagtaagcactgtcggaaattaatttggcaatatccagagaatcaatcatgagctggcgcgaaacggctcgcactaatctgtccacggtgcgtacactgggtacagtcagattaatgggagtctggtatcccatggaaagacgccggaagaggtagcgcatattgtccgatggattgagagcgtaacgtcctgtccgtatattgtcgccatacttctctttttctgccagatattgaaaaccgaacatacttttaggatgtccgttccggattattttatggtatacagaatccaggttatcatctctgtctatataaatataggtggtttttgtaagttggaattgtttggcaaagaaatagtaatatatacttcctgcaccgcctgctcctgtcaggataatgataaggataataatccatacaatagtacgcttctttttattcattttagtctatcgggcttttttgtatgcaaatataggcaaatatccgtttcttttctacttttgacgattttgtacccctaaaaatacaattttgtccactatccggttgatgtaaaatgtgtaaatttgaccaaacgaaaaacgagaacgcaaatatagtataattaattattttatttttaatcatgaaaaatgcacttatgggcttggcattgttcgctgcaatgccggtatttgcccaacagaaagcgactatcaatgtacatcccgagcaagggaaagaaattatcagtaaacatatttacgggcaatttgcagagcatttgggaacctgtatctatggaggcttgtgggtaggtgaggattctaaaattcccaatacccaaggctatcgtaatgatgtgcttcaggcattgaaagacttgaaagtgccggtgcttcgttggccgggcggatgttttgccgatgaatatcattggatggatggtatcggtccgaaagagaaccgcccccgaatggtcaataacaattggggaggtacagtggaagataatagtttcggaacacatgaatttctgaacttgtgtgagctgataggttgtgagccttatatcagcggtaatgtaggaagtgggagtgtggaagaaatggcgaaatgggtggaatacatgacttccgaacaaggtagcccgatggcgaaactgcgtaaggagaacggtcgtgaaaaaccatggaaagtgaaattctttggggtaggtaatgaaagttggggatgcggaggcagtatgcgtcctgaatattatgcagacttgtaccgccgttattccacttattgtcgtgactatgatggcaatcacttgttcaagattgcaagtggtgccagtgattatgactataactggacagaagtactgatgaagaatgtaggtcaccgtatggccggtgtgtctttacattattatacagtgatgggatggagtggaagcaaaggatcggctacacagttcactgatgatgattattattggactatgggcaaatgtctggaaatagaaccggtgctgaagaagcatatggcaattatggataaatatgatccgaagaagcaaatcggtttgatggtggacgagtggggaacctggtgggatgaagagccgggaactgtccgtggacatctgtatcagcaaaacacgttgcgcgatgctttcgtggcctctttgacactggatgttttccataaatatacggatcgcatcaagatgacaaacattgcccagattgccaatgtgcttcagtctatgattttgacaaaggacgacaagatggttctgacaccgacttaccatgtctttgaaatgtataaagtgcatcaggatgctacttatcttcctttggaactgaactgtgaacgcaagattgtacgcgacgaccgtattgtcccgatggtaagtgctaccgcttcacgggatgcaaacggtttgattcatatttccttgtctaatgtggatttgcaggaatcgcaggaaatagagttgaacttgggtgaggtaaaggccaagagtgttactggccgtattctgactgctaacaatataggtgattacaatagtttcgagaaaccgaatgtggttgccccgaaagaatttaccggagcaaaggtcaataaagggagcttgaaagtgactcttcctgccaagtctatcgtagtgctggaagtgaaataaaacccgtacgtatgtatacccccacacatacgtatgtgtgggggtatacatacgtatgtatcgtttcatgcctgcgtatgtgtgacagactacggtaattcttgtaccaactccgcttcgattctgttttctatttcatccggcagggcagggaagaaatcgatatccgttcttttctctacgctgtctactgttaccatatatttcttcagtggcttatgtccggcgctgttggggaaaataaatcctatggcttgcggatttttcttatcatttatcaatatgactttatagaaagcatgggggactgccactttattgttgccaattcgtttggggcgtttagtatcatatataggtccgcaggcaatatacacggctccatatttttttgcccattggcgtgacttttcctccaggtcattccagtcgccgcggttcagattcggattttgcggacaaatgttgctcatataaaaagattcttccatggcttgtttgctccatttcatatcggcggcaggggccatgtgtccccggtcgtatcctgattttgtataatctcccgtatatgctttggctccacgtacgtccgggtcgggcaagaatttatttgttcgcccttcttttccttttgtttcttttttagtaagttcccacgccacccattgtggagttttgtaatcggcattataagacagggtatatcctttacgtttcagaatctggccgcctgtacttgattgtatcatcggaatttccaatgcaccgccatgctggggcgaggtcagtatttctggcttttcttcattgctttcgatagtggggatattttcaagcagtttcccgtcaaacaattgatgtttatatgccaaaagtcccagtaatactaaaataatgatgactctcaggggactattggattgtttctttttctttgcgctcatatttgttctgttttaggggtgcaaagatagaataaaatataaaaatacattatctttgtccattatatagctgtaaattttaataatactgacatgctatcctaactaatcaaacctattatatatgaaaaagaaccgattatcgttagcgtttctgggtctgctgattgcagcttctcctttacgggcacaagatacgctacagaatgaaacagtcgagcagaaagacaagagaatggaatggttttcacaagccaagttgggtatctttatccattggggaatttattccgtcagaggagtgtccgaaagctggtccttctttaacaactacctgccctatgatgaatacatggagcaggaaaaaggtttcacagcctccaagtatgatccgaaggcttgggtggatctgataaaagaaagtggagccaaatatacagtgataactaccaaacatcatgacggagttgcgttatgggataccaaagtaggagatatcagcgtcgtgaaaagcactccggcaaaacgtgatctcatagctccctttgtaaaggaagtaagaaaacaaggattgaaacttggcttctattattctttattggactggtctcatcctgattacccaaacaaaacccgtacggaagtacgttataaaaatgatcctgaacgttgggccagattcaacaagttcaatttcggacaattggcggagctgaacaaaacctggaaaccggatctgtattggttcgacggagactgggaacaaagtgcggaagcttggaattccaaaggtattgtagatctgctccgttcggataataagaatgtgattatcaattcgcgcatacagggatatggcgactatgctactcccgaacagggagtgccggtggtgcgtcccgaggataaatattgggagctttgtatgaccatgaatgattcatggggatatcagcatacagacagcaactataaatcaccctatatcttgcttcgtacatttgtagactgcctgagcatgggcggtaatcttttattggatatcggtccgaaagaggacggttccattcctgaagaacagatcgctgtgttgaaggagttcggccgatggaccaagaagcataaagaagctatttatgaaactcgcgcagggattcctaccgagcatttccagggatataccacactgaataaggcgggggatattctgtatttatacctcccttacaaacctaacggtccggtggaagtaaaagggctgatgaacaaagtgaaccgtatatgggtggttggtaacggagctatgttgaattacaaggtctacaataaaaattattggaactcagtaccgggcaatctttatattgatgtaccccaacaggtacaggatgagcagattaccgtgctggccgtgttgctggatggaccgatcaaactctatcgtggagtgggacaagtgcaagataataactaatctgaatcagaaaaatagatgaagaaacttatttataccctgttgcttctgctggttacttttccggcaatggcacaaagcctttttgaacaatatgaacgttttctgaccgaaccgcgtacttatgtatgttatcgtccggatggaaagttgaaaatagatggtaaactgaatgaaacttcctggaagaaggcggcgcctaccgctccgtttgtagatataagcggtgaaggattcccgactcccaaatatgaaactacagccaagatgctgtgggatgatgaatatttatatgtaggagctgttcttcaagaagaggatatcaaggcacgtcttacccagcgtgataccatcatctattatgacaatgactttgaagtatttatcgatccggatagcgacggacacaattattttgaaatagaaaccaatgcgcgtggcgtgattttcgacctgatgctggacaaaccttatcgttcgggtggaaatttcatggtgcaatgggactgccccggattgaagaccgccatccattgtgaaggtacactgaataaatcaaaagataaagataagtattggagtgtggaaatggccattcctcatcaggcgctgaccatgaactttaacaatccgttgaaggccggcaacacctggcgcatcaacttctcgcgtgtacagtggctgaaggagaaaggacctgaggaaaactgggtatggactcctaccggaaggattgatatgcacatgcccgaccgttggggatatctttatttcgtagacaagaaagtgggaacctcgcaagatgagttggtttatccgtacaatcaggctatttataaattgctgtgggccatgttctacgcacagcaggataattatagtaaacaacataactacttgcgtgccacagaacaattctttttgacagataaagagttgaaagatcttccggctgatgcccggattgcggtggaagcgactcagaacacctatcagatagctataaccaatcctgctgaaggagtccgttatgtgataaataatgaaggacgtttccggacagaaaagatacctgcccgtgaagttaaaaactggttgtggatgcgtctgaataaccgttcggatgccgaatggaaaaaatggtttgcgttgttgaaagaatgtggtatttcgggtgtcatgttcgagggatacaatgaaaatatttatcgtctttgcaaagaagccggactggaggcacattattggaaatggacaatgaaccgcagggaactgctggacaagcatcccgactggtatgccgtgaaccgtaaaggcgagtcttgtcatgacaaaccggcctacgtggattattatcgcttcttgtgccctaatcaccaaggtgtggcagagtatctggcagaagactatgtaaaggaagcccataagccttatgtggatggtgttcatctggattatgtccgtatgccggatgtaatcttacctgtcagcctatggaaaaactatggtatagagcagaaagaagagttgccggaatatgactattgttattgtgatgtctgccgtgaattgtttaaagctaaaacaggacaggatccgttggagttaaagtatccgatggaaaaccagagttggatcaatttccgtctggatgccatcactcgtgtggtggatgctattaccaaagcggtgaaagccgatcataaagctatttctgccgcagtgttcccgggaccgtccatggctcgcaagatggtgcgccaagattggggagaatggatgctggatgcttattatccgatgatttataataaattctattatgaaggtcctgaatggatcgggcgttcggtaaaggaaagcgttgaaacggtgaatgggcgtgccaagatatatgccggactgatgtttggtgatattaaggacaattttgaagaggcgctggatgaagcgtacaataacggggcatccggtgtatccttctttgatggtccggatgaagaatatttgcataaattcaaagcttatctggataagagaggatttgtggtgaagtaactccgtactgttagatccttatattagggaaataaatctctttttagcggtcactttcgatttttatcgtaagtggccgcttttgcgttttatcatttgttcttttaatgagtgcggaaaaggaatttatgtgttcctttttggtctttcttggatctatcttgaaaatgaatctgttagaataaaaaaatgaggttgtgtcaaaacgctgacacagcc

SEQ ID NO: 3940 - DNA, 2891 bp, Unknown
  gut microbiota DNA sequence
tgcaggggcctgccgcttacgcggtcgcacagcttgatgccgaaagggctggacgaggatttatagttggtttcctccgtgaagaaacagactgcgggctcgatgaacgtgtagaacgattcctcggcggggaaatcccccgcgttgcccggcatacccgcccagtagagcgtggcggcgtccacggtgttgtggcgcgggcggcactccatcagagcgagctggctgcccacatcattgcggatatgccggagctcctgcacgtcgtccgaccaggccagcacgttgaaatgggcccggacggattgaagaccgaacgagtgcgcctcgttgagatactggtcgatgtcgagtaggtcagcccccttacgggagctttcccctctaagaaccgtacgtgagagtttcccctcatacggctcaagcaattcaaaacttttatttgtaactaaaagccggctcatagtaacttccatttatttctgttagtaattcggctgcaatgatcatgtattaggactttcgcctttctactgctccctgtcatttcagtaattttccagggagtttcccgtgtgatgtgcttgccacacacagggcaacattgcatttgctgattccacaggcgatagatatattgcttgccgtctaagtgtgcaagcattcttcgggtcttgtattgatcgaagaaatctttccaatcggcatcatatgggttggcctcactgcggattttgatatgtcgctttattttcgtatccgacaatctcacaagagtgtggtatttatccactttcctgttttcaagcggtacggcaaaagtccagcttctacctcttacagtgtgataatacttgttggcaatccatcgtttaccttttttgggatgtcttctgcgagaccatcgccatagtttgttgaaaatttgtgcatctgttttacggaaagtttccgatgcagaacaccccttgtagtagttcgcccatcctctaatgactgggtttagcaatcgtatcaaagattgttgcttagaagacttgttcttgtccactatttcacgaaccttatctaaaaatctctttcgactcttcttggatggttttgtgataaacttgcctttatattttctgatattgaacccaagaaaatcaaacccttcttctatatgagttatcttagtcttttcttctgataaggtaagccctcttgcttgaagaaactcaatgactaatggtttaacatggttctccaacaactccttactctctcctgtgataataaaatcatccgcgtagcgaacaagatttatcataggagtatagtaatttttcttcgagcggtttatcggaaagctatcggcaagcagtttttccagtccgtccaaagtcatatttgcaagagttggggagatgatgccgccttgaggagttccctcctctgtcggaaaaagttgcttgttgaaaataaatccacttttcaaccatttacggagcaaaactttatccatagggatattgtcaagcaaccattcatgactgatatggtcgaaacaacctttgatatcaccttctaagatccattgtggggatgtcgtccttgccaggtcattgaagcattgttgaacggcatctgccgtgctcctttcttttctgaaaccataagaattggcatcagccgttgtttcagctacgggagccagtgccatcagatacaatgcctgcatagcccggtctttcatagttggtatacccaatggtcttaatttcccgttactctttctgatatgtactcgtctcagaggttggggtgtataacctctccttttcagttcggttattgcacacactttagcatctggcgttttccatgttaccatatcgacgccagccgttttactcccattattggaagttacacgtcttaccgctaatgctttagcgtaaaacgagtgggtcagtgtccactgcaaggctttgaccttgttgtggcgaccctctttttgagcctttacaatacgcgcttgtagcttttgaaccgcagcttcgcatttgagccaatttatactgtcccatttgctctgcgtttggtcagtcgatgcacacgattttttaatttcgttcatttgcttttctccttttaaaagttctaaaagtttcttgtaaagaatcacctaccgcagaagtcagcctgctttcgcagcgggatgatgtttcaatccctattcaccccattacagggtggcattcgctttttctgcaatcctatacccgcactccattcggcattccttacggtctgcttacctgtcattggcaggagaaatacgggcttactacgttccgtgcaagtaacttataagtgggttaggttctgtctattacaccggcagtactctgttcgtgtattcccagaatggagaggaataaccgactgcttcccttttgggctgaagcctatcagtatctttggcttcttcaaccttacgacgtttagacgacagttcgcttacgctaaccataccacccaagccaagctccctgactgtatgatactaacagccattgtctttccctcacggttctgactgctcctttcggaagggctaccttgtctggacagctttgatacagtatattactattggtgcatctgtccataggctaccgttgacgaaacaacgggttaaatctaagtttaacaattacttacacagcgacgtatcgcacccactccttgtttatctggttcccgcgggagtagcgggaaagggactgcatgttacgcgcacgtttctcgaacatacgcaggttttcgtcgctgtcttccaggaacacgtactggttgtaaaggtggtcgcaggaaagcagaagccccacgggggccgcgaacga

SEQ ID NO: 3941 - DNA, 20127 bp, Unknown
  gut microbiota DNA sequence
gattattccttaaatttgcttatatataaactttaaatataatgacacatgaaaacgattgcaattctaattactttacttttaataattaatataaacatttatcaaggtaattcaactgaagttttagcaagtaacgaaagcggtatctttcaatattaggatctagagaagaaaaaatgtcttagcaatggacataaaagtatatcgtttcattaactctcatgcaatgactcagattatttttttatcaaaaaccttttgtaatgattttataaaatacatttttaataatattaattctaaccatgaaaagtatttccattttacgcctaaccgcaatccttttgtgcagcatgcacctattgggatccgcctcacttcaagcccaaatgaacaaatgggtaaactatagcccggatttgaccaccgtactgaaaaatcctgccatgggatggatgatgtacgaagaaggctgatcttttcagggaacacgccacaataaaagcaacatctatactcccgaagttttttggaaacagatggaagaatgcaaagcagctgattattccaatattctgtacatcagaatgctgtggaaagatttggaacccgaggagggcaaatatgcatggatttacaatgaacggtataaatggtatatacaaaaagccaaagacaaagggcttaaactggccttcagggtgttctttcatggtgtagacggagtaccgtcctatgtgtacgaagccggagccacagaaagcccaatagacgatgaaggcaaaacccagccttattatgataatccagtattccttgaaaagctggacaagttcatagaggcttttgcaaaggaatatgacaatccggatgaggtagattatattgatgcatatggattgggaagatggggagaaggacatggactggtactcgaaaagcaagataatctggaaagcgttatccgacagataaccgaatcgtatgcaagacacttcaaaaaagtgcttacggtaatgaatctttcgcagagcgactacaggttttccaagccgctagtatatgacaagctggggtttcttcctcgcagggatggtataggcagtttttggttttctaatgaagaacgtgcgatggtgcatgacgaacttttcccaaaaagagctcttattggtgagggatgctggtggtttaacgcacaagatggtgataactcaaaatacaagcatttccaaggagacaaacgttttgccatgaacgatttcaaagaagcttttaccgtttctgtgactgatgctttggacagccattgtaacacgctggatttgcgtatgcctttacagtgcaaattctggatagaagagctgccggaccaagttcagcgttttataactttaggcggttatcgtctttatccggactatataaaggtggagcaagaccacaaaacgttgactttgtttcattcatggaaaaactatggtgtgggtgtattgcctaataatcatcccaattggaattataaatatcaggttagttttgttttgatgaatgaaaaaaaggaaattgtatttctttatacagaaccggaagcagaaccttccgaatggttgaagggaatatcatacaattatttgagtcggtttaatattccggcagaattgcagggaaagtataccttatgtgtcggcttgactgacaagacaaaaaataacgaagcggctattgatctggctgtgtctgggaatttaaaaatagggaaatggatatttgtggttgaactggagttgtaatgtgtgtacttggcatttttgcaccaattaataaagaagcttctgactgattatcaaaaaataaggactttctctatatctgtacccagtaaatccaatatgtttagggatattctttcaatagtacaaaattatacaacctattcaagttaaattattgctaatcagttagtttttgtatctttggatatccctcaaaaaagaaaattaagaatataaattagtggaaaataaaagtgcaattctgattattgatggattgcactttttattacttttctaaagacattgtttcttcacatataatttgagattatgaaaataacgttttcatatttctcctgtcttttcattatcggatgtacacatcaatccaaccaaggaaaatcgttatagaaagcagcaatgcagatgcaattcgtgtaagtgccgatactttagcgtatgaatatactgcatgggcctttataaacaaatctgttcccatatttctcattagccatatactgctcaatcaatttacataatgatgttcaaaccacctgtattcatcttcctcaaatagtgctaaaaaagagaattctgatagccaactacctgactatcagaattctctttggagcggcaaacgggattcgaacccgcgaccctcagcttgggaagctgatgctctaccaactgagctactgccgcatctctaaaacggaaacaaaagtaatatatatttttcaaccgaccaaatataagcaaacaatatttactataaccatcaagatttctgctctcctgtttatatcgacagctttatgcatatcctgtgtatggataaaccgatccttatctccaataaaaggtttatagactatctctccaaaataaacatgaggacctccaaaacggcaattcaagatacctgctaaagcagactccggataacctgaattaggactcgcatgccggttaccatatttacctacaaatctcagcaaaccgggacgccctgcacacagcaccattaaaaatgcagttagacgagccggaatatagttcgccatatcatcaatatgtgcagcgacacaaccaaactgaagataacgttcattcctatagcctatcatagagtcaagcgtattaaccatcttataagcaagcataccgggaactcccaaaagcaaataccagaataatggagcaataaccccatcactcaaattctcagccaatgtttccaaagcagccgtacgcacttcctgatctgtcagttccgaagtatcacgccctacaatacgggaaacctgctttcttccttcctccaaagaatgatccgcagccaaaaaaacctgccttacttcgttgataagtgtagttcctgccaaacaatagaaaacaagcacagcagagagaataatacccaaccaacggtttagcacaaacagataatgcaataccaaaacagatcctgcatacactagcaaaataagcataatggccgccacccctcctttcaacatccgatgtgtcccacagttccatcgtttctcacaaaaagagatcagcttcccgaatcctaccactggatgcggcaatcctatcggatccccaagcaatttatctaatatccatcctatcaacaacggaagaattaatacatatatgtccatttctttatactttctaccagtttgtcattttcttccggagtttgtgtagcaatacggaagaagtgttcattcagcccttcaaaattggatgcgtcacgaataagaattccctgctctgttgccagatattctttcaaagccgccgcctttcccatccgcaattgaactaacatatagtgagtatccgatggccagatctccattccccctattgaaagtaaagattgaactaatctctctttttccctcaataacaaagagatatctatatcatattgagaagaagacaataaataatgcccggcctctatagccaactgattaacagaccaaggcatccgctgtgtccggatttcatgtagcagttctttacatgcagtgatatatcctaaacgcaagccgggcacggcaaaacgttttgtcatggaatgcaacagaataacattcggaaattccgcagcctccttggctgtaagcaaagccttctgtgtaaagaattcatacgactggtccatgataaaaatacgctgcggattttgttttatacaggctgtcaagacttccttctccctaacctctcctgtgggattattaggattacataaccatatcaacctccccctatccggcaaacggttcaaattatatataggaaccactttatgaccatgcagacgacaagcatccgcatattcgctgaaagtgggcatcaagatagccgaaatctgattcctgaatgtctgagctattaaataaatggcttccgtagccccattggtcacacaaacctcttcagacgaaagatgaaaccgttccgctaaaaccttttccaacgaataaggttccggttcggggtacgtacggatactttccatctgctgaaacaaatgttgatgtaatccgctatggtctacatgattatatacgtttgaactgaaatttatctttattgctttatacttataagcatcatcaccatgtccttcaatcattcccactcattatttggtacaacaaaggcagattaagatgactgcgtacatgctctgccaatttatcatattgttcttctttataagtccggtaatccaacaccgtatgacactccagtttttctgcgtatggttccagcaaataatctataaatgcctgattatccaatattccatgaatataacttcccatacatttttggtttacaaaacaaccgtcctctccaccgtcttccagtctattcaaaggaactacagacacccccggaaccgggcgggtttctcccatgtgtatttcatatccttggcaagtttccgcattctcaagaaaatgaaaattcacctgccgcgtcaccttctccccttgcatcgtagtaatgacgggaagcagtcccagtcccggcaattgacggatctctccctccactccttccggatcgtgaatctcaagtcccatcaattggtatcccccacaaattcccattacagtaaccccttccctatgcgcacgtaggacagcttgcgccaccccgttccgtctcaactcatacaagtcatccaaagtgcttttgctgccaggaagcagaataatatcagctttggccagatcttccgtattattggtataataaaggtgcacccgttcatcccgttccaatctgttgaaatctgtaaagtttgagagatgacgcaacagaacaactgctatgtttattttgccttccacggcttgcatccgtttatagtccaagcctacggaatcctcttcctcaatatgtatatttctataataaggtattattcccaagacaggaataccacataaatcctccatcatcttcacaccagactcaaacaaacggatatcccctctgaatttattaatgattactccttttatacgtttcttgtcctcaggagtttgtaacatgaccgaaccatagacactggcaaatactcctccccggtcaatatcagctaccaaaatcacatccgcatccgcataacaggccatcggcatattcaccaaatcagtatcccgcagatttatttcggaaatactccctgctccctccattacaatagggttataacgtgcggcaagacggtcaaaggctgcgtttacctcctgcctcagctcttcacgtccctccttgcgaaaatactcaaaagcgttacgattaccgatgggacgaccgtttaataccacttgcgaagtatgatcggaactgggtttcaacaacaaaggattcatgtccgtatgacaagggactccagccgcttcggcctgtacagcttgtgcacgccctatttccaacccttccggagtggcatatgaattcagtgccatattctgtgccttaaaaggtgccggtcgataaccgtcctgtttaaaaatgcggcataatgcagcagcgatgacacttttgccaacatcactgcctgttcctgccaacataatcgggtgtaaattctttttcatcactctttcttctttcttttatatgcaaaggactgccacttttcttccgtccagttctgttgttgcatctcataacgggccataacaaaaaacaaatcggacagccggttgataaaccgaagaattatctccggtaacggatcttgtttatgcaaagtccataatctccgttcagcccggcgtgccaccgtcctagcaaactgcagctgcgctgataccggcgttcctccgggaaggataaaggaactattatcctccatctgttccatcaatgtatccattgcttcctcacaaaaagagcataaatcatcaggcaagatattaggattcccttcacggatagttgatggtgtagccacatggctcatcactgccatcatgtttttctgaattgaaaaaagcaaggattgccattcgtgctcctgaggtaaaaacgaacgcacaattcctataacagcattcaactcatcaatacatccattagcttcaatgcggatatcatctttaaaaacccgctctccaccatgaattcctgtcatgcccttatctccggttcgtgtataaatacgtttcatactttccataatttcaagatatccgtttccccccaatatagatgagtatatccggctatcacgtttttatatctataaagcggggtactcacttccattcctcttgccgtaaattgttttgctacagaagacatagcgtcaggagcaacaacattggaataatgaaattcatgcccgcgaagctccatccctttatattctatacgacgataccctagatgaagtctggcacccaccatggtacaatccaaaggcaaaatacccgtcatggcatatgcagtccctccctggcgggctgtcaaggaacgggtgagaaacatcatacctccacactcggccaaaattttccccccctcctctgcataagttcttaatgcttccattaactttttgcgccgatgtagttgacgggcgaacaattccggatatcctccgggtaaataaaccaaatcagcatccggcaaatcactaccatatacaggactgaaataagtaatgcttcctagcgcagacaagcggtctatgttttctctatagataaagttgaaagccggatcccgcgctatggctatcttcatctttttagcagaaggagtaaaactttccacccctgtttctgaactataaggcaatgtataccgacacgggaaattacgatgacaaatactcagcagcttatccaaatccacatattttccaaccaattccgcagcctgttctatcaaggtgttcatggaacgtttggctgtcaatgtcaaacccaagtgccgggatggaattttcaacccttctgtcataggcagatatcccaaacattccactcctgcatcaacacaagcctcacgtaaataagcgaaatgagaaggagatgacacttgattgaaaacaatacctgcaatcttcacagccggattaaaatgcttgaaaccataaattaacggagccacagaataagctgtagaacgcgcacttactataagcactacagggatattcaacaatctggctatttcagcactacttccctgcattctttgataaccgtcaaacaatcccatcactccttcggttacacatacatcggctccatctccatatttattatacagatgttgtacatgggtatttgatgccatccaagtatccaaattcaccgactcatggtcagcagccagcgtatgaaattgtgtatcaatataatcaggaccacatttaaaaggctgtacccgcagacctcgtttgtgcaatgcccgcagcagccccatcgtaaaagtcgtttttccgcttcccgatgtagcggcccctatgagtaattgtggcttcattctttagtatttctttaaaaacggatacaaagatagtgcaaattgcaaattatcgaaattagaataacagattaattcataattccgacatatcaagtaaatatccttagaaagcaattaaagttttatggtttatcaattaaataagctacctttgcagtcatttttgccagaatgacagctatacaacaatgataaaattgatactataaataattaaactagataatgaattatggaactttttagaaatctctttgaagggtaccctaatttatggggcggcggagtagcacattccgtacttattctttcactggtcattgctttcggcatcatgttaggaaaaataaaagtggcaggtatctcattgggagtaacctggatactttttgtaggaattgtattcggtcatttcaatctgaacctggacgaacatctgttgcatttcttaaaggagttcggtctgatattatttgtctactcagtcggactacaagtgggtcccggtttcttctcagcattcaagaaaggaggattcacactgaacctgcttgccatgatggttgtatttttaggtgtgaccatcaccattatactccatttcataacaggtgtccccattaccacaatggtaggaattctttcgggagctgtaaccaataccccgggactaggtgccgcacagcaagcaaacagtgatctgaatggtatagacgctcccgaaatagcactgggatatgccgtagcctatccattgggagtaatagggtgtattctctccctgctggcattgaaatatatcctgcgcatcaacacaaaaaccgaagaagccgatgcggaacggggattggggcatctacaagaactgactgtacgccctatctcactagaaatacgcaatgaagccgtagaaggtaaaacaataaaagaaatcaagccattggtaaaccgtgattttgtgatttcacgcatacggcattgtgacggagacagacaaacagaactggtgaactccactacagtatttcacatacacgatgagattcttgttatcgccaatccgatagatgtagaagctatcactgtcttttttggaaaacaagtgaatgtggaatgggatttccaaaacaaacaacttatctccagaaaaattctgatcaccaagcctgaattgaacggtaagacattggcccaactaaaaatcaggaataacttcggagcaagcattacccgtgtaaaccgttcgggtgtagaccttgtggccactcccaacctgcaattgcaaatgggtgaccgggtgaagattgtgggtagcgaactagctgtagcccatgccgaaaagattctaggtaattccatgaaacgtttgaatcatcccaacctgatccctattttcttaggcatcgcattagggtgtattctaggaagcactccttttttattccccggtatcccccaaccggtaaaactgggactggcaggaggcccccttatcgtatccatcctgataagccgtttcggaccacattataaactgataacctataccaccataagtgccaatttgatggtacgtgaaatcggtatctcgcttttccttgcttgcgtaggattaggagccggcaaaggattcatcgaaacaatcattaacgagggtggatatgtatggatagcatacggcgccattattacgctgctgcctttactgattgtaggtataataggacgatatgtttataaactgaactattacaccttgatcggagtattgtccggagccaccaccaatccgcccgcattagcctactccaatgatttgacctcttgtgacgctccggcagtgggttatgccaccgtttatccgcttaccatgtttttacgtgtactcacagcacaaatattaatattggcacttgcctgatcccgccagaattattgcaaattcatattaccgtaggagtgaatctaattcactcctacggttcaaaatcccccacctctttcaaaagcaaccattttttcattaatcttaaaacatatataaaataattgcctacctttgtgcccgatttggtgatataggcagcctttctctgcctgtataaaagggaattcggttatagaatccgaagcagtgcccgctactgtgaaacccgtctgatgaaaagcaattctcaccaagccactgtttcttttgccagaaatgggaaggcgcttttcagggtgaagccaggaaacctgccaagtccgaacatagataatcatgctctcccggggtcaggaaagtgaattattaatccttaaattctttcgatgaaagtaaagttattattgacagcaattactttaagctgtctggctattgacgtactggcacaagtcagtatcagtggaaagattgtgagtgccgataccaacgaacctgtagtgggagctaatatccgtatcgatcaaagcctttcaggatgcaccacaaatgataaaggcgagttttccatcagcaatctccctgatgggaaacacgtattaagaatcacgcatgtcagttacacacccaagtccatcacgacaaaaggaggtgaaaagaatcttcttatcaagctacaagacagttttaccaatataggccaggtagtagtaaccggtacaggaacacaccaccgcatgacggacagccccgtgcctgtttccgttatcactgcaaaggatttaagtaatgccagtgtaacatcgctggacgaggccttacaaaagctgaccccgtctttctcaagtatgaccaacggcatggggacaacattgagtctgaatggattgcctgatgattatttcatttttctggaaaatggcaaacgcctgtatggagatgacacctatgctcgaatcaatgttgccaaaatcaaacgtattgaaatattgaacggcgcttcttccgctctttacggaacaaatgctatcggaggagttatcaacatcattactgatgatgtaaaaaatgctatcaatgtttccagcgatacccgttatgccagtaaaggacgttttacccagtccgtaaacatagatgtcaataccggcaagttcggctcctacacctcttatcgccgtcagcaggccgaaggatggcaactgaatccatatgaggaaaactccaaaactcatgaattggaagaaaccgggaaagtagcttctacaggcttctatgcaaatactgtcaatcaaaaattcactttcgatgctaccgacaaactctccttttatgcccgcggcggatattatgacaacaagacacgccgcccttatgaagcatacgactacaacatattgcatgaaacctttaattatggcattggtgcccaatacatgataaataaagggaattatattaccgcagactgttacgccgatcatttttcttcctcttattgtttttttaaagacaataaaacctataatggaaaagcaggtgaagagcaagtgcgaaaacggacccgtaatcacaatcttagcataaaaggtatctttaaattaggtaaccggcacaaactttcagtcggcacagaatatatcgttgatgtcttgaaaagtcaaacagacaatatagccaaagaagatgcttatacactggccttgtttgcacaagatgaaataaagttactgagaaacctacaggctttgattggtgtacgttacatttatcatgaaaatttcaaaaatcatgccactcccaatgtagcactgatgtataaacccggcaaattcaatttccgtgcctcctatgcagcaggtttccgaactcctaccctatctgaactctatgccactgacatagctaaaaaaaatgacaggttgacaataggtaatttggatttaaagccggaaaagaataattatttctcattgagtgcagagtatgtacatgagcgtttttcagtatcagtcaatgctttttataataatattcgtgacatgatagattataatacgattgccacaggagataaagctatggagcaatatggtcataaggaagttcgtcaacgtgataatatagcggaggctaaagtccacggaatcaatgtatccgccaatgcatacctaggtgccgggttcaatttaagcggaggatacactcatcttaatacccaagatgtggaattggaacaacccatcgacaaaagtataaaaaacgcatacaatatcaatgcccaatgggcgcattcatggaaaatatatcggttgaatataaatttgaacggccgtttcaacagcaagcgtttctctaaaagttacggttatgctcccgagtatcaattgtgggatttaaacacacgccattctttcaacttaaaatctgtaatcatcgaacccggatgcggcatggaaaacctgttcgattatatggatgaccgtccttataacagcaattatgcgacacttacccccggacgttcattctacatcagtctgtctttaaaatttaaaagctaaaaaatcaaagacttatcgaagataatataaaataaacctctatctttgcaacggaattagtaatcgggctatcacatagcccgatgcaagggaactcggtgtaaatccggggctgtacctgcagctgtaaatcctcatgatgttgattggatagtctaaaaccactgtttcatttgaagaaatgggaaggtttccaatcagaggaaagccagaatacctgctaagtctgttgaacaataaacaccaagcttccaggattagaagtatgtgtccattcgaacaagcgttttccaacgtctattcctttgtggcattcctctttatcagagggaaacttgatgttttattttgcaaattaaataaaacacaatatgaggtatttacttcctgctattctactattaggtacacaaattgcaagtgcccaaagtattctcaaagataaagacgataaagaattgtccgtattactgaatgaagtggtcatcacgggtacaggtactgaacattatctgaaagatgctcccgtacagactgaagtcataaccagcaaagctttggaacaatatcaggcacgcagtatagacgatttgctcagtggtcttagtccttcattgacctttcatgatggtgatatggggagccatatccaactaaacggattgaacaatgactatatcctgatcatgataaatggaaaaagaatgaatggcgatgtaggagggcaaaacgacttgaatcaattaaatccagctaatatagaacgcatagagattgtaaaaggggccgcttcttcactttatggcagtgacgcaatagccggagttatcaatatcataaccaaacgtaaccgtgaaaaaatggagctcaccaatacatcccgcataggtgaatatggtgatatacgtcaaagtaccagtttcggctttaattatggaaagataaaatctgtaaccggaatcaacttccggcataccgatggctggcggaatacagacctacagtgggatcagaatcaattgaaatccggctctactatgttgaccgtaaaccgttcttcaaactataccctgtccgagaacattgaatggcaagtcaatcgcaaactagacctcactgcagaaggcacttattatgagcgttgggtaatgcgtacacacggtccttggaaatatcaagccaacgatttttattatcgcaactacacatttgcagtaggaagtaaatataaattaggaaaacggaattatctgactgcagacctctcgtatggcagatacggctacttctatgactataagctaaacgagcatactgattattttctagacaatgaccgccatgaacgtatcacctactttgccggtcaacgtatcaaacaaagtattcagaaacaaatattaggccaggtaaaaagtgtattttatcttggagaggaccatattttaaatgcaggaatcgaatatcagtacaatcatttggaatcacctcatcacattgacggtgaccgcgcttccgtttatacgttggcagcttatatacaggaggaatggacagccagagaaaatctggttctgactgccggggtacgaggaacacaacacaaggaaacaggattgaatttcagtccgaaaatatcaggactttataaacccggagaacatattaatttgcgtgcttcttatgctttaggctacaaagcacccactattaaagaactttattataattataccggcgttatcggaggcggtgccttgactgcatatcatggcaacacagatctaaaagcacaaacctcacaatatgcttcaatcggtatcgagtacgtagggcaaaaattccaagccagtttaaccggatacatgaattatcttcacaacatgattgagctggttgaaatttccgtaactcccgatgaaaagtttcttgaagtagaaaagagcaaacaatataagaatctgacaaaggcacgtatttatggtatggatttcaccttcaactatcgtcctgcaaaatctctcagccttgccggcggatatagttatgctgatccaaaagcgcaatatcctaacaaaggtatagattatatgaaatatcttcctattgatgctacttccagccataatgcaaatttaaatatcttatggcaacattcatggaaactgtatcgtttgggtatcggcatctatggcagatatcagtctacacgccgttatataaatgataataatgccgacggattccaaacttggcgtatcaacacagcccactcattattaaaaatgaaacggtggtcattaacgatgaatgccggggtagataatgtatttgactatgtagaccgtactcctttcggacggaatcgtgccacatcaactcccggaagaactttttatgtctccgccctcattaaattcaaaaacaattaataaccaacaatttataaattaatttttattagtatgaaacaattcaagtattatctgatggcggcttttgttgctgccgcaacttgcacaggattcagttcctgtagtgacaatgatgatgaagaaagtactgttaatcctgctgtggatgtagtaaccagaaccaagcaacacgacacagccattttgctctgtacttttggcagtacctataatgagtccctttctgtttatgatgatgtgattgaggattttaaagctaaattccccaatacggatatttatatgtcatttacttcacgtacatgtatcggacgtgtagaagcatctaccggcatagcacgttatgaattggaccaatggttgaaagcaataggcgatgcaggatacaaacgtgtggctgtacaatcattgcatgtaattccaggcgaagaatatctttcattaatgaatactgatgtaaaaaaatactttatgattcaatggtatccgcatattgatgtattgaaaggtaccaaccttctttccagtgcagaagatactaaagatgtagcagagatactttacaaacactatgagtctaaattagcaggcaagaacaacatcgtgcttctaatgggacacggtaatccggatgagaattacaatgctaacaaaaagtactctgacatggaaaaagcattgcaggaacttgctgccaacaacaatatctttgtaggtactgtggattatggtgacatgcttttcttcccgaaagaaatagaggaagaaccggctaatagaattcctgtagaaggatttgacaaaacccaatatcccgactgtatgtactctaaggtgatgagctattgcgaaaagaacggtctgaacccatcagaagtaaatgtttatcttgcacctttcatgtcaattgccggtgaccatgcccacaacgacctttggggattggaagctatggccgaagatgacgatgtaagtaatgtggaaatcaatacaaatgaatatagctggcgtgaacgtttggagaaattaggattcaaagtggacagaacattcgaaagccacccgatagatcaagccggagctgatcatggtattaaagacggatgtaatatgaaagcccttggcagttatcctgagattcgccaaatttgggtaaaccatttatatgaaaactggaatgacgacagtgcatgggagaatggtgaagactatcaaccggaagcataaccaacttaatatatttatctgaaaaaggcggaatttatttccgcctttttcagatacgccaaaaccgataggtaatatctttcatctcatccccgtatatccgatagaaatgctgattggtatcaggagatttcaagccacccaatttttcaatatacggtcccaactttatatattcaaagttctgaacggaaagaccttccggcaattcattcttccccgaataccaacccacctttaccaaagcgatagactgtcggtgaagaaatcctgccaacctttccacttcaaagggttcggcatcgcctcccataaaacagacgcaagtcaccgcctttccatacttctgtaaaagatgcccaagactttcttccgttaaagattctcctacattttccaacaaatgagggctatgacagcccttgcacctattgggacagttagagagattgatcgccagagtgacttcatccggaatttcttgaaatacgatgtcataatcaacgtaacggagcataatatctttgtgcagcctccttctgccttgcctgagaaaaattactgatccgcttcatgtacccgataacacgtgtcagataatccacattccgactatgacattcaggacattcatgcaagtatctcttatcaatatgcttacattcattgcaaatggtattcggtatattaaatgtaaagtaattacagccttctatagcagctacccgaagtagttgtctgtactgctccttactaagatgttcttccaaattcatgtgcaaggccgagcctcccgttaaatgctttatatagcggcgtccatgcagacggaatttatcgacaacattcaacgatttgtcttctacaatatagaaataactgttataacattctcggaatgtttggaagcctgcttctttatcccatttagcgtgcttcactcctacattctcagcaggaatcatttcgcaattaaacaaaacatcctttgtacggtacttcctattatatcgttcaatcattcctaaaatctcctgaacaaatgcttcatacttagggttatcattgatttcaatacccataaattgcgctgcttccaccaaaccattaacaccgatagttagatactgacggttcatattgatgtaaccagcatcaaacaaaggcagcatacctttcgactgcaacaatttcagattctcattataagccaactggactttgtgtaccaaatcaaccacttcttccaaaaaaaacggataaagtataccggatttcaccgcatactggatgcaacggttcaaattaatagtcagcacactttttgagcctgtagaaaccccacctgctcccaaagtatagctgaaaccattgtcctgtatctcattgcgaagacggcagcaactacttaaagaatctgcattatcactcatataagtaaagaaagaatgaccttcggaatacatttcagccgtaaagtcaccatattccttatctaatacatcaccatctttagtcaaaagcgccattgtttctacaggaaatgttaaaacagtacgtgtacgctctttattaaaccatttcatgaaacgtttctgcaaccaacttagtgaattccagtcaggttggcttccatcgggaaaaaagaagttaccaaaaagactttcaaaataatatttgtcatagtaagctacattccaaaagacggcttgaaaattacgcgcccctgtaggctggttaatagaatatactatttgctcgaaacagtctgtaatgattttgtctattgttctttgtttggtagataaatcaacaatcttatcgggatacttataatattcctgcccatattccaaaccaatgaaataattcatatacatcaaaaactctggagtagcacaggcaccacttaacatactggatacaataaaaaccatattgacaaatccaccacaaaaagatttcaagttagtaggagccgtagagttccctcccactgctatcgtaccattattcaaccaaggatacatagtaatgctggcacaataattagccagattagtttcatcatttttataaataaaatgatgattcagaagttccaaataacgatcggacaattcctttccatacatgtctttcaaacggtcagtcaacagacgacggttgagacgaataaaatttgatttgggtaactctcctatcagcgtagcaatattcttattctccacattggcattcgcatcatatttactgccggttgccggattggaagcgtcacaatagtcaagcaaaaacttcagtttatctctcacctcacgatcctccaaatgtttctgacgatacagcatatacgccttggcaacactgtaataatgttcagccatcagggccacctccacctgattctggatttcttccacattcattccatcactgacactaacgcgactcaatacagtagtaatcacatcctgggtagcaaaacttcctactgacaaaaatgctttggctattgcatttttaattttatcaagagagaaagtttcttttttaccatctctcttaataataaatacctctgaattaatcatacttataaattaaggttatacaaaacacacattattcaatataagtctttcacacacgacaattcatggaaaccagtaataaaaaggatcagtatgattcgttctatcgcctttcacccgaaagccatgaatgatataaacaataacggcaggtcttctgacttgtttccgttgtagcgccttcccggttttcacaataaccagtggctaagaatgtcacaacacttccccacactatgggaggataaaacttacagctacggggatagttcctgatttgcacaggattcccttttaattccgtttcgcgccaacggctaatccggaaaccgatattactgacaaagtaaggaattaaatcaataaaacaactggaaaaagaaaaaaaacttcaagcaacacttttttcatcttttccgcttcgtttaattataaaatccattatctttgccccgaattggtttcggatagtctatctgctattcggattaaaagggaatcgggtgcaaatcccggacagtcccgctgctgtgaaactctgctggaatcttgaaaaatacctttgccactgatgtgacaatcctcacatcgggaaggcttcaagataaggagtcagtcagaagacctgccattcattaaaggctgtttttactcgtgggattaggaaagcagtacgaaagaaaataagaaaataaaaaatttacgggaggaatgcctatgaaaaaggtatgtccacgttgtggtgcaacatttgattgtatgcacaatgatattttatcgtgtcattgcgcaactgtccgactggatgctctgcaacgcacctatttaatggagaattattccgattgcctgtgccatgactgcctgaaagccgtcaaggacagtttctatgcctgcgaaattaacccccgttataataagaagaaaaatgataaagaaagtattgattgcaaacagaggtgaaatagccttacgtgtaatgcgttcctgccgagaaatgggcatacggaccgttgctgtcttttcagaagccgaccgcacttctcatcatgtgatgtatgctgacgaggcctatcttataggtcctgctatagccagggaaagctatttaaatatagaaaaagtaatagagactgccaaacgatgcaaagccgatgccattcatcccggttatggttttttgtccgagaatgctgattttgcccgccggtgcaaagaggaggggatcatctttatcggcccttccgccgagacgatggaagcgatgggtgacaagattgccgcccgtaagcgtatgattgccgcaggcgttcccgtggtccccggtacggaacagccgttgcaaagtgccgaagaggcggtacgtatctgtaatgaaataggctatcctgtcatgctgaaggcttctatgggaggcggcggtaaagggatgaggctgatacacagtgaagacgaagtggtggaggcatataacaccgcccgttccgagtccatgtcttctttcggggatgatacggtttatctggaaaaatttgtggaggaacc

SEQ ID NO: 3942 - DNA, 4681 bp, Unknown
  gut microbiota DNA sequence
aatatatttattcttatttcgaactcacgttaatattatgaagataaaccaaacgaaccgatttcatccaatcctgattgaacattttttatcgtggacagcgtagcataataaaaagggtgtttccttttgaactgagattccgaaagaaccaacagcacaaaaagaaacacccgaaagacgtttactatacccctccctttgcacttccttacggaagcatcgcagcgtggtaaagtggtagaaaatcatcagaaacggatacggaaacgggtcagtttatccggataggtacgaagagagaaagtacacccatgttttatcaaaacttcacgaataaaaataagaccgataccctgtccgttaggcttggtggagaagaaaggactgaacagcttggtttccacctctttactgataccggcaccggtatcagcaatttccaacatcgtaggtgatacggaagtacggataaagatatctcctgtttccccgatactttcagccgcattcttgataatgttgaccagtacttgctcaaacagggaagtatccatcatcacttcgggattctctttacataaattaagatgcagcgtaatcttgcggttacggcaaaccgtttccataaatgtcttgcaagcggccacgcggtcattcaagtccactgattgtaattgaggctcgggaatcttcaccacattggcgaaattcgtgataaaacggctcatgctgtagcaacgctctatgcagactttcatcacttcgcgcaagtcttccgtatcctccatacattccaaggcaccatccaccgtatcaagagtagaggtaatgcccgcagtcgtattattcacctcatgtgctatcatacggatcactttttcgtatgcctttttctctgctttcaccacctcggaagtcagactttccaccagaataaacggatgagaaaagcctctgtcaacaaaagaaagccgggaacagcggtaaatcatggagtcactcagacgaattgtttccgtagtatctttgggaatacgttctatttcttcggccaaaggggaagccaactcgcacagcaatcggcctctgacttcctctgacgaagaataatccaaaaaacgaagagctgccgcattcagcatggaaatatgtccgtccagagtcagtatgacaactcccataggagaagcactgaccagcaggtcaagaaaatgattctgctcacgcaaccggagacgctcgtctttcaactgctccatcatgcggttgaaaaccaacacaatgcggtcggcttccttttgtccgacaggagtcagcctactgctgaaatcctgctcacgaagaagttccataccgttgccgatgatatcaagcggtttcacgactttgcggtagaaataaaccagaaacacaagactgaatgtaatgactccctctcctatataaaacagcgcaccgcgttccttcaatgtaagaacgagcaggatagtccatactgctgtcaacagtaatgctaaaaagaagaacaagaatttcagtttcatattttatccggttccgtttttgctaatcattcacttgtatattgtatttctccaaacggcgataaagagcggcccggctgattcctaaggctatggcaacctgtgacatattattgttatacttttcaagcgtttgcagaatagtctgcttttctatctcctccaaggtcatgccttgcagattcgttgtcatcttctgttctataggatgctggtattgtgatttaaaatcatccgcagtcaatatttcctttccactgaccagcaaggtacgttccaccaaattctttaattcacggatattacccggataaggcaaacgactcaaataatccatcgcttcagaagtaaattccactttgggaagaccgttcgattcacattgtttgtcggcgaaatgacggaccaataacggaatatcctcacggcgttcgcgtaatgccggaagatgcaccgtaattaaattaatacgatagaacaaatcctcgcggaaggtgtgttcctgcaccatctgccgtaaatcggcattcgtcgcactgaccacacggatatcgactttacggggacggctgtcgcccaaaacttcaaaagtctgctcttgtaacacgcgaagcagtttcacctgacagcttaaatccaaatcgccaatctcatccaagaaaatcgtacccttatcagccagttcaaaacgtcctaccctgtcggatgtggcatccgtaaacgcacctttcttatgaccgaacatttcactctcgaacaaagtatgagaaatacctcccaaattcactttcacaaaaggtttcttgctacggggactgttcaaatgtaccgcttcggctatcaactccttacctgtaccactttcaccggtaatcaagaccgatgcgttggtacgcgctatccgcttgatcgtggccagcacatccatcagtgccttactctttccaatgatatggctacggttgaagccgtcattatcttccaccggaaccgctgctttcttatcttgtgaagtcagttccaaagcagtttctatcctttgcatcaacgctacgttgttccaaggtttggtaataaagtcgaatgcacctgcctgcatcccttgcacggcaagctggatacttccccatgccgtcatcaatataacgggaacatcgggccggaacactttgacctgtttcaaaagcgtcaatccttcttcaccactggtggacagggtgaagttcatatccatcaagattaactggggtgcaaccgaacggactatttcaatagcctctttgggacccggtacggcctgcacatcatatttcgccctttttagcataaagctcagagaagaacgaatggcactgtcatcgtctataattaatatcatactgctgcaaatgtagaaattattattttaataagtacaaagacaaccccattttatattcaaacagaattgaatagtaaaaatcctattgtttgataatcttttcgaaatcggcatcaatattagtattggtattgaaatcccacaatgtcaagctgcgcaactggtaataatagtaccaataatagaacaactcattgatatgcttctgacgagcctcatctttctttgtctgggagtcattcaaatccaatgtcgagattttaccaaccatgaaggtttccacattggtactgtaacgtttctgggcaatcttgtccgcattgtctgctatctgcaactgggcctgctgattattgaactgttctacaaggataaacagattctgattgaaattcatggtttcctgacgtaacttgctttcggtcacatcgcggttactttgagctatctttacctgaccacgacgttttccccagtcaagaataggaatcttaaaaccgacttccacaatctggttgtctttcaaacggcggtatgcactattaaattcattgtctgttcctgtaaaacctacctgtgcatagagcttgatttcacgtaaattacctttcgccttagccacttcaaaatctgcttccaactggcggcgacgaatattatgtgcaaatgaattattggcaagtgctttgtccaaaacatccggatagttcagcaaaacagtcggaatcgtttcgggaacaaccggctccagttcctcatcctctcctaatgccagaaatgaacggagtttgaacatattacttttcaagttgctttcattttcagtcaacgtagaacgggcattcaatacattcagttccaattgcaacaaatcattttcactgatctgccccatgctacgctttgccttagccacttcatacagtttatctgcattcttcagattctgtcgggcaatgcctacattttccttggccagcaacaaattgaaaaaataattgatagtagtcatggttacctcttcggttgcagtaagaaatgcggctttagcttcagcgtatctcaccggttcgatgcggcggttccatttaatcgtattcactccgaaaataggttgttccaaagtcaatgccacaggaacagacatatatcgttttgatttatctccatccagttgtttcaagaaatcaagagaggtattcaatgagagtttaccaccggtcaaccaaatattctgatcgatagaaacttcaccattcatttccatataattattacgtacaaatgtataagcaccgttatcctgctgataagaattatacttcttattatagctgggaatagtggcttcaaaattcatttccggaagcaaatccgcacggaaagtacgatattcccaataagcggttttcagctcgtttaaagctacggccgcatctacactttgcacacgggcaatagtaatggcttcctccaaagtgatggcacgtcgcttttcttgtggctgcgctccggcaaccaacgatatgccaaaggctaaaaatagagatattacttgttttttcattgcgttattattctttttatcaaaggtaaggcaaatggtatgccaaaaaactatttcactgttttataacaccttacaacaaaaatggagtgtccgaaatcggacactccattcatatacgaacactgctgatcatgtgacaatgaaataatgtggcaacatattggcaaactgataaactggcac

SEQ ID NO: 3943 - DNA, 45641 bp, Unknown
  gut microbiota DNA sequence
tccaatgacaatcattccagcaatcagaataaaagtgcccagaaccgtaatcgcaaaacgacctgccgtaaaaggcatacgtgtaacttccaccagttcggcatatcccaaattccacgccacaaccaatgcaggaatagcagatatcagcaataacaagactccttcccccatcagacgaccgcagattccccaacgggtagatcctaaagccatacgcaacgctatttcggcacgccgatgctgtgtccggaaccagaaagttccgataatgcctagaaagatattcagcaataagaaaaatatgatacaaaattgcgtattcaactcattcaccgaatccgtttcataagctgtgcgtacatcactcaaaggagttatatccaaaagatatagattgcccacctgatattgacggtcggcatccactatcaaacggtctatgaatccatcattctgtccctcacgaacacgcaggcaaacttctatataaaccgtctcacctaaggattccaacgcctcatctgtcaggtacacagcagcataacgggagccgtaatcatccggagctgtaaaatggtcataacggaccggctcggtaagagcagctatagaaagatgctccgcctccggctcattccgccaaacaggcaccctacgccctaaaagttccttaccatgccaaggtgcatcctgataaacatcggcaatattcacagataagaccatgccggacggtgtcagtgcctcagcaaggctttcactacccgaaccgtctatattgcggtaacggaatacattaaaatactccggagttatccatcgtttcaaactacgtaccgggactgtatccagataaaatgaaaaactgtttgcaccgtcattataaggtatacagttttgcgagaggctgactgcttccacatccggacgatgcgcaagcctgtttacaatttcatgcaaatcggcaacatcttctttcatagtacggccaggctgataagcagccgccttcgaagtcatccgctcaaaacgaagaacatacgtattttctatatcaaagcccatcggcaaattatagatgctcaacgtgacatataccacatccacaatataccataatatgacaaacaccacaaaaagttccatccacagaaacgcattgctgcggcgctcgttccatatctgtttcaataaattcctgttcatgatctaacgttggtttaaagcgtccgtaatattcatgcgcgatgccctccaggcagggatgcacgctgacagcaaattcaagagcaggcagaaaatgaatgcggccaagaatatccagggactgaacaacatatctgccgaaagactggtttctcctatttgggcacggttctcgctattggaaaataagaaatcattcaataaaaaagtacatgcataactgaaaagcattcctactgctccggctatgagcgtcaataataaattttcataaaacacttgcctcaacaagacattggcagtagcaccaaatgccttcctcactcctatttccgacatacgcttccgcatacgggacaaagtcatgctactcaaatttatagccggtaccagcaataaaataacaatcaccagcaggtagtgcaaataagcttccttcgcctgtaactctcttccccagtgacgaaagataaaagagaaacgatcatcgggttgtccacgataaaaaatttcggaatcctgcaatccgtcattgaatttctgacgcaggcgttccgcctcttctctgatggcaggaaaatctttctccgaatgtgccagaatgaccacacgaaaagttcccatcgcattgtcataccagcactttctggctatttctgttgaattgaaaggtatccaaatctgtgcataagaagaaacagccagtttggatacgtctttcacaacacccactaccgtataatcggccaagttgagttggaccgtacgtcctaccgcttctaccgtaccaaacaaattccgggccacagaagcactaagtacaaccttaggaagtccgctttcactatcggcagccgtaaacggctttccggcaataaaatcaaaagagaacactttccaaaaggtatcgtcagtttcaaggttatccactgtcatcatttttccagcaggtacagaaatacgcatcctgcctcctgtagacactatagttaccgcctcaggaacagtaagtgccttaaaacactctttagccactgtgagtgacatacagccgtttgatgaattatcactggtatctcctttctgatgaatagacatcgctttcatataaagagaacgtgaacggttcacctcgggcacacaatccgtaatgcgtacttccaacaccaggacaatgaccatgatcatacaaatagccaatgccgttcctatgatagaaaccaagctgatgagcctattctcacgaagttggtaaaaagcctgtttaatatatagttttatcatgtttgtgctatgctctaaaaccttttaacaaaaaagagattactcattatgcaatgcttccgccggctgaactttcatagccttacgtgcgggaatccaaatgcctactacaatcatcaatgcaatcaaaataaaggaaataagaactgttattatgaaacgtccaccttcaatagtagtgccattcatccaagcattcaattcactatttgccagattccaatcaataaaaatcgcaggaattgtggccaccgccaataatatcaatccctctgccaactgacggacaaagatactatgatctgttccacccaatgatttcatcaatgcaatctcaccacgtcgttgctgagtacggaaccagaaagtacctagcaatcccaagaatatattcaacaacaagaaacccattccgaaaaggtaactgttccaggcattcgtatgtgactgctgaaagttacgacggatatcggtaaaagaacgcacatccgcgataaacacattgcccacgcgatacagtttctcactatccgctttcaaacgggctataaaatcgcgatcttgatcctcttttacgcgtacacaaagctccgtgcccaaatcataccattcttccggcataggagccaccatgcagtaactgttccatgcctcaaaataatccccataacggacaacctgcaaagaagccgctaaattatatgtattcgttgtatccccgaacaaataaaattgtttgtctaccaatgaagtcaaatcacatccatagcgccgtttataaagattatctgaagctaagaaattcttcggatgtttcagcatctcagccagttgttcaggggtctccccacgggtgccacgataacggaacacacggacaaaatcgggagacaccaatctgcgtatagtccatcccggcgaacgtaatgtatcatacaccactgacgcactgctgttactgccattatacgggtaagaattttgtcctaatccggctgcctctatgtccggtctatgctgaagacgacttagaagttccttgatatcctgccgcttttcctcgtctgtctgattgggaataaagtctggacttttgtccgtaagacgtcccatttgcaccaaatagcaatgagaaatatcaaatccccgtggttcattataaattgaggtctgtacatacatatagtccacaatataccataaaacgacacttaccaacaataattcggtgacaagccaaagattagaccgccattcattttttatctgagtaaatagtttcttattcatcttgattctttacttttaattcgttatcaccttagtgaatccttcctcccagtgcattgacaatgctagtccttgaagccctccaagcaggaatgccgctactcagcaaattcaaaacaaagcaaaacagcaatgcataaaggaaagtggaagggtgcaataaaatactggaatcaactgtaggggcattcaatgtcgcactataaggctgtgcaaacaggatatcggtacctaaataagccataacaatactgataaacaaacctacggcaccagccaacaaagtcacgaccaggttttccatgattatttgtccaaccatttccatgcgggtgctcccaaaagcacggcgtactcctatttccgccacacgttggcgcaaccggctttgcgtcatactgctcagatttatagcaggtactaacaacagaatgataaaaatgatagcacgttcacgacgagccgacttcaaatccggctccaagttagctgcaaatgaaatagactgagtttcctgatcgtatggccggttacggtctatcaacgtatacccctgatcggcaagaatagaattatactcactcatacgccgcttggcttcagcacggatttctccaaaatcatcatggcttcgagccaaaatagtgacactcatcatccccatgtgctggtcactccacgtatcattaggcaaatccgtcgaagtaaagggaatccatacttggccataagaagcatcggcaagagtagatacatctttcactacccctaccacacgatagggagcatgattcaacaaaaactctttgcccgcagattctgtggaaccaaacaaagcccgcgatatgctctcagtaatcacagccacaggagtgcctgcattgaaagtagcttcatcgtatggttttccattcacaaaacgaaaatcgaacactttaaaaaaagtatcatccgtttcccgcacatccgctccaatagccggcatagcgggtaatgaaacaggagtcgataccggcatactgcaataaatagtgacagcttcaggggttttcaatgatttatatatctcacgcgctgtccgcacactcatcggtccgttacttgttccgtccccccaatccttatgactaatactcatataatgcacatgcagaaaacgatcccggtttgactcgggagaaaaaggagcgaccttcacttgttgtagcatcactaccaacataataaggaaaatgctaagagcagttcctgcaatgctgatgacactgataagcggatgctggcgaagttgcgccaaagcttgcttaaaatactgtttaatcatctctgttatttcttaataaattccttttcatagtaatcagtagttattgcacctgacgcccatcaaagaaacgaatggttctggaagtctgtttggcttgttcttcattatgggttaccatcacaatggtccgtccatcctctttatttaatttatgcaacaattccatgacctctgcacccatctttgagtccagattaccggtaggctcatccgcaagaataatttcaggattacccacaatagcacgggctatcgctacacgctggcactgtcctccggaaagctgtgtgggcatgtgccgcatacgatgacttaaaccgacacgatccaacacttcttttgccagacgggtacgctccttggcagccatctttctatagagcaaaggcaactccacattgtcaatcacattcagcgaattaatcaggtggaacgactggaatacaaagcccaaggtcttgttacggaaagcagccagttccttgtccttcatgctttctacagacgtgccgtttatttcaatctttccactgctgggagcgtccagcagccccataatattcagcaaggtagacttgccgcaaccggaaggacccataatgctgacaaactcccctttagccacatccaaatttacattttccagcgctaatgtttcaatctcattcgtacggtagattttattgataccggttaatttaatcattgccatatttttttcttatttaaattgttaatcttatacactttctattttcatgaatcaaaagacattccaaagctataatcatttaatattcaacgaattttaattctacatactgtccgataacagacggtgtgaccgtttttaccggactaatacgactgatgctgtatgccggaaaaaaatgtcaacaagcactatgaataatataaaaaggtaaacgatcaaaaaaacgacatagcctaagaacaaattaaattatgttcgggaaatgagtgaaaaggatgaaaaaacacttcatttcccgtaacaatcaatgtattaattaagagagagttttatcttgttgtttatgtcatagctgcttcttatttcaacttcagcttattcttgtttttgtaactgctcatatcgctgacaaccaccttgtcacccggtttcaaccccgatatgacttccacatattcaaaattactatcacccaattgaaccttacgctttactatttcatccttactatcctgaacaaataattcatactcaccgcgaccgacatagtaagaagcattcgccaatcttaaaaccccttctttcacggcattcattacatatacatccgtcttcaagccggaacgcaatcgcttgttattatcttcattcaattgtacaataaacgaaatcaccccattcttactcaacggtgtcacactacttaccgttccttccagtttctcattgccaatcttgactatggcacgtccacctgctgccacacggtcaccgtatgtatcggctatttcaccttccactttaaaatggctcaaatcagaaatgatagctacctggctgccttccgctacctgcgcacctacctgattatttatataggtaagaatcgctttacgcggtgaacgaatttgagcgtcatccaatgtacgtttcatttcagcaagactctttgagaaaatattgaattccaactccttcactttcaaatcagcctcttttactttcgattcattcgcgtattgctgacggagctgttccaattccaattttccggtattaaagttcagttcagcctgacgaaccttgtccgttgttccagagcccaaactatccaaataacgttcgttacgaagttccacctccatacggttcaatttcatggcggaaattttcacttgcatcgataaatcactcagatacgtattattattcactttcaactgctctaactgataacgtttcatctgttcttcatccagtaatttcttgtattcagtttccgtactctgcaaatcaagtttcaaaatcggcgtacctacatccacactgtctcctcccttacggtaaacttccacgatacgagtattaataggtgagttgataatctcttcaaaagccggaacaaccttaccggaagcactgacacttacttcaatagttccattgtctacttctgaaaacaccaaatctttcctattgacgctgcttcgcataaacgaaatcaatacagctatacataccactgccgccacacctattgcaccatatttaatgaacttctttttgcgctccttatcacgcacttctttaggaatttctctgtccataacttattgtaattttattattatcatttttgtgctaaagaataaacaacatccgtgccaaggaaacaacttattgataatcaataataaataaagcgtacagggtgtccgatatcggacaccctgtacgcttttaaacatcagttaccgtacaataatgattaacgcaaacgcaatatatcacctactttaggagaagggtcttccggtttcatcttattcatcttatataaatttttcagacgaataccatacttttgggaaatggaatacatagattctcccccacggacaacatgaactatgtgttccttatccgcacgacgatgctttttatccaaataaataatatcgcctggcttcaatacatatcccttataaagatcattgtatttcctcaacttgcgttgactgatatcaaattctttagaaagttttttaaatgtatcccccggacgtaccacaatatagagtaaatcattagccaaataaggctgatgcgggtttgggaattccttcatccactttataccatccttggtatcatacttatgtaattcatataattcaatgatatcaattaaacgatatgcatagcgagggtcagtagcatatcccgctttcttcagcccatgcgcccatcctttataatcggtgatttttaatttaaaaagagatgcataacgtgaacgtccttttaaaaatttagaatgatcttcatatgaatcacgagggtgcttataggcacgaaaacattcattacgggcatcatcatcatgccgtacagtacgaccagtccagtcaccaccacattttataccgaaatgattattggatttacgagccagtgtactttttcccgctcctgattccaataatccttgagccagagtgatgctggcaggaatacgataccgtttcatctcatcgatagcgagatctttatacttatgaatatattcctcatactgccggttacgggtttgcgcttgcactgtaaaattacatagacaacaaaacaacccgattaatataaatttcaacgtatgtttcatcatataaaactgtttcaaaatcgcgactatactttttccgctatatatagttgcaaacttaccatttttatccggctgtatgcaatctttttaaattaattacgaatttcattcgaattccaaaagtccaaagaaatccggacgatgaaaatccggcttctctattttaataggattccatgataagaaatgaggcttttgcaattcatctccacatttataaaaattagcccgtatgctcattccatccagcccggtaatggcatgcttaaaaaataccttatacggaatcagcaaagccacctcccaagtacattctcctatcttttcttcaaaagtttctctgcccaagctagcccaacgcttcacctgatccgttatttcagaaggagccatttcacgattattacgctccgaacctgctgctaaaagaatcgtagcgatacagttacattccaaattataataaatgccatctcccgcaggaatagagaaaaattccacgcaggaatctgtccaaacactaccgttatcttcaccgtatttggcacgaacactgtcttctactactttataatggactaatatagcatcatttgtataggctatacgaaaagagacttgaggttgataaggatattctttccagttcactatattaataggatgatacgtaatgttctcattatcaaacaaggtcggtatttgtcgtgcatcttgaactttaccacttaatttctttactttcatcgtattgtttttattagttaaatagctactattagcttcacaaaaatatatacttccactgagaaaacaaaatagtggctaccataaacagcagccactaaaagaataaagcaataaagacaatgaaagcacaatttttacattttcatccatatttatttcttcacattgccctgtggcatatgtcttctcccatcatgctgctttttcattccttgtctttttctcatctctttacggaatttatcgccattgtgtttctccatattatacattttctgaatttgtttaggagaaagaaatttccggaactcattataatacttctcacgaacatccagtatctttctactctgcgcgaaacgtgccttgatagcctgctccacttcagcatctgtaggaagcggtttgggggtctgtttatctgcagccgttctatttgcaatatttcgacaggctcccatatgacgagtagcccgcatttcttccatgtattgtttatacaccggaataaatttagcagtcgttgcgtcatccaatgccaatccttttataatttgattgcactgtatttccagcatctgctctttattaaactgccttctttcagatttagctcctttcttttcttgtgcaaaaagtgttacctgacttcccataacaatggctgccaacatcattaaaaaaaattttgttctcatcatttttttgtttttagtgattaatcaatttataaatatatcattttcagataattccacccatcctgctaattcctcatcagacatagattctatataacgatccaaagtatctgaataagaagagtctaaatccgtagaaacaataagtgaaggagaaggcaactcctctgccacaggttgggatatcggaaagaaaagaactcccaacatgacagccgcaatagctaaagcagccccaataatcaattttattctatgctgcctattaaacctctcagcctgtgtacgctccaatacttgtttctgcatttttccgaaaaagccatcaggggtacgataaggcatccgcttcccaatattcttaaaatcaaactccttttccatcctgtctttaattatttatcatgtactcttttatcttctcttttgcataatgataattcactttcaacgtatccactttcgtgtccgtaatcctgctaatttcctcatattccagttcatcataataacgaagattgaaaactacccgctgcttttcaggaagcatcaaaatagcctgctgaaatttcaccgccatttcgttctcataatccacataatctgacgccatcaacttattcattaactcttcctgaacttcttccgccgaaacagcttgttccttacgcatattcagaaaacggagacactcattggtcgctatccggtaaatccatgtccccaatgaactttcctccctaaactgaggaagatggcgaaagacgcgaataaagacttcctgcagaatatcctctgcatcctcatgtgatacaaccaatctccggatatgccaatatatgggctgttgaaaaaaatctatcaacaatttaaatccccgttccgggttggaagcccatacttccctaattttatcttcgtttatcatctattcgtcaaaagtttataggttagaaccacctgagaacaagaagttaaaagtgaaaatgaagtttttacattaattatagatgaagttaaaataatcaatcacatttcctacaagagaaaaatacaaccaatcttccggaatatgaatttaaagaattcaaactcaatcttcctatcaataaatttcagttcttagaagaattaccatataaacaatagggaaatccctaaaaataaataggggaaaagatagaagaatataccttttcccaacttatctttgttacaaacaaaaaaacaaaaaaatgagaagattgaaacaaacattattagcgttaaccatttgtactttagtcatcagttgcagtttgactactagtagcactattatgaaagtacagagagggatgtcccaagaagaagtcagccatttacttgggaaacccgatttccgtagattcgacaacggctcggaacaatgggaatataccaagaccaatatgtccacagctgcaaacacggtaattattatcgattttgtagacggaatggtaacaaacatggattcttttgagtccaacactactccgcctccagttgcagtgtgtccgccaaatgaaatcattacggtagttccacccaaccaccctgatcattctggcccgcacagaccaaaacacaaagccatgaatccacatgattttgaaaacctctataaaaaagtaaaaaacaaagcatttaaggacgaccaaatggaattattatctgtaggagttgtaaacaactacttcacctgtaaacaaactgcccgactcatgtccatatttacatgggacgatgaaaaaatgaaagtattaagaatgatttccaaccgcattgtagaccgtgaaaatggaaaagaaatcatcaagacactggattctttatttaaacaagatgatgcacgtaaaatattgggaatcactaaccaatggtaattcaacctaaacaacacacaaaaacataaatatatgagaaaattcaaacaactattattgcttgttatcagtataacacttgtcagttgtcataccacaggaagtatcaagcagaaagcatggaaagtacagcagggaatgacaacagaagaaataggccaacttcttggaaaacccgatttccgacgtttcgatggttctttggaacaatgggaatatcagagcggaggaattgcaacgtcttgcaaatttctaattatcgaatttcgaaacggaaaggtaacaagcatggattcctacaatgaaatagctaaagagacttcagtaggagacctaaattccagcaaaatatccctccataccgttggttcaatagacgataacgaatttgaaaagatatacaatgaaacaaaaaattccgtattcaaagattcaactctggaaaaagccattataaataaaaaattaagttgcgcacaatgccttaaacttatgtcactttatacttttgataatgacaagttaaaaatgttacaagtactgaaagaccatatagctgacacaacaaattacgataatattgtcaactcactagatttcatttcaagtaaaaacaaggccaaagagatattaggaataccctaatacagtaaaagcaaacgtacctgttgcaataaacctaaaaaatattgcaacaggcacatctgctttacctcaatcttctattctgacagctgtgccgcttgcggttaccatcagcatactaccactgtcccccacagtttcataatccaaatccaccccaactacagcattagctcccaataaagcagcctgatcctgcatttctcgtaacgcagtatctttagcctgtcgaagtacttcttcataagaaccggaacgaccgcctacaatgtcacgaatactagcaaaaaaatcacgaaacagattagcaccgataatagtttcacctgttacaatgccataatatttggttatacgttttccttcgatagtaggtgttgttgttgctaacataatctttctcttttttaattatatattcattagacgcacaaataaaagaaaaagttgcaactttctcctttttttatcggtaactatattattcttctcacattcaactccgacaagcaataagaaaacaaataaatttaaaaccagattttagaaaagaaacattgggagattaaaaacaaaacattacatttgcaagaaaacaaagaggaacgtatcatgaaacaaatcaaactggaaataaacatagaggcttgccattatgacgaactaacagagaaggaccgcaaactgatagacgccgcgtgtgaagcaacgaaaagaagctatgctccttactcacattttgctgttggagccgccgcactgttggaaaatgatatcgtcattaccggaaccaatcaagaaaatgcagcctacccatctggtctttgtgcagaacgtaccactttgttttatgccaattctcaatatccggatcaagcagtaaaaacacttgccattgctgcccgcacagaaaatgattttcttgacacacctattcctccttgcggagcctgtcggcaagtattattagaaactgaaaaacgatatggaaaacctatgcggatactgctttatagtaagactgatatttatatattagaaaacgtaagcggacttttacctttatcgtttgatggaaattacctgaaatgatacctaccatccgtctgcacagccaacagctaataaatccggttttcaataatccgaaagatcttgtatcatggatgggaggcattcaagcgcaagattacaccatgtccaaatgggctattggtatccggctaaaaacaggaaatctgcaaacagtcaatgaggcactggcaaaaggagatatattgcgcattcatgtcatgcgtcctacttggcattatgtagctgcagaagatatacgctggatgctgaagctttcatcccgacgcatcattactgccaatgactcttttgccaagtccagaggacaagacatttcagttgacatttacaacaaagcaaaccgattattggaaaaggcactagcaggacacaatcatctgaccaagcaagaaattgacaacgtatttaaagaaggagggctggaaaccaatgaaagattatccaaccgtttcctgattcacgctgaagctgaaggacttatttgcagcggagcagataaaaataataaaatcaccttcgcacttttagatgagcgtgttcctccaatacaagaattacataaagaagaggcactagctatcttggcacgcaagtattttagaagccactctcctgccagtctgaaagactttgtatggtggtccggactttcggtaacggaagctagacaaggtatagccgccattgaacaagaattgcttactgaccatttcctagcacaaaaattatatgttcatcagtcttataaagaaaaaaaaacaaccgacatattgcatattcttcctccatacgatgaatacctaatcagctacaaagaccgtacagatgtattgaacaaagaataccaacacaaagcattcaattctttcgggatattccgtccggttattctgtacaacgggcaaatagttggaaattggaataaagtcatacaaaaacaaacaacacatatagaaatgaactggttcaagaaaaatacaaaaatcaaaaaagaattactttccctagcggagagaaaataccttacttttttctccgaactgtaagaaaattgtaaatggattatttctgcgtcatcacattttaaaaataatccattacatttatattattcagtattgtaatataaaactctcagctactttcaagaaacgttcatgacctttttcattcaaatgtgcagtatctgtattattcttgctgttctgaaaatatatttttctaaaatgatcattacttgcataaattcctccttttcgggcgctgtcaaaaataggaatactataatttccacaaacctcaatcatagcatccaccactttctcagcatcacttcctgcaaaatttttacagttccatcgggtaaagaaaaaaatcttagctgtgggatacttttcaataagcccttcacacagcattgccagcctctctttaaatacatcaataccgccaattgaatccaatttaaaaccatcattgtgcccacccacaacaataacataatccaaatcatccggcatttccttatatcttacatacatcgcttccccccaacgcgggctactataagcaatgctgctgccgttcttgccataatttaaatattccataccatgtttctcggcaaatttataatgccaggtattcttaacaggttctttatgattcttcacataactatctccaataattcccaaacgttttcctttcaattcatctgtcctgacggtaactcctttaataatttgttccaactgcttatatacctgttgtcccaaatactctgccgaatgagccgtgaaatgaagtctgtcatttaacaattccgcgcctgacatatctatcaggtacatgttcggatcttcagcagccaattgcttcatcgcattctccacttctctgctgaaatatttattacttcgggaaacagtaccaaaaataaaaggcaaacgagaataatcctttcctgttttttctgtcagatgcatacgcacataagccaccattgtcttcaagttacggtaataatctttacttttagcataatcactttccccctgatgccaaagaaatgcatctatctgatagccatccttcaggtgggaaagagtcttgtctatacacatgtctatctcttgaatgaaagaaagcaacaaggagtttcctccatcagaagttggcttagcctgtgctagccattcaggtgccgcagaccaaaaacgtcccttggaagcattataatcaggtgctatggaagttccgccaacagcccatttcaccacataaaatttctcctgcaacaactgctccaaccaataatatgtcactgcatcaaaagcccacatattattttttccgctacgtttggcacgaggccagaaaggaataaattctccctttccgtcattctgagctatctgacaataacggtaggcaccttcggcatacgtcagtgtgtccgtagccaatgctttaatatatgccggcaaatcttcattaggagttcgtccatcggtattagactgtccggcagttataatcacatgtacaggattggaagccatcgtattcaagccaacagctgcaaaaatcaaaatcaaaattaaatttttcataagtatcatttcatgtttttaatggacacaaaaataatcctaattctaatataacgacatggattatcgtccattatcatagatttttgaactcattatgttcatacagaatgagaattgcggctaaaccataaaaaaagagccacaggaacaatggctcccaatgactctttctttttcagttcatatttataatttaattatctccatacatacgcgcacgcatttctttaatatgatcagaagtgatgtattcatcgtattccatcatcttgtcaatgataccattcggggtcaattcaataatacggttcgccaccgtttcaataaattcgtggtcgtgggaagagaacagcacatttcccttataagtcttcagattattattgaaagcctgaattgattccaagtccaaatggttggttggagtatccaaaatcagacagttcgcattacgcaactgcatacgggcaatcatacaacgcatcttctcacctccggaaagcacattcactttcttcaatacttcctctccggaaaacaacatacgccccaagaaacctttcatatagacttcgttaccttcgccaaactgactcagccaatctaccaaattcaaatcactttcaaagaaatccgtattatccaaaggcaaataagccgtagtaatagtaacgccccacgcgaatttaccagcctgcggagtacgatttccattgattatttcaaaaaaagcagtcatggcacgcggatcacggctcaaaaagacaatcttatctcctttttctacattaaaattcacatcattgaacaataccataccgtcttcagtttccgcacgcaagccggatacttccaaaatctgattgcccggttcacgatccggagtaaagatgataccgggatatttacgggacgacggcttaatttcatctacattcagtttttccaacatcttctttcggctggttgtctgcttgctcttagccacattggcactaaaacgacggataaattcttccaactctttcttcttctcttcagctttagccttctggttctgctgctggcgaagtgccaactgacttgattcataccagaagctatagttaccggcaaacatattcactttaccgaaatcaatatctacagtatgagtacaaacagagtccaaaaagtgacggtcatgacttaccaccaacaccgtgtgttcgaaattagaaagatattcctccaaccaagtcaccgtatccatatccaaatcattggtaggttcatccaacaacaagttatcaggattaccgtaaagtgcctgcgccaacatgacacgcaccttttccttaccgctcagttcccccatcaacatatagtgcttgtcttcctttatgcccaatccgctcaacaaagaagcagcatcactctcggcattccaaccatccagttcggcaaacttctcttccaattcagaaactttcaagccatcttcatctgtaaaatcagttttcgcatacagttcttcacgctgtttcataatgttccacaacacagtatgtcccatcataaccgtatccatgactgtatattcatcccacttaaagtgatcctggctcaatacagacagacgttcgcccggtcctaataccactgagcccttagtcggttccagctcacctgaaattgctttcaagaaagtagattttccggcgccgttcgcaccgataaccccgtaaatattaccattggtgaacttcatatttacgtcattatacaacactcttttaccaaattgaatggccaagttcgaaactgtaatcatcctaatataccttatttatataattattctattttggaattgcaaaggtaggcattttaattcagaaaagtatgccagtgtggcagaaattccgtacttttgcaaaattattactctaagaaaacaactaggcacgaaatttgttagcagtaaattaacctaaaagacctgactgttatgagtaaaaataagaaaaacaaaaagtttaataagaatatgaacccaacagagaagaaccaacctcaagacgaggaagttttgaaaaatcaggaagcggcagaagctgccattgatgaagaaactcagaaagaagcaacagaagaactgaacgctgaagagaaggtgaataaggaattggcggaagctcagaaaacaatagaagagcagcatgacaaatacctgcgtctttcagccgaatttgacaattaccgtaaacgcaccatgaaagagaaggccgaattgattaagaatggtggagaaaaggccattactgccattcttcctattttggatgacttggagcgtgcagtaaagacttcagaaacttcggatgatgtaaaagcaatgcgtgaaggaattgagttgatctacaacaaattcctgaaagtattgaaccaggaaggacttcagaaaatagagactgacggtgagaactttgataccgattatcacgaagcaattgcattagttccagctccttccgaagagaagaaaggaaaaatattggactgtgtacaaaccggttataagctgaatgacaaagtaatacgccacgccaaagtagttgtggctcaataaaacagtatcataaaacgacatggcaaaaagagactattacgaagttctggaggtggacaaaacagccacccttgatgttataaaaaaagcataccgcaaaaaagcaatacaatatcatccggacaagaatccgggagataaagaagcggaagaaaaattcaaggaagctgccgaagcttatgatgtgttgagcaacccggataaacgcgcccgttacgaccaattcggacatgcaggaatgagtggagctgccggtggcggttttgaaggattcggacaaggtatgtccatggatgatattttctctatgttcggtgacatcttcggtggacatggaggaggtttcggaggctttggaggtttcggtggtggcggacgttccgcacaacgcaagttccgtggttcagatctccgtgtaaaagtaaaactgaacttaaaagagatttctacgggagtagaaaagaaattcaaactgaaaaagtacgtaacatgtgaccattgccatggttcaggagccgaaggagaaggaggaacggaaacgtgtcccacttgtcatggaacaggaagtatcacccgcacccaacaaagtatttttggaatggtgcaatcacaaagcgtatgtccacaatgtaacggagaagggaaaataattaagaacaaatgtaaagcttgtgcaggagaaggtattgtatacggagaagaagtcgtggaagtgaaaattcctgccggtgtggctgaaggaatgcaactttctgtcaatgggaaaggaaatgcgggcaaacataacggtgttcccggtgatttgcttgttgtcatagaagaagaatcccatccagacctaatacgcgatgaaaatgatttgatttacaatctgttactaagcgttccgactgctgctttaggaggcactgtagaaataccaactattgatagcaaagtaaaagtaaaaattgaaccaggcacccaaccaggtaaggtcttacgcctaagaggtaaaggattgcccaatgtcaatagttatggttacagtaacggtacaggtgatttattagtcaatgtaagcgtatatattccagaaacgttgaataaagatgaaaaacaagcactagagaaaatgcaagaatcggataacttcaaaccgaatacaagcattaaagaaaaaatattcaagaagttcaaaaacttcttcgattaatttttatactacaaagtgtcacagaaagaataccaggttttatatctgcctggcattcttttgtgacactttgcggtaaataaaaacatttgccatgaattacgaagaaacattggattatttatataatagtgccccattattccaacatataggaaaagatgcatacaaggcaggattagaaaacacttatcttttagacaagtatttcaaccatccccatcgccaattccgaaccattcatatagccgggaccaatggaaaaggctcttgttcacatactttagccgccattttacaatcagccggatacaagacaggactttacacttctccacatctgatagatttccgtgaacgaatccgcgtcaacggaattcctgtatccaaagaatatgtcatagactttgtagaaaaacaccgtgccttttttgaacctctgcatccttctttctttgaactgactaccgcaatggctttccactattttgcccaaagccaagtagatgtagccattatagaagtcggcctgggaggacgaatagattgtacaaacatcatccgtccggatctatgtgtcataaccaatatcagtttcgaccatatacaattcttaggtaacacattagccaaaatagccacagagaaggccggaatcatcaaagaaaagaccccggtagttatcggtgaaaccacacccgaaaccaaacctatatttacaacccgtgctaaagaagtaaacgctcctatctactttgcagaagaagaacagttattacactcctccagcataaatgaaaaaggtaaacgaatatatcaaacaaccgactacctcaatctggaaggcgaactggaagggctttgccaacttaaaaacaccaatacacttttatctgccatccgcctattaaaacaagcaggttatcaacttaccgaaagcaatatacgcaaaggattctcacaagtatgtgaactcaccggcctgatgggaagatggcaaaaattagaaagtgaaccgactttaatatgcgatacaggacataatgtaggaggtatttcgtatatcatagaacaattagaacatcagaaatatgaacgattacacattgtaataggtatggtaaacgacaaggatatcagtggagtattgtccatgcttcctaaaaatgccacctattattttaccaaagccagcgtaaagcgtgctttatccgaaaaagaattacaaagcttagcgatgcaatccgggctgcacggagatacttatcctgatgtagaaacagctgtaacagccgctaaagaaaaggctaacaaaaatgactttatttttgttggagggagcagctttatcgttgcggatttattaaaatttcacgtttagtccgttcacttttatagaaaaagtttgggaataccgaagaaaatctttttatttgcattagttttatacataaaataaaaagattttcaataacatgataaacacatctacttccgatgagaatttatgcggcctgaaacgggccgattttcagacaacagtgaacgggaaacaaacagacctcttcattctgaaaaatgaaaacggagctgaaatagctgtcaccaactatggtggagcagtattagctattatggttccggacaaaaacggtaaatatgccaatgtcattcaaggacatgatagtataacccatgttatcaatagccacgaacctttcctcagtactcttatcggtcgttacgggaaccgtatagcaggaggcaaattcattttagaagggaaagaatattcactgactatcaacaatggtcccaactcgctgcatggcggtcctaccggatttcatacccgcatttgggatgcagaacaggaaactccccaaagtttgaaattgcattatttatctgctgatggcgaagaaggatttccgggaaatttggatattcacgtaacgtacactttaagtaatcaaaatgaattcatcattacttaccacgctacaacagacaaaacaacattggtaaatcttactcaccacggttttttcagcctatcaggcattgccaatcctacggcaaccgttgataacaacatcgtaaccattaatgctgatttttatactccgatagataatgtatccatccctacaggcgaaattgccaaagtagaaggtactcctatggattttcgtactcctcaaagagtagacagtagaatcaatgacccattcgaacagctagaattcggtgccggctatgaccactgctatgtattaaacaaacgtgaagcaggcacactgagttttgcagcaaaatgtgtggagcccgaaagcggtcgtagcatggaagtatacactacagagcccggtgtacaagtttatacttcaaactggcacaatggtttcgaaggtgctcatggagcaactttcccagcaagaagtgccatctgttttgaagcacaacattttcctgatacgcccaataaaggccatttcccttcttgtgttctacatccgggggaaacttacaatcaagtaaccatctacaaattcggtgtagaaaaataattttatgaaataacctaattaataaacttataattttttcaaaaccatgaatcaacaaaaacagaacggtaatatcatcgctatcattacaatgttcttccttttcgcgatgatttccttcgttactaatcttgctgcgcctttcggcacaatatggaaaaaccaatatgcaggtgccaataccttgggtatgatgggaaatatgatgaatttcctcgcatatctgtttatggggattccttcaggtaatatgcttgtaaaaatcggatataaaaaaacagccctcattgccatggcagtaggtttcatcggtttgtttatccaatatatttccagtttgttcggtgcagatatagacgtattcaatttaggagaatatgccattaaaatgaattttatcatctacctgcttggtgctttcgtctgtggtttttgtgtatgtatgctgaacacagtagttaacccgatgctaaatcttttaggtggtggtggtaacaaaggtaaccaattaatccaagccggtggtgctctaaactcattgtcaggtactttgactccgcttttcgtaggtgccttgattggttctgttacccctcaaacagctatgtcagatgtagctcctctgcttttcatcgcaatgggtgtattcgtatcagcgtttatcgctctttcattcatcgccattccagagcctcatctaagaaaagcaggtcatgaaaaagagaaattctctcatagcccttggaatttccgccatactgtattaggtgtaatcggtatctttgtgtatgtaggtattgaaatcggtattccaggcacattaaatttctatcttgccgacccaacggaaaaaggtgcgggcctgcttgccaacggtgccgctatcggtggtgctattgctgccatctattggttgctcatgttagtgggacgttctgcaagtagtgtcatcagcggtaaagtagctacacgtacacaattgattgttgtttccgcaacagctatctgttttatattaatcgcaatcttcactccaaaagaaatcactgtctctatgccgggatatagtgtagaaaatggattcgaaatggcctctgtacctgtcagtgccctatttttggtactttgtggtttatgtacgtccattatgtggggaggtatcttcaacctcgctgtagaaggtttaggcaaatataccgcacaagcttcaggtatttttatgatgatggttgtcggtggcggtattttcccattattgcagcaattcatttctgacgctgtgggatatatggccagctattggttaattatcgctttgcttgcttatctgttgttctatggtttggtaggatgcaagaacgtaaacaaagacattcctgtagaataattataaaaacatatagtattaactttaaactattaatatcatggatatagaatacgtaagaagtcgcttcatcaaacattttgatggcacaacaggttcagtatatgcatcacccggacgtattaaccttattggagaacataccgactataacgggggttttgtctttcccggagcagtagataaaggtatgattgctgaaatcaaacctaatggtactgataaggtacgtgcttattctattgatctaaaagactatgtagaattcggcttgaacgaagaagatgctcctaaagccagttgggcaagatatattttcggcgtttgccgtgaaatgatcaaacgtggtgtagatgtgaaaggttttgacactgcttttgcgggtgacgtacctttgggtgcaggtatgtcttcatctgctgcattggaaagtacgtatgctttcgctatcaacgaacttttcggtgacaacaaaatagataaatttgaattagccaaggtaggtcaggcaacagaacataattattgtggtgtaaattgcggtattatggatcaatttgcatctgtattcggaaaagaaggtagtttgatccgtttggactgtcgctcattggaatatcaatacttcccgttcaaaccggaaggttaccgattagtattggttgactcggtagtcaaacacgaattggcttcttctgcttataataaacgtcgccaaagctgcgaagctgctgtagccgccatccagaaaaaacatcctcatgtagaatttttacgtgattgtacaatggaaatgttgcaggaagcaaaagccgagatcagtgaagaagactatatgcgtgcagaatacgtcattgaagaaatccaacgtgtacttgatgtttgcgatgctttggaaagaggtgattacgaaaccgtaggacagaagatgtatgaaactcactatggcatgagtaaattgtatgaagtaagctgtgaagaacttgacttcttgaatgatgttgctttcgactgcggtgtcaccggttcacgtgtcatgggtggaggtttcggtggatgtacaatcaacctagttaaaaatgaactatacgaaacattcatcaccactgccaaagaaagattcaaagagaagttcggaagaagtcccaaagtttacgatgtagtcatcagtgacggttctcgcaagctggtataaaaaagatctcaaattcgctaacatatgaaaaaaccgctttggattcaaagcggttttttcttctttatgctataaaagtgtaggaaatacacttttatgttgcacaacatactcttttcatatccaatgtattagtaatagtgttacttttacacccaaaatcatatactctattactaattagtacttttatatcatgaaaagcatgaaaaaaacctttctgggaaccggtatcgcactgaccttgttaagtgcttgcgctcccaaacaatctcaagaaacacttacaaagtccggattaaaccccactaattatgaaacaatagtggatggcgtaaaacctgttaaactgtatacgctaaagaatgcagccggaatggaagtatgcgtaactaattttggcggacgtattgtatctatcatggtccccgacaaaaacggaaatctaaaagatgtagtgctgggttttgacagcattgctgactaccaaaatataccaagcgacttcggtgcttctatcggacgctatgccaaccgcattaataaaggagtcatcgtaatggatggagaaaccattcaattaccccaaaataattttggtcactgcctgcatggaggtcctaaaggatggcaataccaagtttatgaagcaaaccaattaaacgacagtactatgacactgactatgaagtcaccggatggagatgccaattttccgggaaatgtaaccgctactgttacttatgcactgacaagagacaatgccatcgacataaattacgaagcgacaactgacaaaaagactgttatcaatatgaccaaccactcttatttcaacttgagtggaaaccctgccaatccggccaccgaccatattctttatgtaaatgcagacagcatcactcccgttgacagcacattcatgaccactggagaaatgatggcagtaacagaaactccatttgatttcaatactcctaaaaccattgcccccgatgtgactaactttgaaaacgaacaaataaaattcggtaacggattcgaccataattgggtacttaacacgaaaggcgatattaaccagctggctgccaaactgaccagccctactagtggtatcactttggaagtatatactaatgaaccgggaatacaagtttatacaggcaactttttggatggaaccgtaaaagggaaaaagggaatcacttatctgcaacgcgcgtctgtttgtctggaaacacagcactatcccgacagccccaacaaatcacaatggccttctgtaattctggaaccgggacagacctatcacagccaatgtatctttaaattcggtgttgaaaaataattgttaaactttaaatatttaatatcatgaattggaattcacatgaattcatctggctggactggacaatactggcagtcggcattgtagctgtgatatgggcggtatggcgctctgtacaaaaagacaaacgctcgcaacaaggagcaagcagtgaagattatctatttggcaaaggtgagccatggtacatcattggtgctgctatctttgcagccaatatcggttcggaacatctggtaggtttggcaggaaccggtgccaaatccggagtaggtatggcacactgggaaatgcaaggttggatgattcttcttctaggatggctttttgttccattctaccaactattaaacaataaaatgggcaaaatcattaccatgcccgatttccttaaataccgttataccccgcgtaccggttcatggctttctatcatcacactgatagcctacattcttactaaagtgagtgtaaccgcctataccggaggtatctttttggagttcttacttggacttcctttttggtatggggcaatcggacttattgtcctgaccggcatcttcaccgtactgagtggaatgaaaggagtaatgaccctctcagctattcaaacccctattttaatcatcggttctttcttggttcttttcctgggactgtcagccttgggagacggtaatattgctacaggatggacagaaatgatggatcatgcgcgtagcgccatgaatgtaggagcagacggacacgcttatggtgccaaccatatgtttcactggaccgaagcagacccgatgtatcaagattatcctggattctgggtatttatcggagcttccatcatcggtttctggtattggtgtaccgaccagcatatcgtacagcgtgtacttggacagcgtaaaggcgaagataatgatgtggtaatgaagcgtgcccgcagaggtactattgcagccggttattttaaaatcctgcctgtcttcatgtttcttattccggggatggtagctgccgccttggctgcaaaaggtgaatttgatatgtcaaatacagatgcggcttttgctgtaatggtaaaggatgttctgcctgccggtgtaaaaggtattgtaactatcggattcatctgcgcattggttgcttcactggctgctttctttaattcatgcgccacactttttacagaagacttttacaagcccatgtttaaaaacaaaagtgaagctacttatgttatggtaggacgtatcgccaccgtagttgtagttatcctcggcatggcatggattcctgtaatgatgagcctcggcagcctttacgactacctgcaaggcatacagtccctccttgcacctgcaatggtagccgtatttgcacttggtatattctccaagaaaatcactccgaaagccggtgaaacagccatgattgtaggtttcctaattggtatgctccgtttgctgactaatatcctcaccaataccggaaaagatgtgatgaccagctggttttgggaaaatacaacttggttttggcagacaaactggcttatttttgaaatatggctacttgtattcctcttgttgttaatggttgttgtatcatgcttcactccggctccaaccgccaaacaagtggaagccatcacctttaccggcagttacaaggaacttatcagaaagagttggaacaaatgggatgttattacctctttaggtgtagttctgctttgtgcactattctatgcttatttctggtaaaccataaattaaaggctgtatgctttgaattatcttgaagaatacagcctgttaattttaaaccgacgctaaaccatgaccacctattataacataaaccctaaattctatgtatctgtagactgtatcattttcggttttgacgaaggagaattaaaactgcttctactaaaacgaaattttgaaccggctatgggaaaatggtctttgatgggaggattcgtacaagaagacgaaagtgtagacgctgccgccaaacgggtattggcagaactgaccggattggaaaatgtatatatggaacaagtaggcacatttggcgacttagagcgcgatccgggagaacgagtcatatcagtagcctattatgctttagtcaatgtaaatgaatatgacagggaactagtgcagcagcacaatgcccattggacaaaaatagacgaactgccacagctcattttcgaccatccgatcatgatttccaaagcacgtgaactgatgaagcacaaagcatcatacaatccaattggttttaacctgctgcccgaactgtttaccctgacacagttgcaaaatctatatgaggcaatctatggcgaaccgatggacaagcggaatttccgcaagcgggtagccgaaatggatttcattgaaaaaacagatttgatagacaaatcaggttcccgacgaggtgcttatctttataaatttaatgataaggcctacagaaaagatccgaaatttaaactttaaaataatgtgccgatgcaataatttgccaattgacaaattagcagattgccacattacccaattattcattatgttagaaaaattaaaagaaaaagtattccgtgccaatctggatttggtgaaacacggactagttatttttacatggggaaatgtttctgccatcgatcgtgaaacaggtctggtagtaatcaaacccagtggcgtatcatacgatgatatgaaagctgaagacatggttgtagtagatctggacggcaacgtggtagaaggttctcttcgtccgtcttcagatactcccacccatgtagttctatataaagcattccccgaaataggtggagtggtacatacccactccacctatgctaccgcctgggcacaagccggaatggatatccccaatatcggaacgactcatgccgattatttccatgacgccattccttgtaccgcagatatgactgaagaggaagtaaaaggtgcctacgaacaggaaacaggcaatgtgattgtgaaacgtttcaagaacctgaaccctgtacatactccgggagtactagtaaaaaatcatggtccttttgcatggggaaaagatgccaatgatgctgtacataatgcagtagtcatggaacaggtagccaaaatggcaagtatcgcttttgccgccaaccctcatttaacgatgaattctttattaatagaaaagcatttcagccgcaaacacggccccaatgcctattatggacagaaataagaaacaaagaaattaataacccttttaaaatataacattatggaaaaagcatttgatcagtatgaagtatggtttgtaacaggagcacagcttctgtacggaggtgacgcagttataacagtagacgctcactccaatgaaatggtaaacggactgaacgaatcagggaaacttcctgtaaaagtagtatataaaggaacagccaactcttctaaagaagtggaagcagtgttcaaagcagccaacaacgatgaaaaatgtatcggtgtcatcacttggatgcacactttctccccagctaaaatgtggattcacggtctgcaacagttaaagaaaccactgttacatctacacactcaattcaataaggaaattccttgggataccatggatatggacttcatgaatctgaatcaatccgcccatggtgaccgcgaattcggacatatctgtacccgtatgcgcatccgccgcaaagtagtggtaggttactggaaagacgaagacacccagcacaagattgccgtttggatgcgcgtttgtgcaggttgggcagactctcaggatatgctgatcatccgttttggcgatcagatgaataatgtagctgtaactgacggtgataaagtggaagcagaacaacgtatggggtatcacgtagattactgtccggcaagcgaactgatggaataccataaaaacatcaaggatacagatgtagaggcacttgtagcaacttacttcaacgaatacgaccacgatgcttcattagaagataaatcaaccgaagcttatcagaaagtatggaacgctgcaaaagccgaattagctcttcgtgccatccttaaagccaaaggcgccaaaggattcactactaattttgatgatttgggccaaacagacggcagctacttcgatcagattccgggactggcttcccagcgtctgatggctgaaggctacggattcggtgcggaaggtgactggaaatcagcagctctctaccgtaccgtatgggtgatgaaccaaggactttccaaaggttgttctttcctggaagattacacattgaacttcgatggtgcaaacagtgctatcctgcaatcacatatgctggaagtttgtcctcttatcgccgcttccaaaccacgtctggaagtacacttcctaggcataggtattcgcaagagtcagacagcccgtcttgtattcacttcaaaagtaggctcaggttgtaccgccactgtagtagacttgggtaaccgtttccgtctgatcgtgaacgacgtagaatgcatcgagccgaaaccgttgcccaaattaccggttgcttccgccctgtggattccgatgcctaatttcgaagtaggtgcaggcgcatggatcctggcaggtggaacacatcattcttgcttctcttatgatctgacagcagaatattgggaagactatgctgagattgcaggtatcgaaatgatccgtatcgacaaagatactaccatcagcaacttcaagaaagagcttcgcatgaacgaagtctactatatgctgaacaaagcactttgctaattcatccatgaagaggggatgtgtcaaggctaataagattcttggcacatcccaccttattttatcatcattattgttgtaccttaaattataggttttaatatgaaatcagatgcaaaatcaaccatcgaagcaggaaaagctattctaggcatagaattcggatcaacacgaatcaaagctgttttgattgaccaggaaaacaagcccattgcccagggaagccatagctgggaaaaccaactggtagacggactgtggacttacagtgtggaagctatctggcatggcctgcaagactgctatgcagatctccgttccaacgtaaaaaagctatatgacacagaaatagaaaccctggcggcaatcggtgtcagtgccatgatgcatggttatatggcattcaataaagaagaagaaatccttgtacctttccgtacatggagaaacaccaataccggtccggcagccgccgctttatctgaattattcgtatataacattcctctgagatggagcatttctcatttataccaagctattttagacaatgaagaacacgtaagtaacattgactatctgaccacccttgcaggtttcattcattggcaaattacaggtcagaaagttctgggcataggtgacgcatcaggaatgcttcccatagacccggctaccaagaattattctgccgaaatgatagccaagttcgacaagttggtagctcctaaaggatacccttggaaactgacagatatcctgcccaaagtcttacccgccggcgagaatgcagggttccttaccccggaaggtgccaagaggctggacgtgtcgggccacttgaaagcaggtgtacctgtctgccctccggaaggagatgccggaaccggcatggtagcaaccaacgctgtcaagcaacgcaccgggaatgtatcagcaggcacttcctcattttccatgattgttttggaaaaagagttgtccaagccatacgaaatgattgacatggttaccactcccgacggaagccttgtagctatggtacattgcaacaactgcacctccgacctcaatgcctggatcaatctgttcaaagaataccaagaactgctgggtatacccgtagacatgaatgaattatatggaaaactttacaatcatgcgctcgcaggcgatgcagattgcggtggtcttatttcgtataattatatttcaggtgaacccgtgacaggacttgccgacggaaggccattgtttgtacgttctgcaaacgacaaattcaacctcgccaactttatgcgtacccatttatacgcttcagtcggagttcttaagataggtaatgacattcttttcaatgaagagaaaatcaaagtagacagaatcacaggacacggcggattattcaaaacgaaaggtgtaggccagagaatacttgcagcagctataaactcccctatttccgtaatggaaactgccggtgaaggtggcgcatggggaatcgccctgctaggttcttaccttgtcaacaatgaaaagaaccaatctctggcagattttctggaagacaaagtattcgccggtgatgccggtattgaaatatcgccaacagccgaagatgtagccggattcaacacatatatcgaaaactataaggcaggactgcctgttgaagaagcagcgacccgatttaagaagtgagtcaaacgggcttaaaaaagagcctctttacatgttgcggtttacacataaagagttatctttgcagatattaaataaaatagcaaagataaaccgactcactaatagcattcaaattataatattattttaatatgaacgaaaagaaacttatgaaccgtgcagcggacaacatccgtattctggctgcttcgatggtagagaaagctaattcaggacacccgggtggagctatgggtggcgctgattttgtaaacgtgcttttctctgagtttttagtttacgatcctgaaaatccgcgttgggaagggcgtgaccgtttcttccttgatccaggtcacatgtcaccgatgctgtattccactttggcactgaccggcaagttcaccatggaagaactggcacagttccgccaatggggcagtccgactccgggacaccctgaagtggacatcatgcgcggtattgaaaatacttccggcccgttaggacaaggacacacttttgcagtaggtgctgctatcgctgccaaatttctgaaagcccgtctgggtcatgtcatggaccagaccatctatgcctatatatccgatgggggtattcaagaagagatttctcagggtgcaggccgtctggcaggtcatttggggctggacaacttaatcatgttttatgattcaaacgacatccagctgtctaccgctaccgatgctgttaccagcgaagatgttgccaagaaatacgaagcatggcactggaaagtaattaccatcgacggtaatgatcccgatgcaatccgcacggctctgacagaagcgaaagccgtaaccggtcagcccacattaattatcggtaagaccattatgggtaaaggcgcacgcaaagcggatgattccagttatgaacgtaactgtgccacccacggtgctcctttgggaggtgatgcttacatcaatacaatcaaaaacttaggcggcgatccaaccaatcctttccaaatcttccctgaagtaaaagagttgtatgccaaacgtgcagaggaactgaaaaaaattgttgcagaaaaatatgcggctaaagctgaatggactaaagctaaccccgaactggctgctaaattggaactatggttctctggcaaagctccgaaagtaaattggaatgttatcgaacaaaaagccggagatgctacacgcagcgcttctgccaaagttctcggtgtactggctacagaagtagaaaacatgatcgtttcttctgccgacctgtcaaattcagacaagaccgacggtttcttgaagaaaacacatgcattcacaaaagacgacttcaccggtgcatttctgcaggcaggtgtttccgaattaaccatggcttgctgctgcctgggtatggcacttcacggaggtgtgattgctgcatgcgctaccttcttcgtattctcagactacatgaaacccgccatacgtatggctgccttgatggaacttcccgtcaaattcatctggacacacgacgcattccgtgtaggtgaagacggtcctactcacgaaccggtagaacaagaagcacaaatccgcctgatggaaaaactgaaaaaccacaaaggacacaattctatgttggtactccgtccggcagatgcggaagaaaccactgtggcatggaaattggccatggaaaataccagcacccccaccgcactgatcttctcccgccagaatatcgcgaatctgcctgccggaaacgactactcacaggctgccaaaggcgcttatattgttgcaggctccgatgaaaatccggatgtaatcctagtcgcttcaggttccgaagtttccactttggaagcaggtgcagaacttctccgcaaggatggcataaaaatacgtatcgtatccgctccttctgagggattgttccgcagccaaagcaaggaataccaaaacagtatcattcccacaggggctaaagtattcggtctgactgccggtcttcctgtaaaccttgaaggtttggtaggtgccaacggtaaggtattcggtctggaatcattcggattctccgctccttacaaagtattggatgaaaagctgggctttaccgcacagaacgtgtataaccaagtaaaagaaatgctggcatgaaaaaagtaggactggcatccgatcatgcaggatttgaactgaaagagtttgtaaagacatggttaactgaaaaaggctatccatgcaaagatttcggtacatacagtacagaaagctgtgactatgcagattatgcccatccgcttgcactggctatagaagccggagaatgcggacccggagtggcaatttgcggaagcggtgaaggcatcagcatgacattgaacaaacatcagggtatccgtgcggcactatgctggatgcccgagatagcccatctgtcacgtcagcacaatgacgccaatgttctggtaatgccgggacgattcattgaccatgaaatggccgaaaaaatattggatgaattctttaacagcggcttcgaaggcggacgtcaccaaaagcgcattgaaaagatacctgtaaagtaaaattcacgcaataataataaaagtaaaaaaagagaggcattatagcttctctttttttttattcctatctttgcttagattaaaatataaaataaaaaatattactatgaagaagattctttttttaatgctcctatgtctgccattcatcgctatggcacagacagatcccaaatatctggcgggagcgataactatggatgacggtaaagtttctttcaaaacagagatacaggcaccgtctttaacgaaagaccagctatatggcaccatgctgaaatgggccacagaacgtttcaagcccgaaggcaagttcaatgcacgtgttctttacaccaatgaagatgaaggaaccattgcagcaggtggcgaagaatatctggtattctcctcctctgcattgtcattggacagaaccagaatttattatcagttgtttatcacctgcgaaaacggaaaatgtgatatcgaaatgacccgtatccgttattggtatgatgaagctcgtgacggaggagaaaaatacagtgcagaggaatggattgtagacgatatggctttaaacaaatcgaagaccaagctggctcccatctgcggcaaattcagaagagagactattgacttgaaagacacactgttcaaatccatccaagatacattgggcaacaaggtcttgaacaactcacaaattgcagttgctcctgctccgggcgtgacagctactccgatatcaaatgcaacaacaatcgttaccgccactccggtaactccctctgcccaaccggctgtcatcggtggttctgagggtaataccgaaataaaagcagccaataatgcaactcccaacaaagaacaaagcatagatgaccaaatcaaggcatcctcacgtatgacaattactgccggaaacgatgaacaattcgaaatcggtaaagaatgctggggaggtttcggccagttattcggcaaagaagtagcattctgcgtaatcgaccaagccaaatcaatgggcaatatgctgatggatcagagcgataattataaaatttcgttctacaagcaaggtaatagcgagccgtggttgatagtaaactgcaagaaactgatgaaacagaccgttaccggtgaggaagcaaaaaagatgaaccccagtaatgacggtcagaaggcatataatatgtatgtaggtgaagtaataaaatagtcttttctcccatatatttataccgtgacagtttattctgataatacataaaactttttttagggggagataacctgacaactccccctaaaaaacatacaaacgatctaccatatacttccccaaaagcaccatgacaaataccattcaaacatgtctcccctttaagaataaataacaccgttcctctatcaaccgtttcacttgaaaccatttctataataatcaaaccattagaagaaatcattcttccattttttccctatctttctctcctttttttaaatgtttttagcaagaaagccgttttttctgctccaatcttccctttcataacaaataaagagtatctttgtaaacaacaatgagacaatcatgccttatgacggaacaattacaggacataaagacacttatcgaacagggtgatacggaaagagccattcatgcgctaactaatttcatccgaaacgatgcgcacgtcaacgatgaaccctattacttactgggtaacgcctaccgcaaaatgggagactggcaacaagctttgaacaattatctggaagccatcgagcgtaatccggaaagtccggccgtttccgcccgtgacatgattatgaatattctgaatttctataacaaagacatgtataatcaataataactaacccatggcaaagattaaaggtgctattgtagtagacacagagcgttgcaaaggttgcaatctatgtgtagtggcatgtccgctgcatgtaatcgcgctcaatgccaaacaagtgaataaaaaaggatacacattcgcccaccaggtattagaagatacctgcaatggttgcgcatcatgtgccacagtctgtccggacggatgcatcactgtgtataaagtaaaacaacaataaatgtaacaaatatggcagaagaagtcgttttaatgaagggaaatgaagccatagcccacgccgctatccgtatcggagtagacggttactttggctatcccatcactccccaatcggaaatattggaaacgctggccgaagagaaaccttgggaaactaccggtatggtggtgttgcaggcagaaagtgaagtcgcagcaatcaacatggtatatggcggtgcagcgagcggtaaaatggtaatgacctcatcctccagtcccggcgtcagtttaaagcaggaaggcatctcgtacattgccggtgccgaactcccctgcctgattgtcaatgtcatgcgcggaggtcccggattaggaaccatccaacctagtcaggccgactatttccaaacagtgaaaggcggcggtcacggagactatcgcctcatagccctggctcctgcatcagtacaggaaatggcagatttcgtaggtatagcttttgatctggctttcaaataccgcaatcccgccattattctggcagacggcgttatcggacagatgatggaaaaagtagtattgcccgaacagcgcacacgcctgacagatgaagaagtcatagcccgttgtccgtgggccactaccggcagaacccaccaccgtactcccaacatcatcacctcattggaactcgatcctgccgagatggaaaagcgcaatatccatcttcagaaaaaatatgcagaaatagaagaaaacgaagtacgtttcgaagaacttcactgcgaagatgccgaatatttgatcgtagctttcggttcttgtgcccgcattgcccaaaaagcaatggaaatagctcgggaagaaggcatcaaagttggtttgctccgtcctattaccctatggccgttcccgtcgaaagctattgcagcacgcgccgcacaggtaaaaggtatcctcactgtagaattgaacgccggacaaatggtagaagatgtccgtctggccgtagaatgcaaagtgcctgtagaacacttcggacgtctgggtggtattgttcccgatccggatgaagtaatcactgcattgaaagagaaactaataaaataagaccgtatgaatatcgatctgatcagaaacatattgaacatacttttcatggcactggcactagcggctgtcatcacttacttcatggcaagtgacttcaaagtattcatctatgtctgtgcagcagctatttttctcaagctgatggaattctttatgcggttcatgttataagcaataggaggagaaactatgacaaaagaagaaatcataaaacccgaaaacctggtttataagaaaccgacactgatgaatgacaatccgatgcattactgccccggatgcagccacggtgtggttcacaagttaatagccgaagttattgaagaaatgggcatggaagataagacaatcggtgtgtcaccggtaggatgtgccgtttttgcatacaactatctagacatcgattggcaagaagccgcccacggacgcgcaccagccgtagctaccgccatcaagcgtttatggcccggacgtctggtatttacctaccagggagatggtgacctggcatgtatcggcactgccgaaaccatccatgctttaaatcgtggcgaaaacattactatcatctttatcaacaacgccatttatggaatgaccggtgggcaaatggctcctaccacgctggttggcatgaagacagccacctgcccctatggtcgtgatgtagccattcatggctatccgctgaaaatgacagaaattgccgccactttggaaggcaccgcctacgttacccgccaggccgtacatacggttcctgccatccgcaaagccaaaaaggctatccgcaaggcattcgaaaactcaatgaatggcaaaggatccaatttggtggaaattgtatcgacttgtaattccggttggaaaatgactccgcaagcatccaatgactggatggtggaacacatgttccccttctatccgctgggtgatttgaaagataaagaataaaaagacagaaaccatgaaacaggaaatcattatagcaggattcggcggtcagggtgtgctatccatgggtaagatacttgcctattccggactgatggaagacaaggaagtaacctggatgccggcatacggtcccgaacaacggggaggaaccgctaacgtaacggtgatcgtcagtgatgaacgcatctcttcacccattctcagccaatatgacacagccatcatactgaaccaaccctcattggaaaagtttgaaggcaaaatcaaaccgggtggtatcctcatttatgacggatacggaatcatcgagcctccgacacgtaaggacatacaaatctatcgtattgacgcaatggatgccgccaacgaaaaaggaatggcaaagaccttcaatatgattgtcttaggaggcttgctgaaactgcgtcccgtagtatccattgaaagtgtaataaaagctttacgcaaaacattgcccgaacgtcaccatcatctgataccgatgaatgaagaagccatccgaatcggaatggagattattaaacctcagtaagttaaaataactctaaacgaataataaaaggaagaactttccatagcggaaaagctcttccttttatttttatattgtatctttgccgccgttatgaaaagaatattctctattatttttttattattcctgtgcttccatacttccttgatggcacagcggacaatgaataccctgaacaatcagttcggttcctcggcaaacggactggacagaaaccaatatgaccgtaacggaaaccccatagacacgacagccgtagtagatgccaacactatccccatcggactgtactcatggaaagtggacagtcgttttggcaatgtcacttatatccccgtagataccttgcagcacgctttccagaactcaaatgacatgggcggctacaccggacaatacaattacttgggaaatttgggttccccccgcctctcacgcatcttttttgaccgtcgggatcccagccaatactttttcaccgacccatacgacttttgcgtacaacgtccggaagatgtcatattcaccaatacattttctccattcacgaacctgagctattacaaaggaggaggcagccgtgacggagaagaacgcttcaaatcctattttgccatcaatgcaaacaaaagactggggtttggattctacatagattacctgtatggccgggggctttaccaagatcagtccacagccttcttcaacggtggcctgttctccagctaccggggagacaaatatgacatgcatttcatattcaacaacgataacttgaagatggcagaaaacggaggtatcacggacgaccggtatatcaccaacccgctggatatggcagaaggcaaaaaagaatattccgccaacgaaatcccaacgcgactgagtcagatatggaatcacaacaccagctaccatgccttcctgacacatcgttacaacttagggttctataaagaaaaacaggacagtgtggatacggactccgtaaaaataacgcaggtatttgttcctgtcacaagcttcatacatacattacaagtggacttgaacaatcgcaaatacatctcatacgatgacgcacagaatcagaagtattttgaacataactatctggggaccgactctatagacaagacgaagcgcacatccatcaaaaataccattggcattgctttacaagaaggattcaacaaatgggcgaaagccggacttaccgcctttttaagttatgaataccgaaacttcgccttgaccgacacgacaaacataccgggacagcgcattatcaacaactataaggaaagttcactctccattggcggcgaactatccaaaaaacaaggaaaactattacattacaatattctaggagaattggccatagccggtgaagatgcaggacaattcagcgtagaaggcagaggggatctgaatctccgtttattcggagatacggtgagactggatgtaaatgcattcatcaagaaccagaaccccgtattctatttcaggcatttccaatccaaacattactggtgggacaacaacgatttatccaaaataatgagaacccgactggaaggaaaactaagtctgaacagatggggaacccaactgcgtgccggagtggaaaatataaagaactacacttatctggccaatgccagcataccggtaaaagacagtgaaggaaatgtcaccggtttcaagaacaatgcagccgtaagacagtactccggcaatatacaaatattcacagcaatgttgcaacaaaaattgaaagtaggaatatttcatctcgacggtgaagtagcctatcaaaaatcaagtgagcaagacattctgcccttaccggaattgtcggcttacggcaacttgtacatgaaattcggtctcgccaaaaaagtactccagatagaaatgggagcagatgtgcgttatttcagtaaatattacgcgccagactactcccccgtcatcggacaattctataaccagaatcctgatgacaaaatcgagataggagcttttccgatagtcaacgtctatgccaacctgcatttaaaacgtacccgcttctttattatgatgtatcacgtcaatgccggttcgggaaaatccaattacttcctggcgcctcactacccaatcaatccgcgaatgataaagttcggcctttcatggaatttctttgattgacggtctatatgagaaaatatctgaaatacattctgatgggtatccttgcagtaaccctatcctccatcttcttcaaaaagaaaacggaggctgaaaccagtctgccccgcgattatgcagaaatagcggcatcgggaatcctgcgtgccgttaccgagtacaattctatcagtttttatgccgacggcgacaccgtttccggtttccactacgaactgctccatgcttttgcacacagcaaaggactgaaaccggaaatcactcctgaaatgagcttttccaaaagactggaaggcgtacaaaaaggaacatacgatatattggccaacagcacggtagttaccacagaatacaaagactccctgttgtttacccgccccattatactgaacaaacaagtactggtacagcgtaaacccgaaaaagaaaacgatagtctgtacattcacagccagttggaactagcccgcaagacccttcatctagtcaaaaactcacctgccatcctgcgcatacataatttaagtaacgaaataggcgataccatctatatcaaagaagtggagaaatacggacaagaacaattactggccatggtagcacatggtgacatagactatgccgtatgcgacgagagcattgcccaagcctccatcaatgattttccacaattggatatagaaacagccatcagcttctcacaattctattcatggggagtaagcaaacattctccaatattgcttgacagcctgaattcctggttaaatgactacgtcaagactcctgcattcaaactgttgcgcaagaaatattacaataactgatttttatccggctgaaattgcaaaatagtcctatctttgcaatataaattgttattattttaagcggaatgacaaaaaagttattaccatggttaaattagacaaagtaaaatggggcttcatcggttgcggagaagtgaccgagaagaaaagcggaccagcctttgccctgatcgaaggttcagaggtagtggccgtaatgagccgtgacaaagaaaaagctcaatcatacgccaaaagacacaacattccccgctggtactccgatccgcagcagttaataggagatgaagatgtcaatgctatttatatagccactcccccctcttctcatgccacttttgccattatgtccatgaaggcaggaaagcccgtatacatcgagaaacctatggcggccagctatgaagactgtgcacgcatcaaccgcatatcacaggaaacaggaattccttgtttcgtagcttattacagacgctatcttccttatttccaaaaagtacgccagatggtagaggacggagaaataggcaatgtcatcaacatacagatacgtttcgcccagcctccccgcgctttggattacaacagtaccaaccttccctggcgtgtacaacctgatattgccggcggcggttatttctatgatctggctcctcaccagctggatttgctacaagatatgttcggctgcattctcgaagcccaaggatacaagagcaaccgtggcgggttatatccggcagaagatacgataagtgcctgcttcaaatttgattccggtctgccgggatcaggatcatggtgtttcgttgcccatgaatcggccaaggaagaccgtatagaaatcatcggagacaagggaatgatctgtttctctgttttcacttacgatcccatcgccctgcatactgaaagaggccgcgaggagtttcttcccgaaaatccccctcatgtacaacttccgctcataaaagccgtagtagaacacttgcagggaaaagctgtctgtacctgcgacggcatcagtgcgacacccaccaactgggtaatggaccgtatacttgacaaactctgatttctgcctatggacatccgtcaattatgcctgttttgtctgtctttcctttccgccctcggtgtatatgcacaagcggaacagaaggactcgacagtacaggacaacaagggtgttctcattacattgaccgatggaatagcgacaactgtccgtcataccggaagaaaaatcaggaaagtgggaaaagaattcaacgcggtcgataccacctatatctcgcctaacctctacaatctggctttcatgctggaatccagcagttggtacgaatactatcggttaggcagtaaaggaaacaacggcgaacaaagtttgagattctcccccaatgccagtttcaagctgggggtctatttcggatggcgctggatatttctaggatattctttcgatgtaaaagatattttcggcggacacaagaacaaggcaaagaaaaccgaaatggcactgaatctttatagttccaaatttggtgtggatttatattacagaaagacaggaagcgatttcaagatacgttcttccagcggatttgatctgagcactcccattaaaaacctgaatttcaacggattgcaaagtaaaatcaaaggactgaacgcctattggattttcaattataaaaaattctcttatccggcagcctatagccagtccaccaaccagcgtaaaagcgcgggttccctgatggcgggcttttcttattcccagcacaacatatcttttgattacgaaaagcttcccggtgaagtgagagcccaactgcatgatgccctgcttttcaagaaagtgaaatattctgattacagcatcaacgtgggttatggctataactgggtatttgcaaaaaactgggtttccaatctttcactcttaccggccattgcctataaaaaatcaaaaatagacgatacgcctaacaccgacaatcattggataaaggatatcaattttgacctgataacacgtgccgccgtggtctataataccaacaagtactttgtaggtgcttcactggtgatgcatacatacgattatcggaaaaggaatttctctctcactaatacattcggaaccgttcgtgtatatgcaggattcaacttctggaaaaggaaagaattccgcgataaataaaaaagggatattcagtaaatgtctctaaaaaataagatg

SEQ ID NO: 3944 - DNA, 22581 bp, Unknown
  gut microbiota DNA sequence
cttattttttagagacatttactgaatatcccgaaatagaataaaaccacagaggtgcgcaaagggcattttctttatttccctctgcgcacctctgttttaagattgatagttcccggcaattcacttctcaaaaccctgtttcttcaaggtttctttcaaagttacagacatacattcattatccgacttcttgtatctgacctcagtaaatacctgagccagtgtttccttatgattttctttaataaactgatgattttccggaagtgactctttatatctataaatacgatcaatatcctctttggtataatcatgatacaattcttcatgcaaaataccctctataggaagacgatcgacttgtggagggcattcatccggatatcctactgtaatagtagccaccggcataaccaattccggcaactgaaggatatcaataatttgatcaggattataaatcgttgttcccaaaaaacaaatacctaatccattttcctcagccaatgtacaaaagttctgagtcacaagcaatgcatccgtagcagcattcaaaaaagaaatgggattgtcataacccggtaccgccttacgctctctgcaccatttactaaaacggttaaaatccgcacaaaaagtcagtacaaccggagcacctgttaccatcggttgattaaaatgggcaggtgccaatctctctttcatctgcttgtcacgagtcacaatcacactatataattgcatattacccattgtagaagcacggaacgccttttcaagcaaatcatttaacaaagaagcagaaatatcttcctgcttatatttacggatcgtccgtctattatttatcgattccatatatatttttcttgcaaagataaaaaaaagaaaagagtaataatgcattttttgcaaaatattatatgctaagaatctggccttttcaactagtcaatcactcatcccctccatcaaaactttcaaaacagaaaacttctacaaataagcaagcatatatatcttttgataatcaataaattaacaaatattcttggataactttcaatttgttgaaaacttatctgctttttattttgttaattgaaaaaacatatatagctttgccgaaacttttattataatgagttgtaacttctacactaaaacaacttattgatattacagtaaatctaaaaataaaagtggaaagacaaacgtacacctatgacgaagcttttgaagcatctttacaatacttcaaaggtgatgaacttgctgcaagggtttgggtaaacaaatatgcagtaaaagattctttcgggaacattttcgaaaagtctcccgaagatatgcattggcgcattgcaaatgaagtagcccgcattgaagctaaatatcagaacgggttaaacgcacagcagctttacgaattattggatcactttaaatacattgttccgcaaggtagccctatgacaggtatcgggaacgactttcaagtggcttccttatcaaactgctttgtcattggaattgatggagcagccgactcatacggaggtataatccgcattgatgaggaacaagtacaattaatgaaacgtcgtggtggcgtaggacatgatttatctcatatacgaccaaaaggttctccggttaaaaattcagcactgacttccaccggactggtgcccttcatggaacgttattccaattcaacacgtgaagtagcgcaagacggacgtcgtggtgctttaatgttaagcgtatccatcaagcatccagattcagaagcatttattgatgccaaaatgaccgaaggcaaagtaaccggtgctaatgtatccgtgaaactagatgatgcatttatgcaggcagctgtaaatggcactccttacaaacaacaatacccggtagattccgatcaacctgttttcacgaaagacattgatgcatctgcgttatggaaaaagattgtccataacgcatggaagtctgctgaacccggtgtattattttgggacaccatcatccgtgaatccgtaccagactgttatgccgatttaggatatcgtactgtttctaccaatccttgtggtgaaatacccctgtgtccctacgattcttgtcgcttattagctatcaacttatactcatacgtagtaaacccttatacaaaggaggcttactttgatttcgacttattcaaaaagcatgtggcattggcccagcgcattatggatgacatcattgacttggaattggaaaaaatcgagaaaatcatagctaaaatcgattccgatcccgaaagtgaggaagtaaaagaagcagagaaacatttatgggaaaaaatttataaaaagagcggacagggaagacgtacaggcgtaggtatcacagctgaaggggatatgcttgccgctatggggttacgctacggaacagaagaagcaacagagttttctgaacaagtacataaaacaatcgctctggaagcctatcgttcatctgttaacatggcaaaagaacgtggagcattcgctatctatgacagtgaacgagaaaaaaacaatccgttcatcaaccgcttaaaagaagctgatccagaattatatgaggagatgaaaaaatacggacgacgtaatatcgcctgcctgaccatagctcccaccggaactaccagcctaatgacccaaactacttccggcatagagccggtgtttatgccggtgtataaacgtagaagaaaagtcaatccgaatgatcctcagacacacgtagattttgtagatgaaacaggagatgcatttgaggaatatattgtattccaccataaatttgtggaatggatgacagtaaacggttacgatcccaccaagcgttatacacaagaagaaattgacaaattggtagaaaagtcaccttattataaagccacatcaaatgatgtagactggctgatgaaagtaaaaatgcaaggacgcatccaaaaatgggttgaccattcaatcagcgtaactatcaatttgcccaatgacgtagatgaagcattggtaaaccgcttgtatgtagaggcatggcgttcaggatgcaaaggatgtaccgtttatcgtgatggctcccgctccggagttttactttctacccaaaaggacaagaaagacaaaaaagaagaacttcccccttgcaaaccacctacggtagtagaagtgcgccccaaagtactggaagcggaagtagtacgtttccaaaacaacaaagaaaaatgggttgcatttgtaggcttgttggatggacatccatacgaaatctttaccggtctgcaagatgatgaagaaggtatttcattgcccaaatcggtcactaccggacgcatcatcaaaaacattgatgaagaaggcaacaaacgatatgatttccagtttgaaaacaaacgtggatacaaaacaaccattgaaggtttgtctgaaaagttcaacaaagaatattggaactatgctaaattgatttcgggtgtacttcgttggagaatgcctattgatcgtgttatcaaactggtagattctctgcaacttgacagtgaaaacattaacacatggaaaaatggtgtagaacgagcactgaaaaaatatgtaacagatggtactagtgccgaaggacaaaaatgtcccaattgcggaaatgaaactctcgtatatcaagaaggatgcttgatctgcaagacttgtggcacatcgagatgtggataatggtttattatataatgtaacaacacaaaggaaaagctccttcatgactttcgtgaaggagcttttttatataaacaaaataaatcccttttctatcttacccctacaatacgatgaaaccgttccacaatacgccttcctaaatccatacgcgtactatctactttatgaatggcagcaggagtcacatcatctttatatttggctttacctacacgtattttcatcttatccagattaccggaaatattcactccagccttaaaaggcaaaggcgatttcaaaatggatatatgatatttaaaattcatatccagtccttgctctccccctatagcagctttataacgatctatagacacttgaaatggataaacaagaacactaccgtcattaacaactacattaaccgaaatactatcaaatacattcttctttttatttttaaacatcaacatctttgaaatttcggcaaaggtctcaccatccatcaacaccaaactgtccccttttatatacatggccgaacgcaaagtaggtatacgaatattcatatttgaatccagacgtgcctctgcagccacatcaaactgaacccttccttcaaaagatctcagcataggtacaatggtatccattgaaggtataaaatctaccagcttagctatatttatatccctaattttaaagtcaaagcctgtatatcctcctctgactgaatccgcacgatataccataaccgccttcatatcagcatccaatgcacgcatttccaaatttcttaaatataatgtacgatttttcaaatctacctttccacacacatcttcaaattccacctttccaaacactacttttttcaaatctgtctgtaattcaaaatccaaattacccggtaacacaaacaacttcatttctgttggagacactgtgtctgtcaccgccacagatactgaatcttcagataaagagaatgaatttatcaattgattacaatcaatcatctcagaagagattgctaaacgcgcttttaaagtttcatttttagtcatcgcacgatataatcccattacctcaccggtagcaaccatatctgaatgccctattttcaaagaggcatttcttaatgttattttcggaccatctactgttacagctgtcttacgtactcgtaaaggtaaaccaaattcaggagtatgtaccaacaacctatcaaaaccaacaattccccgaggtatccataacgaatcatttttcttttccaatttcgccttaatacctgccacgcctaacgccaacttcgtttcattggcattaaagaaaagagaatccgtacgcatggaaaagctaatcatcggcatcgccgaattttgttccttcggagcaagttcgccagttccagtagtcttgccactatatattttaagcgaatctcctatattcgcacgcaatttattcatttccaattcacattgcaaagtgacaatctttgtggtatcttgaggattggttgaaacaaccttcgctttcatccgatctatctctgaagcaaatttcctactattcaatattatttctctgatatccaattcagcctgcaaagtttcactatcactgaattttaaatcggcattacctaaaaaattaaaatctttagcagtgtcttttaactcaaaatcctttaaagccaatcttccccctaacctgatacgtccaatatcctgctttttcaaagaagaaagacgacattttaaatttaaacccgcatctaatttaccacggatggttacattttcctgcaaagggaaagttttagctaaagcatccaagtcaactgtagattcagtatgaagcgttataagtggatctaccaataaatcctccactttggcatctgctagaatcttggtatgtgctccctcaaaatgaagaattttcaagttcaaaaatgaaggattgcgacgcatcaaatcaatatacgattcaaaatcagccgtaaaattatcaataccataaggaagtccttcatatcgggcggatgcatcattaatctttatattcaatgataccgccggaagctgtttgtttccataattaccttccaatgttccatcaaccttaacctcaccttttgccgaaatttgtccacgtttcacataagcctcgggaatcatattcatgactgtttccatggaaggtgcatgtagtccatatttcaagttcacacccaccatcttggtaactgtatcacgttttaattcaccgtttacatccagccggataccatttatagtcaatcctgtatttttcaatgtccacaatgccgtagacctgtctatctcaatatcagtctgcaaggaagccgctactttattaatcaataattcaccttgctgccaaaaaagaatatttttattttcaaattctactcccaatgaagaaactccttttgtcaacgccagctttaggcgcaaatcaacatcatctatacgtgaataaacctctgtattacgatcatcaaaaatcaaattggcatgttctagctcaacctgacggatatctatctcgctatcaaatttattttgtgaaattgtatctttttccacagccaatgtatccgaagaagttttcactatctcccaattcgccttacctgttttatttcgataagcataaacagcaacatttttcaaagacaaattatagacactgatcttatttttcaaaaaaaaatccaaaggattcactatcaacacacattctttaaacgccaataaagaatcggtcttttgtggaagactatcattcaatactttagaaaccaagaaaccttcgtcaacttttaacccaaattgaggaaaggtagaaaagaaagtcaattctacactttctaccttcaaatcagcatccagtgaacgattagcaacattcaacactatcggagttaatttatctggtgtaaatacatagttaatcacaaaagccactaccacaaacccagtaagcagcaaggctcccactgtaatggcacttacccttattaatttacgaattcttctttccatattatgcaaaattaatgaaaacacccatgccatcaactttatttcgtgttaatactataaaatagaccaataaaacagataaaaaagaaaacaagaacaatgatttttaattttgagatatgaagcgaaagttctacttttgtttctcaaactgaaaaaatatgaaagcaacatctatgtatatttatctggaaggtgccaggtttttcgctcaccacggagtcgatccacaagaaacaatagtaggagctaattttataattgatttaagactaagaaccgatttcacccatgcagcacaaactgacgaactgaaaggcaccgtaagttatgctgatatatatgcagtcgtcaaaaaagagatgaaaactccatccaaacttttagagcatgtctgtgaacgcatagggcaaagactgtttaatgattttccaactattcaggaaataatcatccggttgtcaaaagaaaatccgcctatgggcagtgattgcagaaatgttggagtagaagtacattatacacgatgaaaaaaattatctgacaaacatccagtcatttaattaagttcaccctattacatgccctcctcttaaaaacgtaaatatgctatcgtgcaaataacaacacaaaccaataataatgaatatacagaccatgttcatgaccctacttattaaaataaagaaagttgttttcttccttcagaatgataaaatttcatggtagcactgattcctaatgtttctattctgcgataaaaaacctcattcaaatagggagcattaggagaaatgcattcagaacggtcttcaaaataagtttgatatcgcttggccatctttggaaaaatccgctctaccttatcataaaaataatcacgggagccccgtcttaaagttaccccgaacaaaggaagcacataggacgctcctgcttcggcagccttctctactatttcctcaatatcttctatagaatcgtttataaaaggcaaaacaggcatcaatgccactcctgtatatataccccgatcggacaatatcttcatcgccttaaaacgctcggaagatgccggtgcattaggctccagtttgcgcgccatctcgtcatccgctgtagtgatagtaaaactaacggcagcataagtgcgccctatatcctgcaatacatcggcatcacgagtcacaagactactctttgttatcacatgaacaggaaaacgatgtttggcaataatttccaacgcacctccagtcagcttcatctgtttttccaacggcatataaggatcattcattgaacctgtgccaatggttgcttttccacgtttcgttcccagttcatgatccagtaattccaaagcattcttctttacagagatatgagaaatatcaccaacaccatagcaagaactacgtgtatcacaataaatgcaaccatgttggcaccctctatacaagttcatgttataagcaattccccaataattatctttacttttcaaacgtgacagaatagactttgtttcaatagattttacctcatgaacattcattttacagctccttttcttttttgatcaaatttcatcaaacaaagatacaggaataatgctataaaaagaaatataaagagaagcaatttaaaaaagtttcaactgggaaaaatgttttttgcccaacaaataatatttcataacaatgctaaaatgagtccgttccggaattatctcatctgtagacttcatcatattttctatacgagaagcggcaaaagaatatcttatatcctcaaattctctccgcgcctgcattacagcacgcgcattcgctctatcctttttcagataaaaaacaagggcagccactctatccagtataccacgtataaaaagtacatgttccaattccttatccggcaaattcttataaagcatcaacagattatttctgaaattcaaaaaagtctttctcggattctcttttttcaacgtagcccctcctacatgatataccacactttgcggaatacagacaagcttttttcccctactgcgcaaacgccagcacaggtcaatttcttccatgtgggcaaaaaaatgaccatccaaacctccaacttcacgataatcagccaaccggataaaaagagcagctcctgtaacccacatcacctccgttaccgtatcatattgtccgcaatccttctcaacaacatcaaaaatacgtcctctgcaaaaaggatatccataccggtcgataaatccccccgacgctccggcatattcaaaatattccttattatgccaacttaataatttaggttggcaggcaactgttccggaatgggtgtccatataatccagcaaaggttccaaccaatgcggagtaacctccacatcactattcagtaaaactacatattctgcatcaacttgctccaaagcccggttatatccttcggcaaaaccataattctgatccagctcaatcaaacggactacaggaaattcagaacgaagcatttcaagcgacccatcagaggacgcattatcagccacacatatttcaatcccctctcctactgaattatccataacagaaggtataaacttacggagcatatccaccccattccaattcaatataacaacagacacccttttcatttcttttcagactaataccaaatgtatggaataattcagactaaaacacccttcaacgctgtaccctcttcattaaagcctcccattcttacacgaatcaactgattatccaattgatcatcgtgatccatctccacccggatgtaattatcagtaaatccatgcataggagttccagccttagatttttccattaatacccaagcttcccttcctatatgagaggtatagaacgcctttgtcttcgcatcagataaagccaacaatctctggctacggcgatgcttctcctcaggactcaccacatactctattttcaaggcctgcgtaccgggacgttccgaataactgaaaacatgtaactgcgtcacatcaagcccttcaataaaacgataagcatcttcaaaatattcctctgtttcaccacgtgttcccacaattacatccacgccaataaacgcatccggcatgatttccttaattttgcgtatcttggaagcaaacaatgcagtatcatatcgacgtctcatcaatttcaacacatcatcgcttcccgactgcaaaggaatatgaaaatgcggcatgaatgcacgtgaacgtgacacatattctattatttcatccgtcagcaagttgggttcaatagacgagatacgataacgttcaatccctgccacctgatctaaagcctttaccagatcaaagaaactttcaccggttgtcttcccgaagtctccaatattcaccccggtaattacaatttccttccctccttcagctgcagcctgccgcgcctgttccacaatctcttcaatacgtccgttccggctacgcccacgagcaaacggaattgtacaataagaacagaaataatcgcaaccatcctgcactttcagaaaataacgagtgcggtcacccctagaacacgaaggtgaaaaactacgtatgtcttttgcagctgtcgtaatcgcctcaccttgaggatgcttttccaaatttccgagataattcatcaactctcccttttgttcagctcctaaaacaacatccaccccttctatattagccacctggtcaggttttaactgggcataacatcccgtcactactacataggcacccggatgctgtttaaccaaacgatggatggcctgacggcatttcttatccgcaacctcggttacagagcaagtattaataacacaaatatcagctttctcacccttacgtgctgtacgtatacctgcttctttcagtgttttaccgatggttgaagtttctgaaaagtttaatttgcagcctaatgtataataaacagccgttttatcctggaaaattgtcgtatcaatcatacctttttatctaattagcgagcaaaggtacatattattctgcttaaattctttagaataccaataattatgcttatttttgcacattacatcaaaaattgtgcaatgataaaagaaaactttatcaagctatatgagaatagcttcaaagaaaactgggatcttccctgttacacagattatggtgaagataccacgtttacatacggacaagtagcggaagaaatagctaagatacacttgttattccaatattgcagcctgcgccgtggtgataaaatatctattataggtaagaatacttcccgttggtgtatcgcttatttggcaactgttacatacggagctattgtagttcctattctacaagacttcaagccgaatgatgtccatcatattgtaaatcattccgaatccacattcctgtttaccagcgataacatttgggaaaatttggaagaagaagcattaagtggattacgcgctgtattttctctaacagatttcagatgcctgcatcaacgtgacggtgaaactgtccaaaaattcatgaaaaatatggatgcagcaatgaaaaagaatttccccaaaggcttctataaggaaaatatcaattatacagaactctccaatgaaaaggtcatgttactgaattatacctcaggaactaccggattcagtaagggagtaatgattacgggcaataatctggcaggaaacgttaccttcggtatccgtacagaacttttaaagaaaggagaaaaggtactttccttccttcccttggcccatgcatacggatgtgcttttgattttctaaccgctactgctgtcggcacacatgtcaccttattaggcaagacaccttctcccaaaatattgatgaaagcttttgaggaagtaaaacccaaccttattattacagtaccattagttatagaaaaaatttataagaatgtaattcagccgctcatcaacaaacgcagcatgaaatgggcgcttaacatacctttactagacaaccagatttatgcacagattcgcaaaaaactgattgacgcattaggcggacgttttaaagaagtcattatcggtggagctgccatgaatccggaagtcaccgattttttccacaaaataaaatttccgttcaccatcggttacggcatgaccgaatgcgccccactgatcagttatgctccatggaatgaatttatacctggttctgccggaaagatactggatatcatgaaagtccgtatcgactcggatgatccttataacataaccggagaaatacaggtatgtggtgaaaacgtaatgaaaggttattataagaatgaagaagctacccgtgaggtatttactgaagatggttggttgaaaacaggcgatttaggtacaatagatgctaacggattcatttatataagaggccgtagtaaaaccatgatcttgagttctaatggacagaatatttttcctgaagagatagaatccaagctaaataatatgccattcgttctagaaagtttaatcatagagcgcaacaagaaactggtagctttagtatatcctgattatgaaagtctggacagtctgggactcaatacccccgaaaacctaaaaacagtaatggatgaaaacttgaagaatctgaataaactggtaggaaactatgaacaagtgagtaaaatacaactttatcccacagagttcgaaaaaactcccaaaaaaagcatcaagcgattcttatataacagtattaccgaagaataaatatgttgtaaaacatgctactaatcagcaaaataggttgtataacataaaaaattagaaaaaaagttgttctttttggtacaacgtattaaaaaagtgtatacctttgcatcgttttaagaaagcaacattagtattacagatttaaaaagcaaagaaaatgaaaaaattagtatttttgttcgtagccttcgcagctgtttctttcgcatcttgcggaaacaaagctgctaacaacaacgcagaagcaactgattcagttgcagtagtagaagaagctgctgttgtagaagaagttgtagcagattcagctgcttgtgactctacagctgcttgctgtgactctactaaggctgaataattcagtacgaactctagagagaattgaaagtctgccgtgcgaaagcacaacagactttttttatgtttttacctctccctttctgccagcattccattgctttacaatacaaattatctacttttgtttctcgaaccacaaacaaaagcagaatatgaaaaagacaaatctaaaagagaaacttcaaaactggaagttgggaaattatttccgcgaattatcaattgtcactgccggagtatttatcactcttgccggaactgattttataaacagtgcctcacaagagaagcagataaataaaagtatgcaaatgataaaaatggaattagaagagaatttaaaaagtatcaatcaggccgaagccgcatatttaaatgaaattaatttcttccgattgttaatacaaaaacaggattcacttcaaaccattaaagcttctattttagaaaacaatgccaatgctccttttgcgtatgaaaattgtgagtattcggaagatgcgctagaagtactgaaaagctcagcgctgatgcagcagatacctgacaaagagttcattttaaaacttttacaagcctataaaggatgcagaaaaataaatgaagacaacaaagactattataaatacaaacaggaccatataactcgctatttatctcaccaaaccagcaataatattcataaaaattataacagtatttatgaagtatgggcagccagactacaagaatatgatatcaaacaactgatcctcactatgccaaatacttttaatgaaaatccttttaccactcctcaaaaagttataaaagaaacgattgaattaataaatcaaacatattaaaaagaaaaagcccggctctcacgaaccgggctttttcagcatcattatactttaaagtatttacagattttattcagcaactacttcgaacgggatctctacagaaacttccttgtgaagtttaacgatagctttgtaagaaccaacttctttcactgcatctttcacaatgataatctttctgtcaaccttgtgacccaatttttccaattcctcagcaatttgaatgttgctaacagaaccgaaaatagtacctgtggcactcactttagtagcaatagtcaaggttacatccttcaactgttctgccatagcttcagcatctttcttaatcttttccaatttgtgagcgcgttgtttcagctcttctgccaacattttcttagctgaaggtgaagcaatcactgccttaccagtcggaataagatagttacgaccgtaaccagacttcacagttacaatatcatttttgtagcctaagttcactacgtcttctttcaaaattatttccatacttattcctccttattatttcatcatgtcagttacaaatggaagtaacgccaagtgacgtgctcttttaacagcctgcgcaatacgacgttggaacttcagagaagtacctgtaatacggcgaggaaggattttaccctgttcgttcaagaatttcttcaagaattcaggatctttgtaatcaatgtacttaataccactttttttgaaacggcagtattttttcttctttacgtctactgagggcggagttaaatatctgatttctgattgttgctgtgccatgattaatcctcctttttagttgatttaacatttcttctcttagcagcatattcagcagcgtatttatccattttaaaagtcaagaaacggataacacgttcgtcacgacggaagttaatttccaacttttcaataacctgcggttctgctttgaactctatcaactgatagaaaccagttgatttcttttggatggggtaagccagctttttcaagccccagttttcctcattgataatctctgcaccttctgcagtcagaatacctttgaatttctctaccgcttccttcatctgaacatcagataaaacgggagttaaaatgaaaacggtttcgtattgattcatactacgtttattaaattattaaattaaatttcaaatgcgagtgcaaaagtagatattttatcttaatctacaaagagttatcgcaattttcttcaaaaaatatagtttcattttacaattaattttcctttttatattttttatctgtgaaaaataagttatatccgccaagaattgtatatttgcaaagttgtttaaacaataattccatgatagaacaatttagttttgatatccaattaatatttgccatattaaatggcaaagtatctgccgccatcaaccggaaactaagccggaattttcgccagaatggtgtagaaattacccccgaacagtggacagtccttctttttctatgggaaaaagatggtgtcacacagcaagaactatgtaatgccacttttaaagacaaacccagcatgacccgcttgatagacaatatggaacgccagcatttggtggtgcgcatcgccgacaaaagagatcgacgcaccaatttaattcatttgaccaaaaccggcagagaattggaaggcaaagcacgtttcatcgcaaacaagacattgaaagaagcactgcaaggattaacattggaagaactgaaagtcagccaagatgtattaagaaaggtattcaccaacatcaaagactaaagtttttcaaggttttcatctttttttcctaaaataatttccatgataagagaattatgctttaatttgtacacaagaataaatataatctattaataaaatacacacatgaaaagcttacttaagaatttaggtctgatactgatgatcatcggcgccgctattttagtcggtgttttcttcaccggaagtgcagcaattaacgacaacggtgttttaggtggaagtgccgcccttatcgttataggtttaatcgtttatattgtattaaacaaacgcattgttgattaaagtataagagaacaaaaataaaaaagtccgaaacaaatgttccggacttttttatttcatctatttcactcagccttattctacttcaggagtaatcagtttataccccttcccgtgaatgttgataatctcgatagaatcatcttctttcaaatgtttacgcaacttagtgatatacacgtccatgcttcgtgcattgaaataattatcatcaatccaaatggttttcaatgcgaaatcacgctgcagaatctcattagcatgagcacaaagcaagcccaataattcggattctttcgtagtcagtttagtctgttttccatcgatagccaaaatttgtttctgagtatcgaaagtaaaacgaccaatcttgtagatattgctttccttgtttctcttaccacgtacacgacgcaaaatagcctcgatacggaaagtcaactcttccatactgaacggtttagtgatatagtcatccgcaccaatcttgaagccttccaatatatcctctttcaaagttttagcagtcaggaagataataggaatttcagcattagcctgacggatttcctgtgctaaagtaaaaccgtctttcttcggcatcatcacatccaatacacataagtcgtatttgttcttaaggaaagccttgtagccagcctcaccatccgggcaaagttcggccgagtagccttttgcctgcaaatattctctcaatagcatgccaagattctcatcatcttcgcataacaagatacgcaatttctcgtccatattattcattttttaataaaggtaatacaattataaatttagttcctacattcaattcactctcggcacgtatagcccctttgtgatcttgaattatttttttcacataagccagtcccaaaccaaagcctttcacatcgtgtaggttaccggtatgcacacgatagaatttatcgaatatcttcttcaggttttctttcttaatacctattccattgtcctggatagagatataaagcttgcccgattcattccaagtacgtacattcaacaacaattcgccttcctgttttttatatttcactgcattgtccagcaaattaaaaataacatttgtaaaatgcatctcgtctacaaatatatccggatttaccgcatccagattcgaagtgattttaccattgtatttctctaccttcaacgtgaaagtattgacaacaccggctatcaaatcatttgcattcacctctttcatcttcagcgtcgctttttgcttttcgaacatagacatctgcaacaccttttccacttggaaacgcaaacgtttggtctcatcatttatcactccggatatatgctggaacatagcaggagattttcccactgccggatctttcaacatctgggccgccaacgatatggtagagataggcgtcttgaattcatgtgtcatattgtttatgaaatcattctttatctcggtcaacttcttctgacggaagatgatatagatagtaaagatgaacgtcacaagcaatacgaatgtgaagatcagtgacgggatcataaatttaacagaactgaatatgtaactgttcaatgtaggaaaatgaatatttactgtcgccatacgagccggaggatcatttttaaataaaacctgcggatatgtattctcactaccctctttggtataatcagggcaatggtaaacttccgtcccgtcacggtctgtcaccgtaaaatgataaggaatgtcaatgccattattcagcaattccgtctttaaaaacaagtccaactgtttaaagttgattcttttgttcaaaggtttgtcactagctgtatacaaaatgttatagaccacttcgtccaacaatgcacgttggtacacatatctgtctttgattatttcctgcaaggctcttgaagtctgaggaatgttcttaccagtcgaaataattgctttaggaatattagaaggacgattcgcactgaacctcatcttcaattcaaaagtagagtaaccgttcaatccgtcggaagtaatggaatactcatgcgtatgcgccaccacatcaccacttccttctcccttcttctcttcggactgctccctggacagctgtgctgctttttccgtagcaatcgcatcatcctcaagatactttttagtttccaccaactcaatattccgacacgcctggaccaagctgcgctgaacagactcatcaaattgccctttgcgcattttcaccatttcttcaatatagcttacctgcaaatacaacaagctaagaaatgatagccccattacaatacctaatacccaaatagtagactttttcatgccagcaaaattaaaagcgttaaatctcatcacacaatagattaaccaaatttaaacggccattctctataattaaccgaaaaagtcatttaagctaagattctgactattataacaaaatttacgccaattggtttgcaaaaataataaaaaattaagttcaaagccaaataacaaacctaaaagtttaagttaccttaaataaaaagagacgcatttttaacgaaatacgtctcttctaagtacgaaattttacactttatcaatcatctttattctctttagcttcaaattccttcatcaatttttcttgtacgtctgtcggaaccaattcatagctagcaaacttcataataaatgaagcgcgaccgcctgtcaaagaacttaaagaagtggaataagaagacatttctttcagaggtacttttgcaaccagtttttcgtatccactttcactgctcatccccataatcataccacgacgaccttgcaaatcactcatcacatcgcccattttatcgctgggaacgaaaacctccacatcataaatcggctccagaatcttaggtccggcattcttaaatgcctcactgaatgcattacgtcctgcaagcataaaagagatttcatttgagtctaccggatgcatcttaccatcataaacaatcactcgtacatcacgcgcatacgaacctgtcaacggaccctgctccatccggctcataatccctttcaagatagcgggcataaaacgggcatcaatagatcctcccacgatactgttaataaagactaatttaccaccccattccaaaggtatttcctcagtccccttcacatttatcttgaattcctgaccgttaaacttatacgtttcgggtacaggcattccttcataataaggttcaacaatgagatggacctcaccaaattgcccagcaccgcctgattgtttcttatgacgataatcggcacgggctgctttagtgattgtttcacgataagggatcttaggctcctcgaacttaatctgcaatttttcgttattttccaaacgccacttcaaggtacggagatgaaactcaccttgtccatgcacaatagtctgtttcaattccttagattgctccacttcccaagtaggatcttcctcacgcatacggttcaatataaccatcatcttctctacatcagcctcatttacaggcttgatggcacgcgagtatttagcattaggatatttaatgaagttaaaccggttttcacagtctttgccgttcaaggtatttccagtctttacatctttcaatttcacagtacaaccaatatctccggctaccagttcctgcaccggaatacgattagctcccgcacaaacaaaaagctgtgccatacgctctttagagccacgatcagcattagtcaaatcgtcaccttcgtgtacttttccgctcatcactttaaaatactgcacaccaccgatatggggttcaacggcagtcttgaagaaataaagagaagtagggccattcgcatcgggaggcacaggaacaccacgggtattatgaaccacaggcatatccgatacgaatggaacaacattacctaagaattccatcagacgacggacacccatatccttacctgcacatacacagaaaacagggaacataccacgtgccgccaatcccttacggataccttcacgcatttcatcttcagtcaatgattccgattcaaagaacttttccatcagtgtctcatcattttcagcagcagcctctaccaaagctttatgcatctccaatgccttttctttctcagaatcaggaatctcttcaattgtaggagcgcccccttcaggtccccatgaatatttcttcatcaacagcacgtcaatgagttcatgaaaattaggtcccgtttcaagaggatactgcacgggaactaccttggagccataaatgctacgcaactgttcgagcacattgtcatagtcacatttctcattatcaagctgattgaccaaaaagataaccggcttacccagcttttcagtataacggaagtggttctgagtacctacttcgggaccgtattgtccattcagcagcaaaatagcagtatcggttacatttagcgcggttatggcagcccctacgaagtcatcactacccggacagtcaattatatttagtttttttccattccattctacatgataaacggtagagaacactgaataaccatattcttgctctaccggaaaataatcactaaccgtgtttttggcagtaattctgccacgacgttttataataccactctcaaagagcaaagactctgtgagggtggttttacctgagccatcattgccaagaagtgcaatgtttttaatttcgttagtctgatatactttcatgatatctaaggtttaattattaacaaacggatatgtgtttcatatctcctaaaaatgtggagcgcaaattagaaaataaagagaaaaaaagcaactcaaaggatagtgttactaaactatgttttacggcagatattctatcttatcactatttttttcgtagctttgctgaaaaataaatgatcatggcaggtatttatctacatatccccttttgcaaaaaacgttgtatttactgcgattttttctccaccacccgtagcgaacagaaaacagcatacatccgtgccttatgccgcgaactaaccgaccgggaagcctatctggaaggcgagtatatagaaacgatatatctgggcggcggtactccctcgcaactggcaaaagaagatttcgaagcaatcttctcccatatttataaggtatacaaaataatccccgatgctgaaatcactttggaagctaatcccgatgacttaacgccggaatacatttccatgttacgcacctttccgtttaaccggataagtatgggaattcaaacttttcaagactccactttaaaactgcttcaacgccgccacacagccgaacaagccatccgtgctttccaaaactgtcgtactgccggtttccggaatattagtattgacttgatgtacggactacccggagaaacacttgcttcgtggaaagaagatttaaaacaagccctcgctttgcatccggaacatatttccgcttatcaccttatttatgaagaaggaaccactctttggcaacttcgtgaacaacataaactggaagaggccgatgaagatctgagcgtttccttattcggcacactgattgacagcctcaccgctgccggatacgaacattatgaaatatccaatttctgcctacccggttttcattcccggcacaactccagttattggactgaaaagaaatatttgggctgtggtccttccgcacattcatacaatggtacttcacgccaatggaatgtagcctcactaaacgaatatataagaggtatttctaacggaaatcccacattcgaagtagaagaacttgactcatatacccgttacaatgattttgtcattacccacatacgtacacaatggggaatgccactgcccaaactcaggaaacaatatggagaagaactgtacaagtactgcctgcgtatggccaccccgcatttacaacaaggaacactggaaataaaaaacgatacgctgaaactgacgcgtaaaggaatcttcatatcagacgggatcatgagtgacatgctttgggtagaataaaatttatcatcctgtttcactgatgccctgagcatgaaatccgattataactgcaaggtgaatgcggatcatgtaccgacggacgaggagtatgggagcactttcggaaaagaccggccgggttgtcataaaatattgcagaacggataccgcacatattgttacgcgcaggctgtccgggagcataccggctggcaatactgtcccaaaagaacatgaagccaatccggttcaagccctgcggatacgttcagaattccaatgataagaaatataggctgaagtggcggacttgaccggatccaccaatcccaacaatttcccgactgctttcaaggaactgtacggaatacctccctgcatgtacatggaacaacatttgagacaggataagaataaggaagaccaagtacaaacccgaaaacactcttacatatacctatttcaagaaccttccttcagtccaatcagccaccataactcactattacacaacacataaggctgacagtagtcctttcagcccgctatcagtcctgtcagccgatgacaaaaatcccccaagctctttccttat

SEQ ID NO: 3945 - DNA, 74333 bp, Unknown
  gut microbiota DNA sequence
tttgtattttttgatttttcacgtacatattccataattttcgcatctttgaaattgtattgcatcaagtccatcagattgatacctcctagataatacgaaagcatgaacacatccctggcaacacgctgggacttctcttttatctccgcatcccttatcttctttacgtcagctaccgagatatcacgctctttgggcattcctgccggtctttcataatattcaaaaggatgcgtgtcatatgataccttcttatcccttattgcttgattgattattgccttcaaatgtgccatgtgcataccacaagtaacaggagccagccttcggacattttttagataaatatcaaaatcctttatggtccggggagtaattccatcaagcattatatcatatttgacaaactcaatgaagtaatcactcgccctttgatataaagaagcagtgctccttctcccctctttaatcaaattctgcatatagtcagccgaagcgacactataagagatggctccctgctttaccgaggacaagtattcgacaagttgagtacaagtataggatgatgtgtttatcttatccaaggcatcctgatatgaattaagtattccacgtaatttagcattaacatgtgcagcatcaggaacacctaccacctgccctcccttaaaattagcagtattatctatttcaaatcgggtaacgatgtatcttgtttcctgtttatgaccaattgctatacgaattctgtgtttgccgtttttcagcaccttggccggaacaacggcggctttaagagttgtcataattgttctggattcgttttagacaagttctttttgccaaaagtggcacaaactgtcttttttttatccaaaaacgaaagttggagaagcttaataaaacacaaacccctctgaaacagagaggtttgtaatgtggagcatgcgagactcgaactcgccacctttagactgccagtctaacgctctagccagatgagctaataccccgagaaataataacgatgcaaagatacatagaaaatcaataatacaaagcttttgggaaagtttttttcatgtgaacaaaaaaattatttgccacttttactccaaagagttactgttgcgtaaaattgttaaccaatagctgaccaagtttaatagcataaaagcggataaccccgatttgtgacaagtcggagctatctaaatcataagttaaaagttattatgaaaaatcattattgtatcaatattataccccatcggcataataacagtcacaatagttacacgaacaccaaagggatcccaacagaaagcttcattgggaatacggtgtatttagctatgaataacaactatatgtcaagaatggataggatcggaaaaagtcatactgaagcatcttagtaaaagaacaatcatcgtcctatcaagtgctacccggcattatctatatcagtccggcaaaagcatgaaaggagaaatataccgaatatcctagaagagaaagaaatattcatgtccgccaataacaaatccaccacaaatacaaccaagggttgctgctattaacggctacgtaccatttcaattacagcactgtatttcacaactctatgattggcaaggcaaaaaaagatgtaaaaattgcattaaacctcctctatcggcttggaccaaacttcctctttcgtttctttacacattacggaaatagttcctccaacaaaatccttcacatatcctttgcgttcagccaacatatcttccgccattctaatggccttagccttatctttcaatgaaaatcctttattagcaaaatcattaccttctttaaaatatatatcataagtttccattgtatcacctttttaaatttgagtggcaaagataaaacctacaattattatgcacaagagatttcttaattatttttcgaatattgtcaagaaacaatttaactaaaaaaattcccgacttatcacaagccgggaattcatgtaaaagcactattataaatatactaactattgcaaaattttaccatcttcacctaagaacaatgtctgttcatgagcatcacttgtcaacacattaattttataaatacggcttccatcaatgccataggccataaaagcctgctttatcatagcaccttccagtgcaagcctgtccatcacagcttccggcacatcattcatatagatttccgagaaaaccaacttcttagattgttgaggcttttccactaccggaacctctaccggagccgcttgagcaaaagaaacagacacgcctaaagtcatcactaataccaatgttactaatacctttttcataattactttattttttattcatttttaccgacaacaataaaacaagaagcgtgccacaaatctgctcattttaatatctaactaaaaatcaaccacatacatatacgctttttcatttcaggagtgtagattcctgttgacaacgccacaaaagtgtggaaaaaatccacaaaatcaggttttataccggcgaacaataagtatagccaagctgttttatcaacctcatcaaaacatttaaataccatgaagaagagatgttattctatatgtgtaatattatgggtactgatcaccaccttgtctgctacctctcccactacatttcatatagcactgaaaaagatatatccacatgccacgaacgtaagctggagccaacaagggaattattatgtggcctcttttacccaaaatggttttgaaaaagaagtatggatgaacggtaatgcccaatgggtaatgactaataccgatttacaaactacagatcaactgacacctaacgtatataatgattttacattgagtccatacgccatgtggactgccaccaatgtaaatctcatagaatttcctaaacgaaccactctgtacgtaattactgttaacctaaacaattcgtcggccaccaaacaattattctacacactgaatggcaggctattgcaaacacgtgacgtcagttatatcaatcctacattatcccccggaatctttgaattctaatactattatgactgaacaaataacatttccggaaaagggacacatcaacaattggcaaacgattataaactagcattttaaagtaaaataataaaagaatctacattttcagggcgttaaattaatgtaaaaaactgtttcatttcccatcccccttacctcattttactacttttgcgcacactcagcctataaatgtgcaaaagttatcatggaactagaacagagttttattgctcttatcgagcaaagtataaaaacaaattggtatttaaacgctcttacagactataaaggcatcacattacaatacagagatgtggcccgtaaaatagagaaaatacatatcttgctggaaaatgccggcattgagaagggagataaaatagccatctgcgggcgtaatagcgctcattggacagtaacttaccttgccgtcatcacctatggtgccgtagtagtacctatcctacatgaattcaaagccgatcaggtacacaatattgtaaaccactctgaagcccgcctgttgttcgtaggcgatcagatatgggagaacttgaatgaagcagccatgcctcatttggaaggtatcatagaattgaaagatttcggtgtacccgtatcccgttcggaaaaactggcttatgcccgcgaccatctgaatgagatattcgggcacaaattcccttgcagatttcgtcccgatgatatttcttatgaaaaagaaaaatcagaagacctggccatcattaattacacttcaggtactaccggatattccaaaggcgtaatgctgccttatcgtagcatactctccaacgtgctctactgtaaagaaaaaataggtctgaaagcaggtgacagcgtcgtatccatgttacctttgggacacgtattcggcatgactttcgattttctttacggtttcacagcaggcgcccatctatggtttcttacccgcatgccatcgcccaaaatcatagccgaatcatttgcggaaatccgcccgcgcgtcatagcctgcgtgccactgattgtggaaaaaatattcaagaaaaatattcttcccaaggtagacaacaaattaggtaaactgctattacatgttcccatcatcagcgataagataaaagaacttatcaagcagaaggcgatggaagttttcggcggaaatttcatcgaaatcatcatcggaggggctcctttcaatgccgaagtggaagcctttctaaaaatgatagatttcccatacaccattgcatacggaatgactgaatgtggtcccatcatctgccatagtcattggacagaactgaaactggcatcttgcggaaaagttgccgcacgtatggaagccaaggtactgtctcctaacccatcagccattgcaggtgaactggtatgccgtggagccaacctgatgttgggctattataagaacgaggaagcgacacggcaagtcattgatactgaaggatggttgcatacaggcgatatggcgacaatagacgaagacggaaatgtttttatcaaaggacgttgcaaaaacctgttactcacttcttccggacaaaacatttatccggaagaaatagagtccaagctaaacaatatgccatacgtgtcagagtcactgattattctgcaacaagacaaactggtgggcctaatctatccggattccgatgatgcttttgctcacggcttgagccaatcagaccttgtacgggtaatggaagaaaaccgccttgaactgaacaaacaattaccggcattttcccaaatagcccgcttcaagctatatcctgaggaatttgaaaaaacagccaagaaaagtatcaagcgcttcttgtaccaagatataaaagaataaatcaaaaaaaagctctcttcataatatgaagatgtatcaaaagtaaaaatggcgtatcattttgccagtaggggcaaggttcgctcgcccaaaaatggtttgcttatgcatttgggcaggcaaaccctgcccctacagttgacaacatgataacacaatcggacttttaatccctccgccccatatgtataaagccacacatacggtataactacaaaagttcagataattcgttctgcaaacgtcctgccacttcttccataggcacttcgcaccccaattctttctgtaatgaagtaacccctttatccatgaatccgcaaggatggatataactgaaatagcgcaaatccgtatttacattcagcgccaatccatgcattgtcacaaaatgactgcttctcactcctattgcacaaattttccgttcctgcggagttcccgcggccagccatactccggtcgctcccttcactcgcccggcttcaatgccataagatgcgcagaccctgatcaccgcttcttccaacacatgaatatattccttcaatcccaaatgataatcctccaaattcaagataggataacaaaccaattgtccgggaccatgataagtaatatcccctcctcgatcaatatgataaagggtggcaccaatcatcttcaattgtgcctcccccagcagcatattcgtttcctttccactcttgcctaatgtatagacatgcggatgttctacaaaaataattctattctcatacgtttttcccacttgtttagcttccaccacggcattaaacaactccgtctgccgtttccaagcctcagaatagggaactaatccccaattttcaattttcatgatacctcccagttttaaatgtaaaataggatagggttcgcccgatgcgtcttttgcatccctgccaataacccgaaatccaaaatggccataaaagccggacgctttcttattttgttcgtttacatcgacataacgtacatggcaatgctccaaagcataacgcatcaattgtttccctattcccgtacctatggcacgcggatgaacaaaaagcatttcaagcatagtcccattaatccccatgaatccttctataccagcattgtcacgaatcatgtaaagcggcatactatgaagataaacactccataccagtggctttaacttctgaatatatgcttcaggtatgaaatgatgagtagcacgcaccgaagcttcccataaacaggtcaattcatcaaagtcatcgggcgtaggtttaattatttgatacatattacttttttctgcaaaggtgggataattattgtatatttgcaaccccaatcaaaagaaagaatatgttgccgtacatcaatgattttccaatagaattccgcgactatatcgcaagtgaaattatcccacgatacgctgattttgacaaagcacatcgtgtagatcatgtattgaaagttatagcagaaagcctcaaattgtctcaatattatgatgtgagccgcatgatggtgtatgttattgcctcttaccatgacctgggactctgtgagggacgggagttccaccatctcatttcaggaaaaatactatgggcagaccagaagttaaggcaatggttccctgaagagcatattttgattatgaaagaggctgtagaagatcaccgtgcatccaacaagcatgttccccgtagcatttatggcaaaattgtagcggaggccgaccgcattattgatccggacatcaccttgagacggacggtacaatatggtctttccaactatcccgagctggacaaagaaaaacaatacatacgttttctgacacatttgaaagaaaaatatgctgaaggtggttatttaagattatggatacctcaatcagccaatgctgtacatctgcaggaattgaggcaactgatagccgatgaggaagaacttcataaagtatttgaaaagatctattcacaggaaacagaaacgatacagaatttagaaaatatccctatatttgtccggaacaaaaaaaataacagtatatgaaaaagctggttctatccatttctatgtttctgattgccgctactacctttgcgcagtccgaagtggtaacagatagtattccgcccatttcattggatggttacaagaattttaacggatttatgctggatatgggttccatgattatggcccctccccctctgatagccccgcaactttattatcagccttacaacaataatgcaattgcgaattacaatgaaatattccgtcccaatatgaatatcatttatgacagagggtcttacaaccatgtatttacccccatgtatccgggaatgggaatctatggattcggaacaatgtcaatgcctcccaccttacaaagtgcaacctttaaattgaaaaacggattacacatcaccacatacggtgaatatgatgccgacgggaacaaagtacggaatccaagcgcattgccttgggaaagaaataatttcaacggagctttcgaaatgaaatcggagaatgggaacttcggaatacgaatagaagtacaaagaggaagaaacaatcctttttgaattataaactaaaagatagaaaaatgaaaagcagccatgcaaaacaaaatctatgcacggctgcttttttatttatttttaattcaatcacaactttctccaattcaggctcaagctgttcaacactacactgacagaactacatgccatggcagcactggcaatcatcgggttaagcaagataccatacaatgggaacagaatacctgccgccaccggaatgcctatcaaattatagataaacgcccagaaaagattctgatggatcaaacgtacagttttatgggaaagtttaaaagctttgggtaacaacaacaaatccgaagtcattaacgtaaccatcgctacatccatggcaatatccgtacctttacccattgcaatacttacatcggcacgtgccaacgcctgtgagtcattaatgccgtcacctaccatagctacgactcttccttcagcttgtaattctttaataacattctccttatcgaccggcaaagcatccgaaataaaacgattcgcatcaatttctccggccacattctgtgcagtaagatgaccgtcaccggtcaacaatacaatgtactttccactctccttcaattgtttgaccgcttgtctggaagtatcttttattttgtcactaatggctataaccgccagcaatgtatttccctcgccaaaataaaccagactcttgccactcttctcataatcctccaccatccctttcaacaagtcggaaattcccgctccaaaatctttcagtaaccgatggcttcctgcccaaaaagttttatttccacgggtcaccacaatcccccgtcctgtccgactctcaaaagaatcaatgagtgccggcttctcaccttcctttttcaaagcctcgacaatagccaaagccaacggatgttccgatttcaattcagcagcatacagaattcccttatgctcgttctgccatccggcatcatgcaaccatccggtcaccacagggcgcccctcagttacagtacccgttttatcaagtaccactgtatccactttccgcatctgctccaaggctaccgcatcctttatcaaaatatgtgattcggcccctttaccaattcctaccatcaaagcagtgggagtagcaagtcccaaagcacacggacaggcaataaccaaaacagacactgctgaaagcatagcataagaaaagtcatccgctccacctgccactatccaaacaaggaaagtaaaaacagccacagcaaggacaacaggaacaaaaaccgccgtcactttatccacaatacgctggactggagctttagacccctgtgcttcctgcaccatgcggataatctgtgccaacaccgtatttttccccaccttttgagcagtcatagtaaatgcaccgttctgattgatagtgccggccagcaccttatcaccctgttttttctctacaggaataggttcaccgcttatcatgctctcatctataaaggtgtttcctccgacaatgaccccatccaccggaatttgctcaccgggacggacgctcaccttatcgccaacctgaagttcggctatcaagatatcctcttccctgccgtctttcaccacacgggccgtccgaggctgtaatcccatcagtttacgaatagctgtggaagtttttccttttgctttctcttccatcagcttgccaaccaatacgaaagctatgataacagtggcagcttcataatatacatgaggttccaatccgcggctgtaccaaaattcgggatagaacgtattaaacaaactgaacaaaaatgcgatggaggtgctaagtgccaccaacgtatccatattactggtacgctgaagcgtctgtttccaggcattcatatagaaagaacgccccgaatataaaataacaggaagtgaaagcaacagcatccaccagtttactcccggaacattcatcagaaacatccccaaaacagctaccggtaaagcaaaaatccaagcaacgatagtcttccgcttcaactgtccgtaataagattgctctgcttcctcctgctcctgcacagagttatcctcatctattatcaaatcaaaacctattttcatcacagcctctttcagttgttgcggagacacaatatccggattataagtcaccgccaaagtagccgccgccaaattgaccgatgcattttccacgccttcttgcttccttacaatcttctccacgttgccggcacatgccgcacaatgcattcccgtaacgggatatagtttttttgtcatatcgctcatattcatttctttacttatttattatagcttatcaacggacaaatttagcaaaaagttcatgcaatcttgttgcaaacagataaatatattttcgctttttagatggacatttcacgaagttattctatatttgtggagaaagttaggataagtaatccatgcaaataaacaaaaagttatgaaaaaaagaaatctcgtattgtctgttatgacaacttgccttgtatcctgctttttattatcgggatgtaacggacaaaaacaaattgatagtgaaactgtaaagactgtaaaagtggaagaacaagcccatttacaagatgacacagtctctcccgcctgtaagattactattgattatagttatttagcagaatctgatgctgcggatagcatagcacaacgcatcaaccgtaccatacaagcccacgttttgggaaaagaatatatccggatgaatccggaagttgctgtagattcttttaaaaatacctacattgacaactaccgcaaagatgtgaacgagttctatcaggaagatataaaaaatggaactcccaaagacgaacttcccacatggtacaattatgaatacggactgaccacccatttcagcgaaggcaaagaaggcattctgaatttcattgcagaaacttttgaatatacaggcggggcacatcccaactcatggaacaaatggatgaacttcgaaaagaataccggcaaactgcttgctttgaaagatgtatttatggcaggatcggaaaaaccgatgagcgacatgttgctggaagaactgataacagagatggctacccgtctggaagacagctccatcacctcactggaaggacttcagaatgcaggcatcttgaattctaccaatatgtacgtacccgacaatttcttgttagaaaaggaaaaagtatctttcctgtataacaaatacgatatcgctccctatgctgtaggagtcatcaccctttctttgccctacacatcggtagaaaaatatatgatacattaaataacgattttaagtatagaatggaattaatactgaaatatttccctaacctcagcgaacagcagaaaacacagtttgccgcattgtatgatttatatacggattggaatagcaaaatcaatgtaatctcacgcaaggatatcactaatctgtacgaacatcatgtattgcactcgctaggcatagccaaagtgataaacttcacccctgatacccaaattatggacttgggcacagggggcggtttcccgggtatccctttggccatcttattccctgaagtccaattccatctggtggacagtatcggaaagaaagtgaaagtagctacagaaatagccaatgctatcggactgaagaatgtcactttccgtcattgccgcgccgaagaagaaaaaaggaaattcgacttcgtggtaagtcgtgctgtcatgcctttgggcgatctaataaaaattatccgtaaaaacatcagacaagaacagcataacgccctgcccaacgggctgatttgtctgaaaggcggagagttggaacaagaaacaatgcccgtgaagcacaaaacaatgctttatgatctgaaaaatgaattcacggaagatttttttaaaaccaagaaagtggtttatgtaaccatcagcggtttataattatagataaaaaaaacatgaaaataaagaaatttgaattcaatatgtttccggtaaactgctacgtgctatcggacgaaacaaaggaagccgtcattattgatgccggttgcttttatgaagaagaaaagcaagccttaaaaagatatattgacagcaatagcctgacagtgaaacatttgttgaatacgcacctccatctggaccatattttcggcaacccattcctgttgcaagaatacgggctaaaagccgaagcaaatcaagcggatgaattttggctggaacaagcaccggcacaatcacgtatgtttggtttccaattgcccgaagcacccgtgccattaggaaaatatatctttgatggagatatcattactttcggcaatacccaactggaagctatccatgtaccgggtcattcgccgggaagcattgttttttactgcaaagaagcccactgtatcttcagcggtgatgtattgttccaaggaagtataggacgtgcagaccttacaggaggtaacttcgacgaacttcgcgagcatatatgcagtcgtttgtttgtactcccccccgacacggtagtctatcccggtcatggagacccgaccactgtgggagcagaaaaagcgaacaacccttttttccgataagataaaacttaaaattcaacttatatactactaccatgaaaacagatttattagcagaccgacatatcggtatacaggaagaagaccttcccgttatgttggaaaagattggcgtaaagagccttgatgaactgattaacaaaacaattccgtccaaaatccgtttgaaagaacctctgccactggctgctcccatgacggaacgggagtttgcagagcatattaccgaactagcttcacaaaacaagatttatacctcttatataggtatgggttggtatgacagtattactccggcggtcattcaacgcaatgtattcgagaatcctgtgtggtacacctcgtacactccttatcaaaccgaagtttcacaaggacgtttggaagcactgatgaacttccagactgtcatatccgacctcacagccatgccattggcaaactgctcattgctggatgaatctaccgccgctgctgaagccgccaccatgatgtatggacttcgcacccgcgaccaacaaaaaagcggagccaacgtattgtttgtggatgaagagattttcccacagaacctggcagtcatccagacccgcgcccttcctcaaggcatgaagatccaagtaggaaattacaaggaattggtatttactccggaaatctttgcctgcatccttcaataccccaatgccagcggtagcgtggaagactatcgtgagtttgtggaaaaggcacatgccgcccattgtaaagtagccgtggatgctgacatcatgagtttggcattgttagttcctcccggcgaatggggagcagacatcgtattcggaagtacccagcgcctgggtatccccttgttctacggaggtccgtccgcagcctacttcgctacacgtgacgaatataaacgcaatatgccgggacgtatcatcggctggtctaaagacaaatatggcaaactggcctaccgtatggctttacagacccgtgagcaacatattaaacgcgaaaaagcaacttccaacatctgcaccgcacaggcattactggctacaatggccggcttctatgccgtttatcatgggcaggaaggtatcaaaaatatagcaaaacgcattcatagcattaccacctggttgaacaaagccctaacccgcttgggatatgtacagcataatgaattattctttgacaccctgcgtttcagtctgcccgaccatgtttcggctcagaagctgcgtaccatcgcattgagtaaagaagtaaacctccgttactatgataatggcgatgtaggtttcagcattgatgaaaccaccgacctgaaagatgtaaacctgttactttccatcttctccattgctgccgaagaaaccgttcaagaagtgacagacattcccgaagcatcctcactgaatcgtgaactacgccgccgtacttccttcctcacccatgaggtattcaacaagtatcatactgaaaccgaaatgatgcgttatatcaaacgtttggaacgtaaagatatctcattggcacattccatgatttcattgggttcttgtaccatgaaactgaatgccgcttcggaaatgctcccactcagcaacttaggctggatggctatacacccgttagcacctgatgatcaaacaaaaggctatcagacattaattaataacttaagcgagcagttgaaggttattaccggatttgcaggagtcactttgcaacctaattcaggtgcagcaggagagtatacaggactgcgtatcatccgcgcttatctggaaagtatcggacagggacaccgcaacaagatattaattccggcatcagcccacggtacgaatccggcttcagccattcaatgcggatataccacggtgacttgcgcctgtgacgataaaggtaatgtagacgtagaagatttacgtgcaaaagcagaagccaacaaggatgatctggctgcattaatgattacctatccgtccactcatggtatctttgaaccggaaattgcagaaatttgtaaaattattcataaatgcggagcacaggtttacatggatggtgcaaatatgaatgcacaggtaggtctgaccaatccgggtaccatcggggctgatgtatgccatttgaatctgcataagacttttgccagccctcacggtggtggcggtcccggtgtaggtcccgtttgtgtagccgaacatctggttccgtttcttccgggacatcaagtttggggtaacagtgccaatcaggtttcttcagctccatacggtagcgcaggaatcctgcctattacttacggttatatttgcatgatgggcgccgaaggtctgaccaatgccaccaagactgctattctgagcgccaattatctggcagcttgcttcaaggatacctacggcattgtatataccggtgctacgggctttgtgggccatgaaatgattttagattgccgctatctgcatgacgaaaccggtatcagcgaaaatgacatcgccaagcgtctgatggattatggctatcatgcgcccaccctttccttcccggttcatggaacattgatgattgaaccgactgaaagtgaaagtttatgggaactggataatttcgtcactgtgatgcaaaccatctggcaggaaattcaagaagtgaagaatggcagtgccgataaagaagataatgtattggtcaacgccccgcatcctgaatatgaagtggtggccaatgaatggaatcacagctacagccgagagaaagccgcttatcctatcgaatcggtacgtgataacaaattctggatcaatgtagcccgggtagataatacattaggtgaccgcaaactgttgcctacccgttatggtaagtttgaataaaaaagcattgtactaagaagaagagaggatcaaaattcagtttttgaaaatatgaatttataatttgaaatttgaacatcctaaaaaactaaagaaagggtcgtatcattactcaagacagagcttgatacgacccttttaagtttataattactatctgtaacttttcggaactgtcattttagttttaacacacctcctccctcttttcaggaactatccttttactttatccacagtaggagcaacttgagttccatagcagtccgaacacataatatcagtatcctaattcataaggctgttctacagccggaaccccatcggacatccatccaggcattgcttcttttttcagataatgattaaagaactggaacatacgtttttgaaaatctattttgttggcaatctttgtcggccaatgcggttcgcctgtatagttcagcatccagcaaggctttccaagacgtttcattgccacaaaatattctattccctgataccagggcacatgtccgtcagcgtcattatgcatgattaaaacaggtgtttgtaccttgtccatcgtgaacagagcagagttttccaagtaacgcaacggagtactccaaggcgtaccgcccagacgactctgagtatgttcatactggaacgagcgtgccagccccgatccccaacggatacctccgtaggcactgaacatattgaccaccggagcacctgactcaatagccgcaaacaaatcagtacgtgtagccagataagccacttgataaccgccccaactatgtccctgcgcccctatggctttctcgtcaatataacctttgcctatcagcatggcaacccccggcatcagacagttatagcaactctcacccggataaccgtctacataacgtatgtccggattgaacacaatatacccgttactgttataaagatgataatcaatggtagaccgatggggttccggcatccggtaattaaacagagtttccgaatttcgctcatagaaactcacaatcatcgggtatttcttggccggatcaaaatcggcaggcttgtacaccaccccttccaacttacggccatctaaagatatccacgaaaccagttcggcagttccccacaaatagtctttctgttggtcaatgccatgagtcagccgaatagatttcttgaaatcgagtgtagcataatgaaggtcaggatattgctcaaaactttccatcgtatagattacatggtctgtatttttcgccttagaaatactgcgtaacatatagttacccgccatcaattctttgggagaagcagcggtggaaagacgagccttgtaatacccgttccctttggtcacttcgttaaagcctttcaacaactgtggcttgttcaggtcaatcatacgctcctccttatccagttttaccaaacgatatgaaatccggttcttacgtccattcatcgtcagattgacaggttccttcatggcatccggatcgaatttccaaatatcataacggtcataaattaaaagggactcatcccgttccgtccatccggcagttccatgtgcgttcggatagtcaggtacatcattctcttcatcccatgcgaggaaagaagcgggggtagtcaactgattttttttcccgtctgccatagaaagagtataccaacaactgtctgtttcagcataccaatacgcatacttgccttgtggtgaaagacggtatctgccataatccgccgatgccagtaatttacggctgccatcttccaaagacactgtgtaataatcactgcgtgtccgcccttcccacatggaggacaatgaataaggacgcgaagtggaaagcaatgccaacggggcatctccttcatctcccagcaaaatctgagacagctcctcatctgccagctgacaaatacgaccaccatttatatgataaaccgcttgatagcttcttttcagctctttctccttattataatcctgtacagtatattgcaccggctcgtcccaactccacacctgcacattgggacggttctccgccaattgcaacgtatccttttgtctaggctcaggcgatgtgccaaaaaacaaccgggaagcactcttcgaaaattgtaatttcccatgctcgctgattacccatcctttcggaaaagcccgattgccacgtgccgcaacttctgttgccggtgctccctgctgtgacagccacaagctcatggctttataacaagaatctttctgtgcacaatataagaaagccaagtttgctccatcttcatcaaaagtgacctgtttaaacaccccgtcaccttcttttatcagcgtcttcacacctgtttccgtattcagaagatacaatcccggcttttcctctgctttatcacctgcggtaatataataaagcattccgcttttctccgcaaagttgaaagctttcacagcaggagcctcataccgggtactgaggtttgcattcaacggttggacatacaaagtcgagtctttccttcccttctgaaaagcaacccagtccgccttctctgccagcctgaatgttttcagtgaatcaatcacttccctgccgcccgaaagcgaataaatgaccaatgcatccatcggcatcttttctttcttcgttttctttattttcagagaatccactatcatcttgccgggtttctgcgacacaaccaaatagtcggaagaagccgagaaaagaaaacggtccgcccgcggaaaagtggcaagttccttcccttgtgcatcatacaaattcaccacagcatctccttcccaaggttccatcttgcatgccacccactttccattatcagaaatagcttgcccgctgatacgctgccaggcaactaaattgtctactgtgagacttttcgaggctgtctgcgccatcacaggcgacagattccctatgcataggacaagagccagatactttacatgtttcatatccattttatcgttactgattagttcgatttttataaaagcttatctttctcatattccgttttatcttcggccgcaaccagatttaattccctgccgctctctccatatgaaaccgcatgacgtacagcaaaattttccaagaacaaatggttcagcgtaaacaatgccccattcaggtgctcatttctgacagaaggttttgtattcctactacgaatccgagacatgcatttacgatgctgtccgggagtcaagacacccgccatccatccactttttaaataatgcaaatatataaaaaacggataaaagtctgattctaaacaataattttgtacttttactgtcgcatataatccatatacattcaacaccaaacaataaaagccatgacagcaagaaacaaagttctaaccatcatgggtatcattatacttatcgggattatttcaataggattctttgtatttccaatcggaatttccatgtgcgccattacaggcttatgctatggctgcaaatataaagacaagttgtttatcagatggtcatctgtaggattggtaacaggtatcggactttccatttacacctggtgtttaatctcgtcaatgtaaaacagcataagttcagtaaaaaaaagaggggttacgacaacccctctatttcaccattcacgatatcaatatgcaatgcctgcggttccttcggcaatcccggcatacgcattatttctccggcaatgactaccagcatctcagctccggcattcatcacaatatcttgtacatggaattcaaaattgtctaccgcaccgtaaattttggggtcggtagagaatgaatactgcgtcttggcaatgcagatagggaaatttccatatcccaattctacaatatgcttcagtttcttacgggcagcggcactatacgtaataatgctggcaccgtataaattacaagccaccttcgatattttagtttccacactatcctcatcatcataggcatattgcaaaggctcggaaggttgttcctcaatggttttcacaaccagttccgccaattctactgccccttcgccaccatcagtaaaggcgttgttcactgcaaagcccacacctttcttctcgcaatgggtacggatataatccacttcttcctccgaatcatccccataacggttaaacgcaacgacaactgtctgaccgaaatatctcaaattacgcaaatgcttatccatattggccacaccctgcttcaaagcttccagattgggttcctttatcttatcctgtgatacgccgccatgcattttcaatgcacgggcagtcaccaccaagacggtcagtttaggtgtgatacctgctttacggcacttgatatcatagaacttctccgctcccaggtcagccccgaatccggcttcggtaatagtataatcactaaaagtcattgccatcttggttgccagaatagagttgcaaccgtgagcgatattggcaaacggtcccccatgaacaaaggcagcagtatgttccgtagtttgtaccagattaggagaaagagcatctttcaaaagaacagtaatggctccggcaactcctaaatcttttacagtaaaaggcttgttgtcatacgtaaaacctaataaaatattttcaatgcgacgacgcaggtctttttcatccttggccagacacagaatagccataatttcagatgcaggagtaatatcaaaacctgactcctgggtaattccgttggtcttcggtcctagtcctgtaacaatataacggagggaacggtcattcacatccaacacacgacgccacagcacttccttcaatccgaaaccattatcacgattctgataaaggtaattgtccaacaaggccgaaatcatattgtgagcggaagtgatggcatgaaaatcacctgtaaaatgaagattaatcttatccatcggcaacacctgggcgtatcctcctccggcagctccccctttcattccgaaacaaggacctagcgacggctcgcgcaaggcaacaattgttttctttcctattttattcagtcccaaagccaatccgatggaaacagtggtcttaccaataccggctttggtaggagtgatggcagtaactagaataaggttactctgctgcaccttttcttcgtttatctgactttcatccactttggcaatatagcgcccgtaattactgatgtgctctacaggaataccggtttccctagccacttgtttaatcttgaccagctcaatgctgcgtgctatttcaatgtccgttttcatctttttactaaatttaggcggcaaaggtaatatatttccttaactttgttttggtttcaaacaacaaaataatataaggagtaagcaaatgaacaattttgtattttacagccctaccgagtttgtatttggcaaggatacagaaatccaaaccggtactcttgctaaaaagtataacgcccggaaggcaatgattgtttacggtggaggctctattattcgcagcggattactgcaacgcatagaagattctctgcaacaggcaggagtggattatgtaaaattaggaggcgtacaacctaatcctactgacccgaaagtttacgaaggcattgaactggcgcgcaaagaaggcgtggactttatgcttcccgtagggggaggctctgtcattgacactgcaaaagccattgcggcaggagtgccctacgaaggtgatttttgggatttctatataggaaaagccaaagtgaagaaggccttaaaagtgggtgtggtacttactattcccgctgccggcagcgaaggttcgggcaatacggtgattaccaaactggaaggtctgcaaaaactaagtttgcgtgtaccggaattactacggcctgtttttgctgtgatgaatccggaactgacctatactctccccccctaccagacagcttgtggcattgccgatatgatggtacacattatggaacgttattttaccaacactcccgatgtagaaatcagtgaccggctgtgtgaagggactttgatggctatcatcaaagaagcatataaagtgaagcagaacccgaacgattacgaagcacgcgccaatatcatgtggtgtgggacaattgcccataacggtacttgcggagtaggttgtgaggaagactgggcatcacattttctggaacatgaaatcagtgctgtatataatgtgacacatggagcaggactagcagtaatcgtacctgcatggatgacattcatggcagaacacaacccgaaaaagattgcccggtttgcaaaccgcgttttcggagttcccgagaatgaggatttggaagaaatggcacttgccggcatatcacgattgaagcattttttcagatacatgggcctgccggtcaatttcaaagaattgggtatagaacatcctgatattgaactgctagtgaaaaaactgcatgaaaacaaaggtgaattagtaggtaattatgtaaaactgaacaaagaatacagtaaagagatattcgaactagcctgcaaataacccgcacagcccaactgttctaaaatataggcatctggtttatctgcctttatttcattcagaaccgtaaagctcctaaagtattctattttccaggcgcgccggcacgaactacgttattcgtgccagccgcatctgagatatatagcaccattaagcgacagacacttcatgcaacaacttccctcttacccatttatactccaacattttccaccttttacttcactatttatatgctttttagcataaaacgctaggtttttccaaccatttaaagtaacttcgccggacttttttggagaaaaaacaatgtatatattccgatcaattcacgaaataataaatacgatttttgtagctaaagggctattggtagagatgtttgagaagagaaaagtacttagttttcgatactcggacgcactcgccctattgaaagaggatgaaaaccgtttaaagatactcatcgaaaaggaaatcatacaccaaaacggaaactttgtggaactggatgcccgattccttgatttcttcgaactgctgctggaagcgaacgaggaaatcaacacggccaccgtagaggaaaacatagagtacctgcacgaactgatggactactacctgaaagaaaagatccagtcgcgcaaggaaagttatgtacgcaatatcaagattacctttcagaaactggcacgtgtaacgatacggaacattatcaaccttcaacacaatattgataatgctttcaaacacgagcccacataccagataaaaatagccaaactgcaaaatctggacaagaaacgaatcaacatccagcggttgatagactctaccgaacatctgattctgcatgaagaacgggatttcttccgccaagccactgacgaagagctgacccgcatcctgctcgaactgcggcaggaactgcaactatcagctcacagtctgattcgtgcccagcaggatatcatcaattacctgaaccaaataaagaatcaggtgatactggtagaaaaaatacgaaaagtaaaatatctgcaagatcagttcgagttacgtgcccggagtaatctgtccgaaataatggaaagggaacgctccctcctgttggaaggcaatacacaagcatcgttcaaactgtcccccagctatctggccagtgacgaagtgcgtcccatcattctgaaagttatcagcaatcagaagtatcgtgaaattgtacggaaaaatgaagccggagctttcagtgaagaagacttggaagcacaggccatgtacgaagaagtgattaatctggacgaagtggtaaccgcctttgtgcagtcgggggcagaagcccgctggaaaggagagccggtcagcgaccttttttcctttctgttacaatatcatttccatcgcgaagtggatgaaaaggaacgtaccacgttcttctgtcagattgtctcactttacgaaaaccaactggaaatccggaacgagttcggactccacaatcaatatgaatatgctaaaatatacccactctgagaattatggatttaaatatacaaatacccgataataccgcatccatctttgaatacctgcaaaaaggactgttcatcagttccaacagcaccagcgaagaagtacgcgatatgtataatgaaatagatgagaactacgaatctctctatcagtatttcttacaaataaactatacactggaacggggaaacgaatatttcttcttctcccgtatagaacctaaagccacactggagcaaaaaatcatgcgtgcctattactggatagatgtgctcgattttttcaaaacctacgatgaaacattcggtcccggattccgcttccatcccgaacagatattggtggaaaccaacatcaacatgctgctccaaaacaaactggacggtatgcggaaacacttctcggacaaggacatccgcaaggaagtgctggaaaacatgatacgccagctcaccaaagactcgttcctggaacaggaaaatgagaaaaccaatacgtataaagtgatgagcgcctggcattatctggaaagactgattgaaagtatcaacatttacgacgaaaccgaagatgagaaacctgagtagaattatctttatcaatagtgcgaatatcccttattcggacgatatctatctggacggaaacgttcacttcatcggtacgcagggagtgggaaaaagtacccttctgcgtgctatccttttcttttacaatgccgacacgcaacggctgggcatttcggtggaaaagcagaattacacggattactattttccctactccaattcgtatatcgtttacgaagtggcaacagagaacggcgcgttctgtattctgagtttcaaatcgatgaaccgtgtatgttaccgcttcatccactctccttaccgcaaagaattctttatagacgagaatcgggtggcctatagcgagagcgaccgcgtgcgtgccgtgctggaccaatatggcatagaatattcacgcatcatctatacctacgacgagtatcggaacattctgtatggaaacagtacaagtcctgagttcagccggtactcgctgatggagagcaagcaataccagaatattccgcgcactatacagaacgtgttgctgaattcgaaactggatgctgaatttatcaagaaaacaatcatttcttctctgaatgaagatgaaacggccatcgacctgaacagttacaaggagcatctgaaaaactttgaaacccgtctgaaggatatcgaagaatttcagaaacgggaaacccggaaacaggctcgggaaatcacactgttatcccaacaaacgtccaaactgcaaggcggactggtgcagaattgccgcgaactggttgccgctttccgcaaagccgaaagtatccttccccaatggaaagagaaacaagaccgcacggatgccgacaaaggaaaactgatacgccggaaacaggagcttcaggatgaatcgcgcaaacgcagcgacaagttacaggaagcgctggcagtgctgaacaacgaactgcaaaaggcattaggcaaagaaaaggactatcagaacaagaacatagaagagattatagaacgctcttccaaaaaagaggaatggaagaaccggcaggtgggattgctggaagaacaacgcatccttacctcacaatatatggaaatatccaccaagtataaatcgctgattcaggccttggacgagcaatggaacaagattcatgaagcgaaaatcaaacaactggatacattaaacaatgcatacaacgagcgtctggaagaggcccgcaaagaataccagcggttcacagattccctttaccaggagttcgaaagcctgtcacagcaactccatccgctgaaagccgagaaactgggcgaactgaacgctatagattaccagataaaattatgcagaaaggaggttttctttgaggaagagcaacaggaattgaaaacacgtatccaaaactatgccaactttcatacggaacggaaaaaccgtatcgcccaagcgcagctcatcatcaaggaactgaccatgacttgggaagaggaacagcagaaacagttgaaagaaaaagacctgaccttgcaaaaactgcaacaggagatgctgcaactccgtccccgcatagacgaattacaagcttttctgaacaacagcaaagacaccttgcaaggctggctgaaagaaaacaaaaagggatgggaagagaatatcggcaaactgtgtgatgagagcatcttatggcaacgggggctttttccgcaaattaccattgaggggggaaactcattctatggcatttccattaatttagacagcatccaccgccccatcaaatccatagacgattatatcgtcgagaaagaaaacggtgaaaaacgtctggaagaaatcactgctgccatgcaacgccagcaaactgaaagggaggagttgcaggaacagttgaaacgcaaataccaaccgcagataaaggaacaaaaagccattatcagccaaatagagtatgaactggaacaattggaacgccaataccagcaggatatgctcgacttggaagagtggaagaagaaagccaatgaggaacggaatgccaaaataaaccgattggaaaacgaacagcgcaaacgggttgccgaactggacggtataaacagcaagctaaaaaacctgaacaaagaaaagacagagaaactggatagcctgaaactggaatggaacaagcaacaacaggctcttgccgccgaaaaaaagacacaagcggaagttatcgggaaggaagaaaaagaagaacaacgcagaatttcctccatcaaaaccgaatatgaagcggatatgcagaaagagcttcactcgcagggagcagataccgaacgtctgcaagacatagccaaccaactggcccagctggagaaagagctttctttcattaaggagaatgcgaccctggtcatcgaataccaaaaagacaaacgggatttgatagaccgtattcccggatggcaacgggagcacgatgaacaaaaacgtctgctccaattggaacgggaaacgctgagagtggaaacatcctccctacaagaaaaaatagaccttctgaacaaagaatgggaagaagcggaagaaaatgtaagggaactgcaaaagaacctggaggcttacagcaagattccggcatacgactggtataaaccgcatcaggatatattccgttccgaaaacacgcaaaccatgcagaccaccaagacctgtatggagctgattgacgaactgacccgccaggccaaccaattcactcaggtgcaaagcaagctccataaagaagtgaaccttttcaccggacattttgatgaggacaacaccttcaagttccgcgtaaaattcaacgaggattgggaatatgtacgctttgccgacgaactgcacgactttgtggaagaacaccgcatagacgagtacatccgccgcatcaacaacgagcattgggataccttcaaacgtatcagtatggacacctccatgctgacttcatcggaagatgatattcaagatgtgatccgtgaaatcaataaaggtttcgccacctgcaattttgtgggagtcatccagcgcattgaaatgaaagtggaagagagcagcaaccgcgtagtgaatattctgcgtgagatacagaaatattaccatgattacggctatgacctctcaccggaaaccaacctgttctcctctgccaaagagcaattggtgaaagaagaggctatcactttgctgcgtacctttatcaaggaaatacatgcttaccgctatgacagtatccgcctgtatgattccttcgagttgcgtttccgcattgtggagaacggcaatgacaccggatttatcgagaagatagccaatgtggggtcggaaggaaccgacattctggtaaaagcgatgataaacatcatgttgctgaatgtgttcaaggaaggagcatcccgcaaattcaaagatttcaagttacactgcatgatggatgaaataggcaaactacatcccaacaacatcagcggtatcctgaaattcgccaatgaccggaacatcattcttatcaacggttctcccaccgaactgaaccgcgatgcgtataagcacgtttacctgcttaccaaaggaacacagaacaagacccgcatcgcacggttaatctcagataaacagctataaaagccagtaataacaaactgtatatttctatattataatgcacaatctctcaaaaaaagattgtgcattattctttttccgtgaacattctccttacatgtacctgctacggttagggcggagagcttgtgaaagttcctccaccttttttccacaaagaaaagagcggcttccattcctgcaatattcatatcagagtaacccaaacaaccggacaaagaacaaatttacatccacttttctccatacaaagagaataacattaaacatatttgtgtaatttcgcccggtaataaaactacaaaccaatacgcgctatgatatttaaccggactgaaaaggaagaaaaagcctatctcatggatattattgctttattagctgccaatatcgaacagatggataaggccattgaagataaatccaaagacgtaatggagcacaaactctacttgtgggaaaatctgtccgaactggaccgagccgagaaaagtgcggtccggcagatagtcacccaacaagtagcagccagcgagtccttggccgagaaaaagaaacgttatcgcaaaatgatggccatcccctatttcggtcgcatcgactttcaagaaaaaggacaacccgaagtcctgccattatatataggtatacactcatttttcaatcctcccaccaatgaaaatctgatacacgactggcgtgcccccatctccagcatgttctatgattatgaattaggagaagcacatttcgacgccccctcgggagaagtgaaaggtaacatccgtctgaaacgccagtatcgcatccgtgacggaaaaatggaattcatgctggaaagttcactgaatattcaagatgacatccttcagaaggaattgagtggaaactccgatgaccggatgaagaatatagtcgccaccatccaacgggaacagaataaaattatccgtaatgatacatcgaacaccctgattatccagggagtagccggttcaggaaaaacatccatcgccttgcaccgcgtagcctatctgctatatcggcacaaaggggaaatcacgtccaatgatatcctgatcatttcccccaataaagtatttgccgattacatctcgaacgtacttcccgaattgggagaagaaaaaattgaagaatgcggctttgaggaattaatgctcaaaatactggacaacaaatataaaatacaaaccttctttgaccaggtggccgaaatactggacaaagaggaagaagattttatagaacgtatccgattcaaatccaccaccgagtttatccagcagatggataaatacattctatatttggaacaaaacgcatttcggccaaccgacctgaaagcagggcgtatccctatccctgccgagtatctgaaagaacgtttcgcggcatggcaccgcctgcccatgcgcagccgtttccaaccaatggcagaagaaattgcccgcgaactgactttcacctatcaccaagagccgatgggaaaaatacagatacggcagttgggtaatgaactgaaaaagatgttcaacaataaagacctcgacttatacaagggattttatgactggctgggaaaaccggaaatgttcaagcagggtaaaaaccggaaattggaatatgcggatgtagctccattactttatttgaaactggccctggaagataataaaaccatgtatggcatcaagcatctgctggtagacgaaatgcaggactatactccgatacaatacaaagttctggctaaattattcccttgccggaaaacaatattgggagatgcaaagcaatcagtaaatccatacagttccaccacctgcgaacagatccaacgtgtactggtcggctcggaagtgatgaagctttgtaaaagttatcgctccacgtatgaaatcacagagtttgcccaacgtattgccaaaaacgaggaactggaagctatagagcgtcatggagaggaaccggcagtcgccttgctgcctactgaaaagaaagagatagaatggatagaaaacctcatcacctctttcctgaaaggagctgatgtatccatgggtattatatgcaaaaccgtaaaacaagcggacaagttgtatgcagccatcaatcatttgtctgataagatctgtttgctgacagaagaaagtgtagcttttgtcaatggggtggtcattactacagcccacatggcaaaagggctggaatttgacgaagtgattgttccatttgtaactgataaaaactatagaacagaaatagaccgcagcatgttatatgtagcctgcacccgtgccatgcataaactttatatttccgcatcgggtaatataagtacatttctatcataagcattgacaaaacatcatccattgcaggaatggaatccatccctacagtggatgagcaagtctgcaaaagggtattcctccgtaaggaatgcgtagccttgtaatctgattcatccttaaaagatcttacccatatctctaaacctttcccgccgtagggttaaaggttttcttcctgtttgttttatctccgcaagcctttggagttatctccatagccttgggagtcaactccaaagcttatggagataactccaaagacttgggagatagaatacatccgtataaaaaggcttgatcaaggaagagaaaaggcttatgtaacagcgacggatgcgatatgttgttattacaagccgtttccaatgtacgaatcataaagacaaaatctttttttccctctccaaatcattttcattcagttggggagacggaaccatgcaggtacggatacaatctccctcctgacaagtatagtcataatacttcttttgtaattctgtcaacttatcgagtggaaccagctcccctttcagttccagaaattcctccatgtctgtactgtctccttgctttacaaacaagatacggcgcgctatcggattcctgttgtaatccagactaaaatacaaacctttaagaaacggcggaaaatcatacatcggcaattgcagataaatactgaacaaagccatttgcggtgactcacgctcgttaaagaaaatatacccgttctgatgattattgaataatcccactccccgatgcgttgtattataggcactcatgtgagtcaccttcacatacgtattgtcttcggaagactctatcagatagggttccactttaaggcattggcacgaagaagaaagactatagctcagataacttccgctataattataaacttcctgcacggaacgttgcatctcggcagtcatcatctccataaaaggattggtctttgcctcaccatgggcagattccaaactgaaaagcaactctttggtacttgccaaattgcccaacagacgtttttttgacacattattgacctgcgccaaagccaaatctaatgaatcttcttcagagtgtccttgtttcaatgaggttacataagtgggcagaacgctggaataaagagcagacaagacactgggagccatatctacataatccgctatctccttcattttcaaaccattgttacggagatattctattcttcggtatatttctatcaaatcattcattgttctcttcttctttattgaacttgcaaaatacaagtttttatatgaacatacaatgacatatacattacattaatgttacatcatacaacaggtggaatatgaaaaatattaatcataaagattcattttttctctctcggaaggcccctacttttgcttccggaaacagcaatccaaggacacgaggagtgaggttcctacaaagaaaagaaacaaaacaattagtcaatatcaattagtataatggaagcaaaaagcgaaacaaacaaacagatatccagtttcctgtttatcctgtgggcaggaggggcggcactactgtcatactcactggtatatgccctgcgcaaaccttttacagctgccacctttgacggaatggatttcttcgggatggactataaagtagccactaccatcatgcagattttcggctaccttatttcaaagttctttgccatcaagattgtttcagaattgaagcgcgaggaccggttgaagttcatggtatgctccgtagcccttgcagaactcgctttagtcttcttcggattactcccccaaccctttaatgtgtttgccctattcttcaacggactggcattgggatgcatgtggggagtcatcttcagtttcatagaaggacgcaaagttaccgatatattggccagcttgctgggggtaagtatggcggtgagctcaggaatggctaaatctatgggattgtttgtagtcaatacatttggtgtcacagaattctggatgcccgccctgataggtggtttagccttcccgctccttatcctcatggggtggtcgctcaacaagttgccacaacccacagatgaagaccgcgccctccgttcggaacgtgtcaccttgaacggagagcaacgcagacaactgttcaaaagttatatgcccttgctgatcatgctgttcttcgccaatctgtttatcactattttacgtgatataaaagaagattttctggtcaatatcattgatgtcagcactatttcttcctggttgttcgcacaagtggacggtatggtgacgctgattattttgggaatctttgccatgatgtcgttaataaacagcaactacagagtattgcaggtgcttctggctatggttattggtggagcgggcacaatcagctatctggcttttaattatgatgcattgcaactgcctaccctttactggctgttcctccaaagtctgagcctgtacatcgtttatcttagtttccagactctgttcttcgagcgcttcatagcctgcttcaagattaaaggaaatgtgggattcttcattgccaccatcgactttatcggatatacaggaactgtctgtgtactgctgttcaaggaattttgcagcccggatatcaattggatggagttctataaccaattctcgggatgggtaggcattgtgtgcagcattgcattcatcggttcggccatctatctgatgcaacggtataaattggaaagacagctgagaaaagaagaaaaaaataaaaagatcatcgtttcaccgatggcgttaaccaacttaaaggaaacagcagaaaacatctgtaacccataacataaaaataaaagtataaccaaataaacaacaaacaagaagatgaagaaaattgagtgtgttattatggactgggccggaacggctgtagactatggatgcttcgctccggtagccgctttcctgaaagcttttgccgagaaaggactgacagtgacaatggaagaagcacgaggccccatgggtatgaccaaaatagaccatatccgtgaattattcaagttaccaagtgtgacggagcaattcaaacaaaactataaccgcaactggactgaggaagatgtggtatccatatacaaagaattcgaaaaacacttgttcgcctccctggaagaatatacgactcctattcccggtgtaatcgaagttatcgagaaactgaaaagggacggcatcaagataggttccaccaccggatatactactgccatgatggacattgtgctgcccggtgccgccgcccatggctataccacagacaactgtgtgacttccaacaatcttccggcaggacgtccgcaaccctacatgatttaccagaacatgattgatctggccataccttccgttcaaagcgtaataaaatacggggatacgatagccgatatcaaagaaggtgtgaatgccggtgtatggactgtcggtgtgattctgggcagcaatgaaatgggactcacccaagaggaaaccggaaaactgcctgcagaagagttgaacagacgcatggcagcagtcagaaaacgtatgtatatggcaggtgcgcattatgtagtaaacaccattgccgaacttcccgaaattattgaaattattaaccataaaatgaattaaacgattatgagaccatacttacttttaacccccggccctttaaccacttctgaaagcgtaaaaacagccatgatgaccgactggtgcacatgggatgaagactacaatgttcacatcgtagaggaaatacgtaaaggattggtacaactggctacacgaaaaacagatgagtacaccagcatcctgatgcagggaagcggtacttattgcgtagaggcgaccttgggaagtgtgattacgcccaaacacaaattattgattctgagcaacggtgcatacggagaccgcatgggaaacattgcagaatatcatggaatgaactatgatatgctggcctttgatgaaacagaacaagtatctgtggagtatgtggatgattatctggcacacaatgcagaaatcacgcatgtggcagtggtacattgcgaaactacaaccggtatcctgaacccgttaaaggaaataacccacatggtaaagatgcatggtaaaaagctgatagtggatgcaatgagcagctttggcggcgtgccgttggatgtagaggaattaggcatcgactttatgatcagcagtgccaacaaatgtattcagggagttcccggctttggtttcatcattgcacgtaaatccgaattacaatattgtaaaggagtatcaaagagtctttctctggacatctacgaccaatgggatgcgatggagaaaggacatggaaaatggcgcttcacctcgcctacacatgtagtgcgtgcctttaaacaagccatggacgaactggcagccgaaggcggtgtggaagcccggcatgcacgctactgccgtaatcacgatgtactggtagaaggtatgcggtcactgggattcaagaccttactgaaagatgaagtccaatcccctgtcatcacttccttcctttatcctgacaaggagttcaatttcaaggaattctatcatcagttgaaggaaaaaggattcgttatctatccgggaaagatttcccaggcagatactttccgcatcggaaacatcggtgatgtgttccccgaagatttcagcagattgattgaagctatcaagaccgtcgcaaaataaaaaataaatctagctttatggctcgggcgcagtgattgcgcccgaatttgtttctacccttcttccgttacaagatcatttggaaccggagctgcacgacactgaaattcttatcactaatctcctttatatgctttcccggcatcacccagctataagccagcttcatccctatatgcttattcatgtaataattcacgcccaatgaaaaatccttttgagcccctccccacacaccggcttcctcattattcatatcaagtatattaaatcttccacacagctccaatgcccgccccacaggtctgcccggacaagccaatgcttcatcatacccatattgcctgcctgtcaacaaccaggagcattgcacatatccgccatgtcctgtataatttgtgaaattctgttcacgcttcaccatagtccgtatatactccccttgcaaaaagaacctctgatgagcaatcattaattccaccccttgtttcaactggtactttgcatgatctaccttggcgtaaataagattccggttatcaatagtgctcacccccggagatttataaataaacgtattctcgtcttcatctcccggcaatgcgctatccggagtacgatacaccaccgccgcacctatgtgtaacaattttccctcttcgtttacaggacgatacaccaaacgaccgtctatggcatatccttgtgagatgtttttcacattacccaggtcactgtctgtaaagaagcctccggaagcataataatgttttccattgtaggtataagaggttcccatccgtctgccattggtcaaagccagcacgattcccggtgactggtgaaaccgaagatcgtacgtactgcatagcatgtccaaggtgaaaggttcataaaattgtcccacctgaataatatgcttgcccgaagtataagcagcaaaggcatcctttatggaaaccttatttcctacataccccacctccattttcatactccaattctgataggtcgctttcacccccaaccgcaagtcattaaactccgtaccgttaccaaactggttgtcattctttaaataaacaccaccatccataagcatccgtccggtcagtttacacttcaaatccccggcaaccgggtgttgcgcgcgggcaactaaagcagcagaggggaataacaggcacatcaatgctttaacataagtcattcttcccattgtattcttttgttttttactttataacaaatgtaagaggaatgacctatactaaaaatgaataaccattaattgatgatgaagttattacgcgcagaaagcaagtaatattcatttcatatttatgtaacagaattgtaacttacatttcccaataacgttcacaaagattcaagtattccatctcaggcttgttgccgaacaccaatccgaagaaagaggtcttcctccgcttaatcacttttacctgttccattaaatcgcgggataaaggcggcatctcgaaatctgagatcaatacgatatccgattcacggaaatcatttccgttgatgatatgcgcagcttcccgaagagccggctctatatccgttccaccgtcaaaacgtttattcagaaactccgccaacctgggcatatcccgccccaaatcttcaatcaataacgatacagcctcatccgagaaattgatgacataacatttccgatgggttttctccgtcagttgcgctatagccagaatagccgatttggacaagatctctctgtttccctgcatggagccggaagtatccacacagataatatagggtccttgccccgaaaccttatgcttgtcatcctttaccggttccgtttcctttgactggtaatcgaacagttgcaatctcttttcggcatatcgttccataaatacggcacgcagcgcatcatccgccagatagcaatactcgacgggcagcaaactgttcaaatcatttcccaaagtcacccctgtgatatcactatgcggagagtgcctgatcagcctctttttatctacgcccgacaaagaatcgtatttttgttggtcccggtgcttcttgcccagcagacgcgccaattgccggatagccggattgcgcttcatcactgtttcatacggaagcatcctccggtacaaatcaggataattatgaagcagccactccatgcgcgcccccaacaatttgttacccgactcctttccttgcttccggatcaacaaatcaaaaccttcacataaactgtttatatgcatgtactgatagtcatactctttgcgggtaagcaactgatgccatttatccaaaaagaactccttggtccgggccccctctcctctcagcagagaagcattctccagcaaactgatataatagtcaatattcagttccgccagttcatacctctttttgaaagcaccgcgcatctgcttcaagtattgcaagaatgccatatccggcagatgttccgaagaatagaaagcctcccactccggagtgtagcgggaataatattcctgcaaagaaggtgtggtacgccgatagtacatcaacactttctcttccagttcgcgttgacgcaccaccccgttgctcacatcctcctcgtatgctttgaatgtcctatctttcagttcctgagaatagatcatcttcagatctctcaaccttatattcctggttctcttttcggtacgcatctgccatttcgttcaaatcattcttatatcggtctatggtattcttctggtggcgaagcatcctccgcatggaagcccgctgcctttcgctgagaaacaaatgcttctcataatattccgtttccgcatccagcagcccggaccaatccttctccactctgtccaacgcttcggccaccgatttatatttggctccgaaatcctccggctcgggttcgggcagcggtggaggacaatcctcatagcacatcaagtgatattcataattattgatataaatggaacgaagcccttttttcagcgtatatatcttattacgcggaactttggcatggagtatggaatcatatttcttcagaatacagcagttggctttgtacttgtccttatgcagatagaataatttaccggtctgatccagatgttgatagtcggctgcaaaaataaggaggcgctctttcatccggacgccctctacctggtaatagtaagtatcgataacctgtatgcccggatcgttcacttcacgcaaactgtgttcggacgattgtcggtctttcagttcttcaatgtcctgttccagcccttttatattcagcagataaccttcggcacttttctgaatggcagcgttcaccatctcctctgccgcctccatctgatccatctcactccaaaggcaataggacagcaatgtacagtccgaaaggcggatagtgtccgatccgttcaggaaagcggaagctttcagcagcttcaccattttcttccaccggcggtccgacacatacagaggaaacgacacccccccctcattttgtatctggaggttatattgctctatccggtctttcaaggcatgaatcacttcgaaaatagagtaatggattttaatggcagccatctccttttcccaccggatgtattcctcatcggtgatctgcagttgctcgtccaccaccggttccgtttcatccgtagaggaaatcatccggtcaaattctcccatatcctcaatgcctcccaccagacagcgaagcaggaaacggtcccacaaggcctccagtccctgtccctgggcaggcagttcattggaagcggcaatcagccctttcagaggaacacggatggaaaactgtccgttacggtatattttttcattgataatggtgagcaatgcattctgaatggccggtccggctttccatatctcgtccaggaaagcaatggtggcagaaggcagataaccatcgacaatacgctcatacgtatcttcgtctttcagtttggaaatggagacagggccgaatatttcgtccggcgtactgaatcgtgacatcagatattcaaatgcggaagcgttgcggaatgccagtttcagccggcgccctaccatacttttagctactcccggagggcctaaaaggaaaatgctttcccctgccacagccgaaagcagagccagagccacaatatgctccttttcaaaaaccctttcattcagttgttgtaacagagatgctatacgaggtttcaatgtattcataaaaattatcgactaatgatgatcaactagtggtgcattaaccaccaaccactccttgtttcttatgcaaatatctgaaaaaaggatgtatttctcattagaatgtattttttctttttgcagaattgctgttttttcatgatagattggataagttacagtgacaaggtttatatcttacacaagcatgtagtattttctccactaaattgcctacctttgcaacttcaacaacaaacaatgattccaaatgaaaacaaacttgctttcctccgataaagacccgatgggaactgccatcgccgattatttccaccacaacaaagcagataagttacgtgtattttcctcacagttcgaggaagacgaaatacccgtgaatcaattattccgcccttatgacgaaatgccggaactggaacagattgccttacaaatggccgaaggaaatattctggacgtaggagccggaagcggctgccatgcactggccttgcaagagatgggaaaagaggtatgcgccatcgacatttccccccgttctgtagaagtaatggaaaaaagaggggtaaggaatgtccgtcagatgaatcttttcgatccgcattttctagaaacattcgatacaatcctcatgctgatgaacggatcgggcattatcgggaagttggaaaatatggcagctttctttcaaaagatgaaacaactgcttcgccccgggggatgtatcttgatggattccagtgatctccgttatctttttgaagatgaggacgggagtttcctgattgatctggcaggagattattatggcgaaatagacttccggatacaatacaaaaatataaaaggagattctttcgactggctttatgtcgattttcagacactcagcctgtatgctgccgggaatggattcgaggcggagcttatcaaagagggggagcactatgattatttaacccgccttcgatggaagggatgacacttatagaaagattccgataaacttgtcgcatgatattcaaattcttggggcaagatgctgcgtatcttgccccaagaaaaaaaatcaggccattgaaccgcctactatatccaacagctcattggtaattgcctgttggcggctcttattgtacatcaccgtcagatcctgcaacaaatcattcgcattgtctgtagcaatctgcatagccatagtgcgggcggcatgttcggaagcattcgaatccagtaataccgtgaacatcttcatacggagtaccttcgggagcaattcccccatcaccacatctacagacggttccacaatataatcgggtatcctgcctttgtcctcctctttcttctcttgtgtcaagtctatcggaagataggtttcacgcgtcaggacctgtactgctgtagaacggaaatggttgtacagcaactccaccttgtctatgtcacgatgcagaaagcgcctcatcaagtcctctgccaaggcggcagcttcctgataggaaggtttatccgccatatgctggaaatcgccttcggccttgaatcccaatttcttcacaccttccgctacctttctgcctaccgggtataaaagcacgttctccatacccagggacttgtattcatccaaaataaccgtcagatgcctgatgatatttgcattgaacccgccacacagactggtattggaggcaaacacgacgatagccacacgcttcacttcacgtttcacaatgaaaggagactccacctcactatccgcactcagaaaattggtcaggatgtgattcagccttcgttcgtaaggaagcatgttttctatggcagcctgcgccttatgcaacttggcagaggctaccatcttcatagccgaagtaattttccgcgtattatttactgaggctattcttccttttacttctttcagtgatgccatgactattcgttcactttaaatggttgagccgtatcagctgctactttctctataattgcagttacatcatcatttatcacaccgcttgacaatacatcaagcacatctttctgatggtcggcacgcatcatttccaggaatgatttctggaaatcctgcaccttatgcaagggtacatcacgcagcaaactatgtgtaccacaataaaggatggctatttgttctccgacaggcatcggactgtactgcggctgtatcagcaactggttgttcttacgtccccggtcgatagccattgccgttacaggatccatatcactgctgaacttggagaaagcctccagttcgcgatattgtgcctgatcgatcttcaatgtacctgccaccttcttcatgctcttgatctgggcactacctcccacacgggatacggaaatacccacattgatagccggacggaaaccctggttgaacaaatcggtttcaaggaatatctgaccgtctgtaatggaaatgacattggttggaatatacgcggaaacatcacctgcctgtgtttcgataataggcaatgcagtcagtgaaccacctgcctttaccttgcctttcaaactgggtggaaggtcattcatctgttcggccacttcctgctggttgataatcttcgccgcacgctccaacaatcgtgaatgcagatagaagatatcaccgggatatgcctcacgaccggagggacgacgcagaatcaaggatacttcacgataggctacggcttgctttgacaagtcatcatacactaccaaggcatcccggccggtgtcacggaaatactctccgatagccgctccggcaaacggagcaaaatactgcaatgcagccggatcggcagcagtggcagctaccactatggtataatccatcgcaccgcgttcacgcagcgtattcaccagactggctacagtggaacccttctgaccaatagctacataaatgcaatatacaggttttcccgcttcatagttggatttctgattcaaaatcgtatctatagcgatagaggtttttccggtctgacggtccccgataatcaactcacgttgtccacgcccgataggaatcatggcatccacagacttcagccctgtctgcaaaggctggttcacaggctgacggaagatcactccgggagctttacgctccaaaggcatttcgcacagttccccgccaatctgtccgcggccatccaatggtacgcctaacggatcgatgacacgccctaacataccttcgcccacattaatagaagcaatgcgtttggtacgtttcaccaccattccttccttaatctgatcagtaggacctagcaataccgcacctacattgtcctcctccaggttcatcacgatagccatgataccgttttcaaactccagcaactcattggcttccgcgttgcgcagaccgtaaatacgtgctacgccatcgctcacttgcagcacattccccacctcgtcaaattgcaggtgggtgtcgatgcctttcagctgctgaagtaaaacttcggatacttcgctgggttttatattttcagacataatctttttacattaaaaattgaaaattaaaaattaaagtccgaccaggtattaaccttaaattaaaaaccaaaagatacaaactgatatacttttactttctaacttataatttttaattttatactattcttctatttttagctataaactgttgctttacccgttttatctggttagctacgctcgcatccaatctgtaagttccgatttcaaagataaaaccaccttccagtttcggatctattttggttttgaactctacagttccatgagttttctctacgaccaatgcccgtatgcggctgactacctcttccgctaccggacaaacagtcgtgattttaccgacgctgatattcttctgtttccgataaaggtcaatgtatgacataatcataaactgcaagaatttctctcttctttcctccagtaccaattccacaaagcgtttcaattcttcgctcaccttacctcctccggcggcttcgcaaatcagtttcaactttgtttcagcaggcaatacaggattatccaatgcctgtcgaagttcggggattctcgagaaactatctgccaatattccggcttcctcataaacagtatcctctgtccccttttcgtcggcataggccagcaaagccttagcataacgcattgaaatgactcctatatacataacaatcagtctttagaaacagttaattcatccagcaaacggtcaatcatttccatttgttctttctcatcatcgaggttcttgcgcaaaaccttctcagcaatgtcgacagacagtacagctacttggcgtcggatgtcgctgatagcgctgtctttttctgcctgaatctgctttttcgcttcatccagcagtttctgtccttcaacctgagcctgtgttttggcttccttcagaatacgttcgcgggttgcgaccgcttcattcaggatgcgcgcctgctcctcgtgagccttagccaatatcatttcactgtctgctttaatattagccaattgctcattggcttcacgtgcagcaagcagtgacttgtctatatattgttttcgctcatccaccattctggtgatcaccggaaaaccgtattttgccagaatgacaaaaacgataccgaaaacgatgaccatccagaataacagaccgctatcaggtgttaataatgacatgctaaattaattataagaacaaagttaataaacaaacaataatggcgatcagggccacaccttctaccagcgcggcgataataatcatattcatacggatatctcctgccgcctccggctgacgggcaattgcctccatggcagaaccaccgattttaccgataccgatacctgcaccgattactgcaatagctgctccaagtgcagcacctaatttccctaaacctgccgcagcagcggactgtaataaaactgctagtaacataatagtttgttttttgaattaattatttaatttatttcatttctttttcttcacgcatctcttctgtacgggacaacccgataaagaccgcggacaacatggtaaatacgtatgcttgaataaatgcgaccaataattccagcgcagtcataaagattccgaatgccacagcaacaaatcccatggaaccattgatcagaggtcccatattcgccgtaataaaaatgatggatatcaaactgagaatagcagcatgaccggccatcatattggcaaacaaacggatcatcaatgcaaatggcttcgtaaagattccgaaaatctcaataatcggcatcatcgggaacggagccttcaaccaccaaggaacatcaggccatagaatctctttccaatattccttgttcccccatagattcacagccaggaacgtacagatagccagcacaaaggtaacggcaatattacctgtaatattcgcaccgccggggaagaaaggaatcaatcccatcagattattgatcaggataaagaagaaagccgtcagcagataaggtgcataacgcttataatccttaccgatacaaccctttatcacatcatcattgattgccaggatacaagcttccatcatgcccaccattcctttaggagcttccttttctactggatgttttttgtaccaacgggcacaactcaacactagaatcaccagaatggcactattgacaaacaacccggtaacattctttgtaatagagatatccaaaggttttacttcgttaccgctagcatccttttccactatcttacctttatattcaccgtctttagcaatgtacagtccttcatactctccgtttccttcctcaaacctagaagaaagaaaagcgtgccatcctgtactgctttttacgattaccggcagtggtatagctataggtgtatctcctatgtcagtgatatgccattcatacgaatcacctatatgtccgaaaacgatttcatttacgtctacctgctgctctttatagtcagtttccgactcttcccgggcattggctccttgcagaaaagcgatcagcaacattaaaaccgttcctatatatcgtaaacttctcatattacttatacttgtacctattacttttatgttttatctcaaaatgaaaaaagaagcgggtttcaaaaatcagaaagataatatagaataccatgtaagttcctataaatgacagtacttgatgtgccaccgccactgcatagacggacataatcaagatgctcaacatcatcttcgtcactttcgccaccaagtaaaccgccaccattttttgcggacttacccgataacagcatccgaacataaatatgtaaaagaggccgaaaagataaaaaaatatcggtatggagggataccaggcaaaataatacctaggcaacaaggtgtgaaataccagggctcctccccaactcaatacaaccattaatatggtcaacgatatgataaattttctctttacggctaacaaaaacataattatgtattagatttccacacaggccgaaactatattgtccctcacctcaacgaacccactcgatattccaattgatttctccaattcgtcctccgtgtattttatctcgccttttatcagtgatgatatcagcggagcatgatcatacaggacagaaaaagagcctaattcccccggtagtgtcactatttccactttgccgtcaaacaaagtactttccggagaaaccactatcaaatgaagatcttcatgatgttccatacttacttttatttcttatggctggcagcatccagcaacttctttcccttttctattgcttcctctatcgttcctacattcaggaatgcctgttccggcaagtaatccacctcaccgtccaaaatcatcttgaatccttttatcgtatcttcgatagaaaccatgacacccggcacacctgtaaactgttcggctacggcaaacggttgtgaaaggaaccgctgcacccgacgcgcacggtttacagtctgacgatcttcatcactcaattcatccatacccaaaatagaaatgatatcttgcaactccttgttgcgctgcaaaatctgcttcacacgctgagccacatcatagtgctcctgccctacaatcagcggatcaagaatacgtgaggttgattccaacggatctacagccggataaatacccagttcggtaattttacggctcaatacggtcgttgcatccaagtgagtaaatgtagtagcgggcgcagggtctgtcaagtcatcagcaggtacatacacagcctgtaccgaggtgatagaaccattcttggtagaagtgatacgttcctgcatctgtcccatttccgttgccagtgtcggttggtaccccacggctgacggcatacggcccaacaaagccgaaacctcggaacctgcctgagtgaaacggaatatattgtcgataaagaacaaaatgtcacgtggtccgttgctgtcaccgtttttgcggtcacggaaagattcggcaacggtcagccccgaaagggcaatggaagaacgcgcgccgggaggctcgttcatctgtccgtacaccaatgtggcctgtgacttttcaacttcattataatctactttggaaagatcccaatgaccttcttccatgcttttcttaaattcttctccgtagcggattacaccagattcaatcatttcacgcaacaggtcgttgccttcacgtgtacgttcaccgactccggcaaaaacagaaaagccgttatgtttcttggcaatgttgttaatcagctccataataagcacggtcttgcctacaccggcccccccaaacaatccgattttaccaccctttgaataaggttccagcaaatcaataaccttgatacctgtgaagagcacttcctgcacagtagacaattcatcaaacttagggggctcacggtgaatgggaaacgccccttccttactcaacgggcgcataccgtccacagcctcacctactacgttcatcaaccggcctttaatctgattaccaaccggcatagtaataggatgtcctgtcggaattacttccataccacgttgcaaaccgtccgtactatccatagctacagtacgcactgtgtcttcaccaatgtgttgttgaacttccacgactagaattctgccgtcattgcgtttgatagtcaatgcatcatgaatgcttggaagaagcagatcggtgtcgatgcctttgccctcaaaatacacatcgactaccggtccgataacttgtgaaatatgtccaataatctgtgacataagcttctatttacttttatttgataatttaccttttctatattaacaaatatcgcaggctttttgtttacctaccttttgctttatatgcgcagcaaaggtaaagattatctcagtagattgaacttaagctaacattttttacacatcaatacgacattattccaccaaaagaagaaaaaaagaacatttccgctactttttgtgcattccttcacgagataactgtttacttaaattagcaattcccaaagcaaccactgctgttaccgtagctgcatgctcttggtattctggtatattcttcgtataaagatcacgttccgtatgccatatttccccataagagaaattatatccttttatgtcttgtgtattgaaaccaaaagtaggcactccttccactgcaaaaacactggcatccgtaccgccgctttgagtaggacgtttaaagggtttcgctacctttacctcaaacggataatccgcacagatctctttcacaggcttgcacacttccacaaaatcatcatacatagcctgaggaacggagattcccaccggtggagtcggccctccgtcccggttgaacagattggcaatctttcccaattcttttgcatgagtcttgacatatgcttttgcacccaataatccaaattcctctccagcaaaagccacaaacagtatagtacgtttaggttttgcaccggaaagtgcaatcatacgggcagcctccatcataggaccaatgcctgtgccgcagtctataccaccggttgccacatcataagaatcaagatgtccgcttataataacatattcatccggatatttagtgcccttaatggatgctacgacattatgatatttcacaggacctagtttgaaatgattacgaatatcaaattccagccaaaagttccgtcgttctttcaccatctgtttaataatcttgtattgatgttcatccaacttgatatcacagacttcgggcaaattatcaaacgtagtatggggatcattcaataaagcacgatcatacaaagcacgtaaaggtacaggtgccgactgaataaagccaagtgctcctgcctcacacatctctttataaaatagtcccggcatttcacgcaaaggcttcatggcatgtttggttcctttgctccaattctcttccatcaaggcagcattctgcttttctatttctatattttcagctttgatagcagctctcaacgaatctcctttagcagaacggtcaacaggccaacctacattttcacctgagatcaacacccaagcgcctttcaactgatgtttcatgcggtccagctcttcttgagtacggggctctatcaaaacatgcccgcgttgcagacctttagtacctgaagtgtaggatggagtgacaaaatgcagatccattgcctgatctcccccgattaaacgtccgaaccatggaccacggttaaaacctaccggcagttctccagcttcttccaagcgtacatcaataccccatcgtttatattcacgcatcatccactcggctgcattctcatacgcatccgagcctataactcttcccccaaaacgattggtgagaatatccaactgatgcatcacccggttatctgtttggcccgtttcaatgattttctttacggcggcaggttgggcaaaagcagttcctgcatacaaagaagcagctataacagctgccatgcacattttgttcatcatggtatttctgtttgttagttgttaacgattacaaatatatagcattttttggaacttcagctattaatttccaacaatttatcaggtaaaaccaaatatttttaaagtcgtacaacacaaacagtattaaaatgaaagcttattcagctttcatttctttctcaaggcttttggcatacagattgtcaatgataccatcagacagtccaatgaccggaacataaatatattctgcatgcactacttctgcaattttcagaaaaatttccgcagcaggcacaattacatcggcacggtcttgcttcagactgaatgcctctaccctttcctccggagtcagcggtttcaacacatcataaaccgtttgcaacgaactgaccggcaaacgttgcaatttcttatccttcttatctgccaggcgaaacaatttattaatattcccacccgatccgatgatattgatcgcggcaacaccttccgtcactttcataagctcttcttccatttgctgccaagttccttctttaacagcattactcagcatacgcaccgtaccgatgttgtaagacaccgaccataccaactcaccgttagtcaacagattgatctctgtactgccaccacccacatccacatacatataattaccctgacggtcttccatacactctatatgattattataaatcattcgagcctcttcctgaccatcaattatctcaatgcggatacctgtatccttttcgattttcttgattatcatcctcccgttacgcgcgtcccgcatagccgaagtagcacatgccctgtaatcatccacatcataaattttcatcaactgacggaaagccttcatcaaacgtctcagcttatccactttcttctcggacaattcacctatggagaaaacatcgaaccctagtcgtaggggtacgcgaagcatcatcacttttttaaattttttctcctgcacagcctctctgtcaatgctttttatcaaaaggcgcacagcgttagaaccaatatcaatagctgcataattcacttttcccatcttaatcctttattctgttttcatttaaataatatttgtataattcctcctgcgaacggaaagctgttttatcttccgatatccaaggacgattctctcctgttccgtccaccacccgtccttgcagagtatctttcaaaccatattccactacccgcttcaagtctgcctttatttccggatcgtaaacgggggcaatcacttccaccctgttatccaagttgcgcggcatccagtcagccgaaccgatgaacattttctcatcaccaccattggcaaaaataaaaatacgcgaatgttccagataacggtctataatgccattgatacgaattgcatcactcactcccggcactcccgtaatcagtgaacaattaccacgaaccagcaagtctatccgaacaccatgcgaagatgcttcatacagtttcttcaccattaccggatcagtaatatgattaatctttatcaaaatgtaagcaggttttccggcctgcttgttcttgatttcttcattaataagacggataaatttttgcttcatctcattaggagataccaacagttctttgaagcgaacaggagaataagggcgttctataaaatcaaagaccaaactcacgtcacgcgtcacattcttagcagccgtcatcagcatataatcagtgtacatacgggcgttaccttcatgaaagtttcctgtactgatacaagctatatccgcacctgttttcatggatatataggtaatcttagagtgtaccttcagtccctccaccccaaatatcacacggataccggcatcctgcattttctttgaccaatctatattggaagcctcgtcaaaacgtgccagcaattcaataactactgttactttctttccattgcgtgccgcattaatcaatgcttttaccactttcgaatctttagccaaacgatagagggttgtcttgatactttttacttctttattaatcgccgcttcctgcaatatacggatataagaatcgaaactatgataaggcacatgaataaaacgatctttcctacggatcagctccaacatgccaacgttacccgaaagctcatttttcaaaacaggagtccattcagggtatttcaaatctttccggccacagtctggaaaacgcatcaggtccttatggttatgatattttccaccgcccaatactgtatccaacttatccagattcaacttgttcatgacacgttttaaaagatctttaggcatattggcatcataaataacccgtaaaggctcacctcgtttgcgactctttactcctttagaaattttctgcatcattccgttacgcagatcattgtctatttccatctccgcatctttggtaaacttgaaagcatacgcttcaaaatgtttatagttcataccatgaaatatcaatggtaaacaatagcgtaccacatcatccaaatacatcaggtaatttttgccattcttatccggcagacggataaaacgccctgcctgtgctacaggcagctctataattgcatattctccaactttatgtccttctttcctcatctttacagccaaaaagatattttcatccgcttcgttacccagttgttttactgatttcagccaaacaggactaataaacccattcagccgttgttgataaaaagaagcgacaaataactgttgttcctcatccagttgtacatgattgactaaacaaatattttctttctccaattctgctgttacctgcttgatcgcaccttcatattctttggagtacctgttgttcagtttatttatctgtttaatcagtattaatgcttcttcccgttcggaatgcgccgctttatcttcgcactcggccacccggctttgagtagctacacgtactctgaaaaattcgtccaaattattagaataaattcctaaaaaactcaaccgttccagtataggaacacgttctttcatggcttcctgcaaaatgcgacgattaaaatacatccaactgatatctctcggcagataatatttatcttcctttttcttcttctccatacggttttaatatttttagcaaaaatacgtcatacacattacaacaacatgtcaatataattacaaatcaataacaataaaaaagtcacagccgacgcatacagccatgacttaaagaaagttcttataagaaattcaaataaactcttcaaccaaatacatctcattaaataaaacttgttgataattggaagaatcactctccaacaaactcaacaatgtatattcagctccacgtacccaatacacaaaatcacgattgggatggtaatccttcgcaaaatccagcaactgttgcaaattaaaatctgaggaaatgatacccgcaccgcttttttcggcatcatatgcattacaatcctgttctatatgggcaggaaccatcagaataggcttgcctaaatacatggcctcacacaccgattcaaatccggcagtactggcataagccttgcatcccgccatctgcctcaaaaattccacatcatccagttgataaaagctcaatgtattatccactctcttcaccggttcctcctcccactggtcccaaaagaaacgaagcggtaccccgggatgttgcctgtgccatttcattacattttcactgaaacccgcattaaccatatagccatgtatatagtcaccggaataaggttcatgtaaagtcacttccttacgcaacaagggaggaatcacacggatatgattctgaggatcatcgttcatgtggcgaaaagaaagagccaaacgttccttcgcccccaagctggtcagtacggtaaaaaacttcaaaagagccaagcttactttatcagccttcggaaattcaaaacttttatgcaagaacagatattgatgtcctatgcagatttgcggaacagagggacggaacaggaaataagtcagtccggtcagcaattcatagaaattgataaccctgtccgcaccactggcctcgatacgctgacgaatgtagttaatgctattgatatacacaggaagtttcactagattatacgctacgctccgcatcaaactcacccgtttgttggctggtgtaggcagaaaattaggactgacaaaacgttttacgggagcatggatgttacgattgaaaaatcccggcaagcggcgcgaactacttttacctaccagtacttccactacttcgtgaccgttccggcgcaatatttcctccaacgtaatggcttgagtaagatgtcctctcccctcaccctgtactataaataaaaatttcatgaggctgtatgtattagggtaaactctttattttcttcattctcatcagctagtacatgatggtattccatgatattccaattcccgtccgcatcctcagtcagtgccgaaaggctttctacccaatcgcccgaattcagataatgaataccatcataataggtattagccggatgatggatatgaccacaaatcactccgtcacatttacgtacacgtgcaaactccaccaacactttctcaaagtccgatatataggaaacagccgactttactttttgtttgacggcctgtgacagagaataatacggtttcccccgtttggtacgatattggttataaaagcggttcacccataagaggaatgtataacctgcatcacccaaccgggctaaccatttcatctgtgtagtaacccggtcgaatatatcgccatgtgtcacataataacgctttccatgtgtttcaaggatgtattctttgacgatttttacgttatagaatgtcatagggaccaagccgtccaggaaatcatcgtggttgccacgcacataaattacttcagtaccgaagttctccatcattttcatgataaccttaaagaaatcagtatgttttgcttgccacctcttagtacccgccttacgcaaatgccaaccatctataatgtctccgttcaatatcagacggtcacaactgacagatttcagaaagttactgacctcaattgttttggaatgagaggttcccagatggatatccgacaaaaccactgtaggataatacgttcttagatgcatatctttattattaaaactatgcaaatatccatgttatctgttacaagatcgtgtcggcaaaattactatgctattaaaatcaatgaaaagacaggccgtttcttcatggaacaagaaacggcctgcaaagcttcagtttatcatacataaaccatacttcaatctataactaacaattaattgtcaatatcaatcacattgaactgcatatcaaactttatctcccaaccattagaaagtttcacttcatagtcatgcttgtccctctcgatcttgagcatcttggcatcggggtaattcgtagcaacgtacttttttattgcttcaggaaccacagcgacaggtacagcgctgtatttgcaattcacttctgtccaaacacctttcttatcgaattccagtttgtctccattggtaaaaatcacatcatagcttttatcaaaccagtccgtttccattttagccatcgccaccttattattggggaaatgagttttgataaaagtttgtgcagtctgaggcaattggtttacttgaataggtttgtcatcatccgcccataccactgtttgcaacgtaaataagcacactaacaataataatacctttttcataatcgtcattttttttatttggttctacattctgttttctgatgcaaatatgcagggagattctgaaaagaatttgaaattctgaaaaaaacacgattttttttcattgattatgagtggatgcgtaaagtgtaaaacaatgctccccgctcttatattcatagcaaagcctgagagcctgcattttacatatcgtatctgctattgccaaacctagaccggtagagccttcttttttctttccttgataaaaacgctcaaaaatacgccgggcatccagcggttgtgccgcccctgtattgcagaacatcacactgtggggagtaatgacaatccggatgtgtccaccgtccatattgtgtacaaaagcattcttcaacaaattggtaagcaacaccactgccaatgtttcatttatcgtaagatagaaaacaccttcttcctctatgcttgttatgatctcacgatattgatacacttctttatagtcctccagatattgcctcaataatttattcacttctacttggacagtatccgtaaattgaccgttctctatcttcgaaagcaataacaaagacttgttcaacttcgttatatgttccaaagtctggtgggttttcatcaactcctccaattggctttctgaaagattttcatcctccatcagcatctccaaccgattacgacaaatagccagtggtgtctgcatctcatgagatgcattaccaataaattgtttttgctgttcgaacatctgctcactgcgctctgcataacgaacagccgcttcatttaattttctgaattctgaaacccgggtattattttgtaaaggctcgtttaccttaccgatacgatatttatccaaccaatgaagcaatacataaagaggacgcatattccgataaaacacccacacattaataacaattatagtcaataataaagcgatataaagaaaaataatccaacctgccatagcatctttcaaatcttctttttctatagaaggagtcgctaccgtcaattcaaaaaacttttcgccatcatccttaaaaatggtcgtaaggattcgtgcaggttcagtttcatctttttcaggaatataaaccatagaatctttataaatgatatcatcacaagatcctgcatattccttcgtcacttcacgcaggaaatactgattgttggaagctgtatttttagaaggaagctcctctcccgccaatgcacgtatgatgataatttccgaataatcctccaatgagtcatccacttcatcattcacctcatccattacagcaaaatagaaaaggatggcccagccggtcaataaaaccgacaacaccaacgatatacggataatgatataataaatcagtttcatttattccactaccattttatatccaaaaccataaacagccttcagttcaggagtagctccagcctctttcaatctctttcgtaaattcttgatttgggcatagataaaatcaaaattatcgacttgatctatatggtcgccccatacggattcggcaagtgtgcttttattaaccaatctgccgggacggttcataaaataaaccagaatatcatattccttacggttcagttcaagcttctttccagctacggtcaccccatatttatcgggaaaaatttctatatttccatatttgatactattttccccaccttgctgatgacggcgtatcacgcttttgatacgtgcattcagttccaccaaatgaaaaggtttaggcagataatcatcggctccgagctccaatcctagcactttgtcttctatagagtctttggctgaaagaatgatcacattttcccgtttatgcatttctttcaacttttccaacaaatccaggccactgccatccggcaacataatatccagcaaaatgcagtcataatcataatcctctatcttttgtaatgcggtacggtaatcggcagcaatttccaccacataacgctccttttccaatgagcgctgagtcacttcacgcaaattagcatcgtcttctactaatagtattttcataagtccaacttttggttcttaaagacaaagaaacaagataattctgaaaaaacactgaaataagaaaaaaaacgaagaagccatacaattttttccatcaaccaactaataaacaacaaatatcaaactaaaaaccgttatcaactatacaatcagccccctgcatctaccacaacaagatgcaaggggccacacacaactctctctaatcaaaccctaattatttgatttccatttgagaaaaatccatttgactcaagcctactggtgacggtgtttcttttaaatcaaaagagacttccttttcaccatttttagccgagtttatttttacctttataccctttgtttccgatgttattttcaaagatttcaaattaaaagataccgcaccgtttctccaataaccagtagtatcagcatacgtattgtaacgatactctaaatgaatatagccatcctggacgggcgtaattgtagtgttctttaccaaactaaccaaatgtttcattttagaaggcatgttctgattaaagataatatttaaataaccaccactaatccacatattaccttcaaatatatctacaggatcatttccaaactcttcttcattctctgctgtcagctcctctataggtttagttagaatttcctttatactcaacactttgactgagcaatcatatccttccggataattatcatacaaaggattgaaataaagaataacccgttgtccatctatcggggaataccaaaaataatcagtcgttgcaggccagatttgtccccatctgtcacctgtaaagtcataaacatgggcacctttcacatttacagtagcccaatccactgccacatcaccaagagagtaaccatcatcatcatcacatgattggaaagtgactcccataactgccaggaatgctaataataaaaggttcaactttttcataactataatgtattaatctattttctacttttaaaagtaagaaagagatcgaatactgcatatcatccattaatattaacttattttcagtaaaagtcttgtagaaaaaccagattcatcaaggaaataatagaaacttcccgattcgtcacgaaccgggaagcttaaaactgagttatatacagattttcccattcagggggaacatggcttttcagccttgttttgttaaggcaaatggttatatattttaaagtttagtttttagtgtattacattaatttacataacaaaaaatatgccatggggcacatcggcatccaatactctaaaaatcaacaaaataaccattatttcatttttcacattatgtagaaataccacaatttcattccacaattttgtagaattaatccccgtttttaaaatatatctttatctttgtagaattgattactcactaaacaatataattactatgaaaaaaagacattacggaatgctttcattggcacttacttcatgcttggctgttcatgcggaaaacaaaaatcaaaatacagacaagcccaatgttatcttcatctatgctgatgatttaggatatggtgacttggagtgttatggagcaaaaaacgtacaaactccaaatgtcaaccgtctggcatccgaagggatacgatttatcaacgcacacgctaccgccgctaccagtaccccatccagatattccatgctgaccggagaatatgcatggcgtaaacccggaacagatgtagctgccggcaatgcaggaatgattatacgtcccgagcaatatactatggcagatatgtttaaaagctccggctatgccacaggagcatttggcaaatggcatttaggattaggtgataaaactgcacaacaagactggaatgctcctctctctgcttctctaggtgatttggggtttgactattcctatatcatggcagccacagccgaccgggttccctgtgtatttatcgagaatggccaagtagccaattatgatccttcagctccgatagaagtaagctatataaaaaatttccccggtgaacctaccggaaaagacaaccctgaacttttatataatctgaaaccgagtcacggtcatgatatgtctatcgtgaacggtatcagccgaatcggttatatgaaaggaggtggcaaagcattatggaaagatgaaaatatagccgattccattaccgcacatgcagttgattttatcaaacaacataaagacgagcctttctttatgtatttcgccactaatgatgtgcacgttccccgttttccacacaatcgtttccgtggtaaaaacaagatgggactgcgcggtgatgctatcgcacaatttgactggagtgtaggtcagttactcgaagccctcgataaaatgggattaacccagaacacattaattattctttccagcgacaatggaccggtagtagacgacggatatgatgacaaggcagaagagttactgaacgggcacgaacctgccggcaacctgagaggtggaaaatacagtgcatttgaaggggggactcgtgttcctgtaattgtacactggcctaaagccatcaacaagccggaagtcagcgatgtgcttatttcgcaaatagactggctggcatcactagcttctctggtagatgcccgtattccgaaaggaagtgctcccgacagctacaaccgattagcaaatctattaggacaagacaaaacagaccgcccatgggttattgaacaggcatccaatcacaccctatccgtgcgtactaaagattggaaatttattgaaggcagcgatggtcctaaaatgattccatggggtccgaaaattgaaactggttatttaggtattccccagttatatgatatgaaacaagcaggtgaaaaggtgaatttagcgactgaacatcccgaaaaagtattcgaattacaacaaatattgagaaaagtacgagataaaagtattcagatgaagtaacatgctgaatacacaccaacccaatatttccaaaagggtgaatcaagacaaaagaatcacataaagggtcttgaattcaccctcttttttaatcaagaaaatttcaatatggtcctcatttcaaaagaaccaatccttatagacaaagatccttttctttaaagtcaaagtatttataacaaaacaccttgaacactttcacaagaatgggttacacacaaaaactctcaaagatacaagatacgtttttccactttacccataaaaaagaaatctcaatttatttctttattttcccttcattcaccagttcagacagcgccctggccaatgacggacgagtaactcccagcttctgcgccacctcctgctgattatgaataacagaatgtgtttctagatatttcaacaaacgagtctttaaattcaacaaagcaaactcattcaatttcctgcttaaaaagacactcctgtccgaaatatccttcaaaaaattctgcatcatcaatggatgcaaacgcataaattctaaaaatctttctttacctattacaaaaacctcacaaggtcctattgcctctacattaacgggaaaacgattttcagtggcaaaaataaaagccgaagccagcaagttaggagctccaatttcttctaccgtcagttctttcccttcatcatttatcattcccgcccgtacacttcccgatgcaagaatgtacagccctttacataagtcaccttgccgggcaatgatatcacccggttcaaagtgcttcaaactattcggaagtccgaataggaaagcaaccaattcttcctctttcattccccggaaaggagccatctgcaataatcctgtcagttccatcctactttcttttaactgttatttgtatccgctgtaacatatggtacaacttaaaagacgaaaaccgtctacttttgcacaaaagtaatagaaatcattaaaatgaaaaaagatatggagaataacatgttttgtttccaatgtcaggaaacggccaaaggtttcggttgcaccttaaaaggtgtttgtggaaaaaatgcaactacagcacgtaccatggatttattgctctttgtagtacgaggaatttctgttgtggcggatcaattgcgccagcattccctccccgttgaaaaagaagtggacaatttcattgtagacgccttattctgtaccattaccaatgccaatttcgatgacgaaagcattacgaaacgcattgacaaaggattagcaatacgtgatgaccttaagcatcaagcctctgccaaggacattcctctgccggaagccgatgaattaaattggaaaggcagccacgatgaatatgatgcaaaagccgcaacagtcggcgtattacgtgaacaaaacgaggatctacgctctttaaaagaactgattatgtatggtctgaaaggaatggctgcttatctggaacatgccatgaggttaggacataatgacgaaagtattcatcgtttcatgcagaacaccatcgcacaaattacaacaaaatctttatcggctgatgaactgactgtattagcactgaaaacaggtgaaataggcgttcgaacaatggctctgctcgacaaggcaaatacttccaggtatggcaatccggaaattacccatgtaaatataggaacaggtactcgccccggtattctgataagcggacatgacctgcatgatctggaagaattgttggaacaaaccaaagacagtggcgtggacgtatatactcacggtgaaatgcttcctgcacattactatccggcatttaaaaaatatacacattttgcaggaaactatggaaatgcctggtggaaacaacgggaggagtttacctcgttcaatggtcctatcctgttcacaaccaactgcatcgttccccctctgcccaatgccacttataaagaacgcatgtttaccactaattctaccggatatcccggctgcaagcatattacagcagacgagaaaggacataaggactatactgaaattatagaaacagccaaacaatgtgccgcaccgacagaaatagaacatggagaaatcgttggtggttttgcccataatcaggtattacaactagcagacaaggtcgtagaagcggtaaagagcggagctatccgtaagttcatcgtcatggcaggttgtgacggacgtatgcgcagtcgtgattactacaccacttttgccgagatgctccccaaagacacagtcattttgactgcgggatgtgctaaatatcgttataacaaactagggttaggtgacattaatggcattccgcgtgttttagatgcaggacaatgtaacgatagctattcattggcagtcatcgccctcaaactgaaggaagtattcgggctacatgacatcaatgaactgcccattatttacaatatcgcctggtatgaacagaaagcggtaatcgtattgctggcattactcagtttgggaataaaagagattcatctcggtcccaccttacccgcattcctctcgcccaacgtgacgaaagtactggtcgaaaactttggagtaagcggtatcggtacagtagaaagtgatatgagaaaatggggattaacgaacgaataaacggaataattatgaaacagaaaaattaccattcatgtacagtcggacaaattgtagccggcaactttgatacaaccaaagtattctcccgttaccatattgatttttgctgccatggcaatactccgtttgcagaagcctgccggaaccgtggtattgatcccgaagcagtagcacatgaattaaatgaattacaagagaatacggttagtaatgctcctgactttgccggatggcccatcgatttattaatagactatgtattgaaaatacaccatcggggaatccgtgccaaaggtccgcaaatagaagcattattaaccaaagtaaccgaagcgcattcaaagaatcatccagagttactgcaagtccaggcactgttccgcgactcgcttcttgatttggaaaatcatttatcaaaagaagagaatgtattatttccttatgtttatgaaatgttccaagccaaagaggaaggcttgaaagtagctaaattccattgcggcaccattctgtatcccatcgaagtgatggaagatgaacataatcacgaaggagaacgttttgaaaaaatctcttcattaaccaacggattcaccgcccctgaagatgcttgtgccagcttccgcttggttttacaacaattgaaacaatttgaagaggcattacatgaacatatccacctggaaaacaatatcatttttcccagagcattagaattggaaaagaaggaagccatctgataactacaccatgacacttccattcacaaaagtgcccaaagtgaaataatgcacaaatcactttgggcatcttcatgtattataacccacgctccactatataatcttgtccctgttctgtcatcaagtcatattcatacaccttatacaaagcagggtattgcgggtttatctccttggaaaccaaaggctctttgatatctgcctgcatataatattcattcggattcttaccttttgcctcttttaatccaaccccacgcaaaggaacatacgaacgtaaacgcaaattacctcccaaacgggaatgaatcttcgctttatccagctgcacgccattccagttcatatccaccacaaatcctccacgggcaaccagtccttgcacacttcctgtggcccaggcatccggaagagccggaagcaaatgtacagctccgtcatggctctgcaacaacatttcagccacaccggcagtatagccaaagttgccgtcaatctggaaaggcggatgagcatcaaacagattaggataagtccgtccttgcggataagcctctttcacttcatctccaggcagcagcttcaacatattattaataatccggaacgcatgattaccgtccagcaaacgggcccacagattaactttccagccaatggaccaaccggtagcttcgtcgccacgctgtaacaacgtatttttagctgcctggaaaagcaaaggatgggtgtaaggagatatctgattactagggaacaatccatatacatgagaaatatggcgatgcttgtcattcggattatccaagtcttccagccattcctgtaactgattgtatttcccgatctgcatcggggccagacgatttaacatagactgcaaagaatcttgataagaagcggacatttttagaattcttgacgcatgcaatgcattgctaagcacatcgaaaattatctgattatccatcgtacaacctgccacaatcgttgaagcttttttagtatcctctcccgaaggtccatgttccggagacatggacggagcagtcaccatccaaccgtattcaggatgttcagtcaaataatcaagataaaaatcagcagctcctttcaatgccggataggcttcggaaagaaacagcttgtccccactatataaataatgctgccacaagtgggtagtcaaccaagcacctcccatgggccatgtaccataaaacgccttatccaccggaccggtggcacgccatatatctgtattgtgatgagccacccatccgttgcatccatacatagtccgtgccgtttccctgccggtaactgacaattctttcaccatttcgaacaagggctggtgcgtttcactcagattggtcacttcagccggccagtaattcatttccgtattaatattgatggtatattttccatcccatggagcagccagtttattattccatataccttgcaaattggcaggctgacctcccggctgggaggaggaaataagcaaataacgtccatactgaaaaagcaacaccgccaaagaaacatccttaccctcattgaacagttcgatgcgtttgacagtttccagcttagcccgctcactggttcccaaatccaatcttacacggtcaaactgctctttataaagagctatatgctcctgtaaaacctgactataagggcgtcccaatgccagagacagatatccggacgcttttttactctcattgccacttatatcgtgataattaataaaattcgtacccgatgaaacatacagagtaacactgtccgctccttccactgtaatgttttggtcatcaattttcaccttacccccatccacatcagcctgtgtctgtgtttccatacgaatcaatcctttcactccctcatgatccctaccctttccggtcagaaccaatttctttcctttcctgctgactttatgctccaatggcgacacatatccgaccttaaaattcagtttccccggccggtctgctgtcaaacggaccactaccaccttatcaggaaatgatgcaaaaacttcacgttgaaaagtcacgccatccactttgtaacgggtagtagccaccgcacgttccaaatccagatcacgataataatcggtaaccttttcatgtccgggggtttctataatcaaactgccgattgtctgatagggcataccatgctttccggcataaaagttttcttgaatcaagttctgagcctccatgttttttccggcgaaaatcagttcacgcacttggggcagactttccaatgcttccggtttgtcattccggtagggactgcctccccacatggtttcatcgtttagttgaagttcttcacgggccgttccgccatataccatcgctcccatccgggaattgccgaccggaagcgcttccacccacgttccggcaggttgcttataccacaatttcagatcaccagcctgaatagataacgaaaaagacaataaaatgcctgctaataatgaataagttttcatggttaatagatattgtataatgtacaaatataattctattaaccatacaaacgaaaagacagaagcattttattgtctaaaaaacaattatgataaagaaaagaccaaatattacacctcctccctatctgataaccggaatcacataatcgtattttctcaatatttccgttacaggagacagtggaagcaagtcagggcggggagatataaaagacttgctgtcgatagccgagcaatgccgggaaatgggattcacggaagaactgacaagactgcttgcctacttccaacccgtagggttcaggggaaactgcattcacgggaacaccgggaaaagtccggaacggcatattcaacggcaacagtaaagaggaatccgcagaagaaaggaaagttccggttgtgcattgacggaatgcctatacttgaatggttcaagatgaatttaaagagcttaaggaaaagctggctgtaggccacactccaaaagagaaaaacaggccccaaagagagttgagaatataattctttggtagaaaataaaagtgtaattctaattgttaatgaattgcactttgagtatttttgtaaatactttgtttcactgataaataaaccaagatgaaaactatattttcatgtttcttctgtcttttctgtcttttcactatcgggtgtacgcatcagtccagtcaagaaaactgtgtagaaatcggcagtgcggatgcaatctgtgtaagcaccgatactttagggaaaacagtacgcatgaatatgctacatgggcattataccactgaaagtgaagaagtgttcgctattgtcctcaatcctcagaaacttccactaagttatggcagaagatggattttagaaagatgggaaaataatcaatgggtaaggctttggacgaaaaagcccacagttttttttgatgacgaaattataccgattaccccacctatatattattgtttcagttttcctattaaatactataaaacaactcccggcaaatatcgtatttccacatcaatgtggaatgatttggagaaaatcaatctcaatgctgaatttgaaatagaataaacacccctttcactaaacaattcaatgttatgaaaacaaaaatatgggtaggagttctattttactcttttatgggatgtgcgaataaggcaccaaaatcaaatcttacaagcaaatcaattcctaaagagccggaagggtatggtgtccggtatattcccgtgcaagaagaaccggtagaagagaatacggtttatgaggtagtagaggaaatgccagaatttcccggtggtatagataaattgttacaattcatcaacgataatatgaaatatccagcacaaacggaaggaatgcaaggaaaggttattgttcaattcatcatagacgaagacggttacataatagaacctaacatagtaaggagtgttgagtcttctttagataatgaggcactacgtctgataaaaatgcttcctcaatggaaacccggcacactaaaaggaaaagctgtaaaggtgaaatatacagtcccagtagcttttaaactcaaataatagcaactataaaacatttattactcatattcccgtaatattcgaaaatcaccattcccctcgcaacaatgtgcttgaataaaacaaaacacccacctttacattaacatatgtaaaagtgggcactatttctttaaattattgattttcaacgcttaatgcggtgcgtacgggactcgaacccgtgaccccatgcgtgacaggcatgtattctaaccaactgaactaacgcaccaaatttcatttttcttatactgcatctctctcgattgcggttgcaaaggtacgcaaaatttcgatatctgcaagcattttacgaatattttcttgaacttttttacatcaactctgataataagccatttaagatacaagaaaaataaaaatacaaaaaaaagagagcacttcatgtattttttaaatataatatgtatattagtcgtgtaaataaaaggaaacgcaactatggatatgcatgtttttcaagtagaatcaaataaagtacttccacaacagggaagcatccttatatcctcccctttcatgaacgactaccactttacaagagcagtcgtgcttcttatcgaacataatgacgagggaagtatgggtattatcatgaataaagatttccgttaccacattctgctcaatgacctcatccccgaattggaattcgcacagcgggtcccggtgtataaaggcgggccggtgagccgggagacaatatttttcctgcatacgctaaaagatctggaaggcgcactgcctctgggaaacgggctttatctgaatggtgatttcaatgccgtgcaacaatatatactggacgggaagcccattgaaggagtgatccgtttctttgccggttatgcgggatgggatcatggacaacttgccaaagaaataaaagagaactcatggctcataggaaaagccgggaaagaaacgttgctcaaccagcacttccgcgacttatggcataccagtttgaacgaaatgggaggcaaatacgccatttgggcccgctatccccaatacccctccctcaactgagattcagcttctgaacaaccagcacatccgtatagccaccgccaaacgtatgcgcccactctttcaataccgcactctctttgtacccgcacgccgcaaagagtctgcgggaaggaaggttttccacagcgatataggcaaacaactgatgaattcccagataacggaaacagtgttcttccagcaaagccaaggcgttacgccctatcccctgcctgcgacaggatttatccaccataatccccacctcggcccggttgtgcaaaggatcaaaagaacatagatccacaatccccaccacctgccggttcccgttttctatcatcaggcgcaactggcggtcggcaaacaaatcattctgggtctgctctatgtactgcttcaactgaaaacgcgaatacgggcctgtggtattgctcatctcccacacatccgtagcgttctcaaagcggaacatgacttccaagtcttccggctccggtgcacggagccttatcccgttcccttgaaaatgccggtcactcatcataaagcaggctcctcattctcctcttttaccaaatccagctcatccagcatccgcttgcgggtagggacacagaacagggaagcgatcagcgccatcatggcacacaatacgcccgtgttgttcagagtcagataataaaatgacaagttcaccaatacgggaaccaccagcatccccgtccttatctcactccagcggcgataacttttcaaggcttccggcaatgaacgctgcttcacattcttcaccaaggaaaggctgaacagccggagcgataaaggaatcagccccaccgccaataaaatccctaccgtctgcaagacataatccatacggacatcgcccgcgtaagccccctcggtcatcacccctgtttcataaagagccaccaagagcaaaggcaacacccataccgccacatattctatctgcaagtatcgcagcaattgtcttatcttcttttccatttctttctgtttttcccagtttatgccgttcccgtaaacaaagtacgatttatgatggaacgtcccaacgtcacttcatccgtatattccagctcatccccgatagagataccacgcgctatcacactcagcttcacgtccatgccgtccagcttgcgcgagatatagaaattcgtcgtgtccccctccatcgtcgagctcaaggcaaggatcacttccttcacctcaccgcctttcacccgttccaccagactttctatctgcagatcggaagggcctatgccatccatgggcgagatgactccccccaggacatggtacagccccctgtactgctgcgtggcttccaccgccatcacatcacggatactctccaccacacagatcgtggaagcgtcccgcgccggattggaacagatacggcaagtttccgtgtccgatatattatggcacactttacaatatttcacttcatgtttcaaggtaatcatcgcattaccaaacgcctctaccacagctgtatcctgtctgagcagatgcaataccagccgcatggcggtcttgcgtcccacacccggcaacttggcaaactctcctaccgctttttccagcagcatggacggatattgttggttcatcagttattttgtattataatggatgcaaacttacgcaatttcaacgattttgagtacatttgcactcaaaaaaataacatgaacggaatttatattctgctgaccatactgctctatttcggaatactgctgcttgtagcccgccttaccggccgtcattccgataatgacgcgttcttccgcggcaaccgccgttctccctggtatattgtttctttcggaatgatcggagcctccctttcgggagttaccttcgtttccgtcccgggtatggtacgcggcatcgacatgacctatatgcagacctgtttcggcttcttcataggctatctcatcatcgcccacgttctgctgccgctttattacaggttgaacctgacctccatctacacgtatctgggagaccggatcggaaggcacgcttataagacgggagcctcctttttccttctgtccaagatcatcggagccgcagcacgcctttatctggtatgccttatcctccagcattatgtattcgacgcctttcatattcctttcgccgccacggtgatagggattgtcttactgatctggctgtacacccgccgcagcggcatacgcacgattgtgtggacggacagcttgcagacactctgcctgctgctggcgctgggattaatactttatgaggtttccggccaactgaatctggattttccgggactggtacatgccatccgggaaaatgagcacagccgtatctttgtttttgacgactggcacagcaaacagaatttcttcaagcaatttttcagcggcatcttcatcacgattgtcatgacagggctggatcaggatatgatgcagaagaacctgtcgtgcaagaacctgcgtgaagcccaaaagaacatgtattgctacggcatctcattcgttccggtcaatttcctgttcctgtcactcggaatcctgctgttattgttcgcctcgcaactgaacatccccctgccggcagccggggatgagatactgcccttgtttgcggcggaaggccatctgggattcgccgtactgatattctttaccatcggcatcattgcagccgccttttccagcgccgattcggcattgaccgccctcaccaccagcttctgtatagacatagcgggcataagccatttgtccggcaaggaagcggaaagacggaggaagctcgtgcacttctgcatatcagtcctctttatcggattcatcctgctgttcaaggcagtaaacaacaagagtgtcatcgacgccatctataccatcgcctcgtacacttacggcccgttattggggctgtttgcattcgggctgttcaccccaatgcggccgcgcgaccgttttgttccttacatagccatcgcctcgccgctattatgttatgccatagaccggctggtgttcacctccaccggctatcagtttggctatgaaatgttaatgtttaacggcttcctgacttttatggggctgacttgtttaagtataaaaacaaagaattatggaaatactcagtgcagaatttgtagtaagtaacacaaaagtagagaaatgcccgcaggacaacctgcccgaatatgcatttatcggccgttcaaatgtaggtaaatcgagtctgataaacatgttggccaaacgtcccaaactggctatgacttcctccactccggggaagactttgctgatcaatcactttctgatcaataaagaatggtatctggtggatttaccgggatacggatatgcctcccggggcaagaaacaggtagaaaagatacagcagattatcgaggattatatcctggaacgcgagcaaatgaccaatctgtttgtattgatagactgccgtctggagcctcagaaaatagacttggaatttatggaatggctgggagaaaatggagtacccttctctatcatcttcaccaaagccgacaagctgaccaatggcaaggttaaggataatgtaaacaaatatctgaaaaaactgacagaacagtgggaagaactccctcctcatttcgtatcctcctctgaaaagaaaacaggcagacaggagattctggattatattgacagcattaaccggtcgcttaaggcatagcgtttacctagtggtgactacttagaacgcaaatgacacaaatttatacccgttcctatttgtgtcatttgcgccatttgcattccgttccggcaaacgctcagagttttatggtcttcaccttacccggaatcaccgtcagatgcaccgtaccgttgcattctatatccaccttctggtatctggcctccaccaccacttttccgtccagagccattattccccattggcaggcgttttcctcgtaagcgcaataatagcccacaggaggcagaatcttcctgtatttgggaggcacaatgatacgttcccccagtttcaagccccatttcatccccatccggaaaggcaatgcatccctgatctcttccaaccttttcagccttttctgttcctcttcctgcaattgtttccgttgagctatcccggcacgccgcccggcttcttccttcagacgttccatcaccgtatggaaatcttcctcgcccggccggggagtgttacaggctatataccgcttttccttccctttctccacatgataataattcccgttcccgtccatcaccacgatgctccggtccgccagacggccacagcaccaatacacttcctcctcatcccctgccagcacacaggcgaaaacatcaaacaaggtagtccagacaggatccaccagttggcagtccttcggaacacggtaatccggtatcttcagataaaagtcataaaagtagatgccgttctgatccacccctcgcatggagacatacgattttccggtacggctgaaaaagaacgctcccaccttcagcagctccacaccgccgtatggcaattccatacagccgaatgacaacaccacgggtttctcccgataggttctgtttaccttcaggtcgatgtaagattcattgcccgcacagtctgtcacggcaagcagatcccccttcatgaacttcattttccggcagcggtccagctgtattccgggctgtccggtctcattcaccacacctgcccggttattcccgaatctcactgccgcccggtttccacagatatcaaacacttccggataccggggccttaccgtcatcctctccccgcgcctcaatccccaaagcccgctttgtctgtcataataacttttcaaaacgggctgtccgcctttttccgttgctgaatcttcccggtttgtaaggaagtccatcagccggtcgtgcgttatcaccacctccagttcatcctcccgctgcctttcctcctccggcagcagaccggatacggacagcctgcctgtttccgcccgtgcccgggacagcgcgttgccaatcatccgcccctcgaacatcgccgcccagtcatggttccgggcaggcagaccgaagatgcggtacagacccacattgtctatcagcatacaggacgccttgtcggccgacctcctcagcccacgtcccacctgttgcaggtatttcgccagggaaagcgtgggacgtgccagctgcacgaactccacatcgggacagtcgaagccttcggaaaagatatccacattgaccagcactttcaccttcccccgtctgaaatcctccaccagttcccggcgttccgaagccggagtcctgctgtcgatagccacagcctccagtccgtgtgcgctataacaagccgctatccggcgggcatgggcgatgctgacagcatatacgattcctttctttccgcgggcatatcgttccacgctctcatacagccggccgatacttgtctcccggttcagcacctcgttcatctcctttacctggtagtccccgtccgcaccccgtttcttcagcgagtctatcaaccgctgttccctgctgttcgcacggatggacacatagtcaaaggatgacaaccaaccctttccgatgaattccgcgacagtccacgaagcaatcaggctgtcgaacaagtccgtgaatcccttgccgttcagccggcagggagtggcggtcatacccagtttccttgcctccggatagttctcccaaagtatccggtaggtttccgccagggcgtgatgcgcctcgtcgataacgatcagatccggctcttcgtccatgcttttccggtttcgtgacagccactggatggacatcaccctcacccttccgtcctctttgctcatcccgtgccgggacacggtttcctctatctg

SEQ ID NO: 3946 - DNA, 21706 bp, Unknown
  gut microbiota DNA sequence
agctaaatattttaaagattcaaagaagacacaacccttcaaaccgggtgatatcaaactgagagacttgaatggtgactatattattgatgataaggatgaaacttacctgggtagccagtcaccgaaatggacaggtggattcaacaacaactttagttataagaactttgatttgaacgtatatattatcgctcgttgggggcagatgattgattatgagctgaccggttcttatgatcctcagggaaaaggtaactttcctgcttacttgaactattggacgccggagaatccgtccaatgattttccgcgacctgctcagaccaatttctataactatctgggttatcagactttgaattacattgatggttcgtattggaagatcaagactgtatcactgggttatacattccccaaatcgttgacttccaaattgggtgtgtccaaacttcgtgcatatgtcactgccaataacctcttctcttttgccaagaatcatttgattcaggattacgatgcagaacgcggaggatcggctaaagctccgttgcagcgtcagtttatatttggtttgaatcttgatttctaacagataaaaaagaaataactatcatgaaatacaataagaaatatctatttgcagcatgtgccgccctgttgttgggcatgcaatcatgtgatttggaggaatacaatcctgccggaagtaccccggataatgtgtacaaagaacaggccggttttgaggcccttgtcaattcggcttatgctttttggggcggtcagttttatggacgtgaagattttgtgttattactgaacggtggtggcgacctttggatcaatattgccaattgcggttatggccgtcagatgtccaaatatgaagaattgacagcttcggttggtcagattaagaatacgtggaatcgtctgtatgaaattataaacgactgtaatgccggtttggaacggattgaccaagtggaattcaaagacaagaaactgagagatatccgttttggtgaattaagtttcatgcgtgcttacgcttattggcatttggttgaaatttacggtaacgtggatcttagaaccaaagaaacttctgccgaaagtctttcaatgaactgttatcgcagcagctatgaagatttgtatgatttaatgctggccgatgcacagaatgcggtggataatctgcccgttgatccttatcctgttaaagatgtaggtcgtgcgacctcaaaagcggcttatggtttattagcgcgcatcgcactgacacgggtttcctattgtgacagtcaggcagacaaagacaaatattataaaatcgctgaggatgcggctcaatatgtgattgataaccagagcgcattgaaggtgtctttgtataatacacctgccgaggtctttgatccggataataataaaacgaataaggaggctatgttcgttgtgacccactctaccgagtcctcattgaatatgcaggctaaaaacccgaaccgtatgcatatgtatttccatgccagttattcggcaagagcaggtatggtgcaggattatgaatatggaaatgataagaatgccaagtcgggcagtatggcgatgatgcctacccgttatttgttggaattgtataatgagaatatagatgcccgttacaatgcctggttccgtgaagagtataaactgaatacacccaaagcttatgcctggactaaggatcagttggactattttgaaaaaccgtcatctatgattggtcaggttattcagccgggagaaacagcgctgcttttcaccaagaagaagattgccgacaaacgtaacttgccatacgctgtcgtcgatatcgatgatacctatgcagccgatggaagtgtcagcaagagtgccaactttaacattcacttcccgaccttgctgaagtacgaagatgcgaattttgaaaacaaaggattgcctaccaattcgcaggtaggtgcaaatgatgtgattaccatgcgtttgcccgaaatgtatttcattgttgccgaatgtgagatcatgaagtccggaggaaataaggagatagctaaagcacgtatcaatgacatacgcagacgtgcggctgtaccgggcaaggaagctgaaatggaggtaggagtggacaagatgacgatcgactttattttggaagaaagagcacgtgagtattgcggcgaatttatgcgctggtttgatttgaagagaaccggaaaattggtagaatatgtgaaagctcataatccggatattcctttgatccaaccgcatcatgcatggcgtcctattcctcagatgtttctggactctatcttgaatccggatgaatttggtcagaacgagggatataattaataagcatgaaaacgatggcgctttttaaatatattgtcctgtctgtctgtttgtgtggaattcatctgaatggttttgctcagtccacccgtgaggctatattggaagatatagcccggacgggaggagtgtactatgcttatcctgtaaaggaagctatcgcgactcctccgcctaaagggtataaaccgttctatatcagtcattatgcacgacacggttccagatggattcaatcggaacaggattataagacagtggttgatattttcgagaaagcgcatcaagccggagctttgaccgctttgggagaagatgtccgcaaaagaatggcgttggtgtgggaagatgccgagggacatgggggagatttgactcctttgggtgtgaggcaacaccgggggatagccgaaagaatgtttcagaactatcccgaggtattcaagggatctcctgctctgtctgcacgctctaccgtggtgttgcgatgtgtattgagtatggatgccttttgtgaacggttgaaagaactcaatccggcattgcagatccggcgcgaagcttgtgccaggtatatgaaatatatgaattatcatacgccggaagccgtgaagtttgtttctcatcagggaccttggtatgaggaatatagaaagttcaaagaaagtcatacccgtcccgatcgtctggttacttccttatttaatagtcctgactatatccgtaagaatgtgaatcccggcgaattgatgtggggactttattggattgcttcggatatgcagaatgtggaaatagatgtgagcttttatgatctgtttcagaaagatgaattatttgatctttggcaagtttgcaattatcataattatgtatgtgacggacctgcgcctgccaatggtggaataatgacggccagtgcccggtcattgcttgaaaatatattggattcggccgatgaggcgatcagatccgggacccatacggcgacattacgctttgggcacgatggaaatatcattcctctggtagcgttgctccaattgggtgatatgtggaaagccgaaacggatcccgataaattctatcgggcatggtgtaatttcaaggtcactccgatggcggcaaacgtccagttggttttcttcagaaaaaaagcttctgacgatatactggtgaagtttatgcattgcgagaaagaagttaccatccctatagaaacggatattgctcctttttaccattggaaagatgttgaaacatactatcgtcatcttttgcataaattaccataagtctataagatgaaaaacggtgtaaatccctgtagtattgtaacgggatttataccgtttttttgaatgagaaagagcaatgggaacagcagattatcaaagaaaagacttacttttgcaataacagaataaataaagaataaaaagaccatgagtaaactgaatatgaaagagtggataaacgaaattatccaaaagaaagaggtggtggctatgcccatcatgacccatccgggcatagagatgatagggaaaacggtacgcgatgccgtcactgacggacaagtgcattacaacgccatcaaggcattgagtgagaaatatcccacagccgccgcaaccgtgattatggatttgacggtagaagccgaggctttcggagcggagattgtcttccccgaaaatgaggttcccagtgtggtggggcgtcttctcaatgatgaggaagctattgacaaactggaaattcctgccttgaataaaggaagagttccccagtacttgaaagcgaatatgctggcggccaagaccattacggaccggcccgtctttgccggttgcatcggcccttactcattggcaggacgtttgtatgacatgtctgaaatcatgatgcttatttatatcaatccggaagcggccaattcgctgttgaagaaatgttcggatttcattcttcgttactgtatggcattgaaggccacaggagtgaatggggtagtgatggccgaaccggctgccggactcttgtctgatgaggactgcacgcaatactcgtctgttttcattaaggagatcgtagagaaagtgcaggacgatcacttcacggtcattctgcataattgtggaaataccggtcattgtaccaaggcaatggtagctacaggagctgccgcttatcattttggaaataaaatagatatggtcgaagctctgaaagaagtacctgccgatgctcttgcaatgggaaatcttgatccggtgagcttgttcaaggcggctactccggaggtgatgaagaaagccacactcgacctgttggaggctacccagtcctatcccaacttcgtgctctccagcggatgtgacacaccgcctcatacgccatctgaaaatattgatgcattctttgccgcattaaatgaattcaataatgcttgaaaaagaactttcttttgctgatctgtctatctcattgtccgaactctatgaggcaatggggtatgcagatgctgtgcccgacgaagcggtagaaaaagaagtccgtggggtgcttggacgggtggaggcagtaacttctccccgtttttgttttttcatatccggtggagagttggatgaatcgaaagactcgctttctgtcggcgatacgtgtttcagtataggtaaaataatcacccggcagctgcgtggttcggaatccttcgctttctttgccgcgactgccggaaccggttttgaaaggttccagcatacgttgctgcaagagggggatatggtaaaggtttatatagcggatgccataggaagtgtcatagccgagaagactgcggattgtatggaaattgcgttggatgaatacatccgcgacagagggtggaggcataccaaccgtttcagtcccggatattgcggctggcatgtgtcggaacaaaagaaattatttcccttattcccttcggcggaaccttgcggcatccggttgacagattccagtttgatgcttcctataaaatcggtcagtggagtaatagggctgggggaggatgtccgtaagctggaatatacttgcggtctctgtacgtacgatagatgttacaggcggaagcagcggggataataggatggctacaaaaatcagagtcccaaatggctagatgttgttattaatctcattgattttacaatttgttgcaatcttaatgaatctcctgtcctatcaagacaggttataacagctgtccccatctgctgtaacaactactttcatctgatgttccaccctggtgaaactccagtcccaccgaggtggaactgcaatttcaccggggtgggactgcctcactacccgagtggaataccaaacgtaggcatataaaaatacaatcttttcagccttctgcaccttcttttaatgcccattgaagaatagataaagcccgatcatgataatagtcagtagcgtccatgtaaggataaccgatttggccggtttctccatgactttcttcatgtttaatgtacattcttgccggcgtttatccaataaggataccaaaatcatgcctgcgctgatgacaacgaacaggtagaaagacagcatcatgaagtgaggccatgctgtatatttttctgcaggaaatacccataaatagagaatgcccactcccatgctgaacgccgtaccaaatgtcaatgccatgttggcagccatcgtggtagttcgtttccagaagatgccgaacaggaaaacagccgccataggcggtgcgataaatcccagtaccgattggaatacattaaacagattcaatcctttgatactgtctatggcaatggtgatgatcaccgaaatcagtgctcccgccattgtaaccacatgccctgtacggatgatctctttctggctggcaagcggtctgaatttcttgacatagatatccatcgtgaagactgtactcagcgcattcagggcagagccgacagtgctgatcagtgcggcggtcaatacggccagtaccaaccccaccatgcctacaggaaataagttagtgaccatagtcatgtaggcttcatcggggttcttcaagcccgggtagagtgccagacagatgatacccggaaggatatagagaggaacatccagtatcttcaaccagccggtgaagttggcacccatttggccttctttcagattcttggcagccaatacaggctgtaccatggattggtctgtgcaccagaaccagactcccatgatgggataccccagaataatgggcagccacgggaaggcgggatcgtcattcgggcggaacaggttccagtaatcggccggaaccgcttcggccaatgcgctgacgccacccactttgtaaagacctgctatagtaagcgtggccgatacgaaaataagcagaagcatttggaatacattggtataggctaccgctttcagccctccggccatggtgaagaatgcggagataacgagcaggatcaatgctgactgccacatgggaatatcgaaaacctgacggataaggatacctccggcgaataaggtcagggcaagccacgagataaggattgtcacaatggtgtaccaggcaagaatgttgcgggtggactgtccgaaacgccgccccatgaactccggcaaggtggtgatacgtgctcctaagtaacgaggggcaaagacaaaagccagcaagcagatgaaaacaaacgcataccaggcataattacctgaaacgataccggtggtaaatccggcactggcggaggctatcagcatggaagggcccacattggttccccacatggagaaaccgatgtgatgccacttcagggaacgctcggcaagaaaaaggctgctgccttttttgcgtttcaggctggcccatataccgatgcctataagaatcagaaagtaggcaataagaatgccccaatctaacgtatctaaataattagcgtgcataattcatgtatcagattaagatgaatattccgtttattgatgaagtcccatcagttctttggctaccgctacggccgtattggcattgtcgctatacccgtccgcacctatttcatcggcaaatccctggcttaccggagcgccgcctatcattacttttacctgatgacggataccggctgcttccaaagcgttgatcacctcttgcatataagtcatggttgttgtcagcaaggcactcatgcacaggatgtctgccttgtttttcttgacttcttccacaaatttgtcgcaagatacatctatgcctatgttgattacctcaaagccgcaaccttccagcatggaagccaccaggttcttgccgatatcatgcaagtcgcctttcacggtcccgatgactaccttgcctatggtggtcgaggcactcccttgcagtaaaggcttcagaagttccaaagctcccttcatggcgcgtcctgccatcagcagttggggaacgaacgcttttccgtcctggaagcgttgtcccacttcgcccatagcctttatcatgtagttgttgataatttcctggggctgtactccttcggcgatggctttcttggttacttctacggccggttccagctttccgtccacaatggcattgaacaaaggtttcaaggcttcattcccggctgccgcagagtctttgacgacgattgtttcttgttttgttgcagcggcttcttctttcgaaaggtcttctttggatacgtcagaggaagaagaggagtattcttcgacaatgcgcatcgcttgttccacttctctctcgttatggaaatccatttccagatgcacaccgtccgcaccgatattgtccagcaaaggtttcagttcgtccaaggttacccaacaagccatgatacttttgcctccggcaaggatcttcttgtaaaggtcgtaccatttgggtgatcctccttgtggctcacctacgcccggagtccattgaatggcattcagttcctcaatttcaagaagggcgggcaggtgatgcatggcgcccacaccgtccaaatgatacaaggtatagtctattttttgacattgttcgcggataaagggttgtacaaaacgacgataatcatcttcgctgatcatggtagaaatatcgctttgtaatttgctcattttaccgggagcccatgaagaaaaatagcagaaagccatttcgtccccttcacggatgatgtcgtaaagttcatcaaagactttgaaatagatatcattgatttgttgcatttgctgttccagcacttcgggctgcatcacggtatccagcaaaactttgtctgtacctttcaaggcggccagtacgtccagcccttccatcaaatcgggcattcctacgtaatagtgaccgtttgctttcgccttgcatgccttcagcaattctttatgcaagatccagttgggatgctcgggattgaaaacaatctcatcgttgaaatcgggatcgggatgaatccaaatggtatcttcccctccttcgaacacgccgcccaagatggctgccaatgaaccgggacctaactgggtattggctaccggcaggatatctgctttcagactgctgtgtgccacgtaccagtccaggtattctgcacgccattgcggatcgaaccatttctgattcaggtcttttgccggggagggtgcagggatatccgcatgaggtttcacaccttcctgaaagtgctcccacatgttcagtatgattcctttatggttccaccattctatatatcgtttctttgtttcgtctaaattcgttttccaggtttccatattcgtcagtttttaaatattcctttaaaatgagggtctatgtgcagaccgatgcttttgcttaaatccatattgtccgtgcattccacttcatccggataaacggggatggtcgctccttgacgtacatatacgggcatttcgtccaaggggatatccagattcttcagccagcgtcccccttccaagcgttcgcctgtgaagaaattcacccatttcccttcgggcagatagacatcccggcggttctcgctgttcatgaccggggctaccaggaagtcgttaccaaaatagtattcatcgtcgatgtgccagcacaatttgtcttcggggtgatgaaaaatcagagcttgcaagagaggtgctccgcttgcgatggccttacggctttgttctacgatataaggtataagcgtatagcgcaacttccaccacttttttatcataggtgcgatagcgggataatgccacggctcgcgtttgtttgtcccgtgataacggatgtgggaggagaatacaccgaattgtgtccagcgcatatatacatcatcgtccactatagagttcatgaagttgggcaatgtgtggaatccggggacatcatgactccagaaggcgaagccggaaagcccgaaatgcaagccgcctttcagcgagcctgccatcccatcccatgaactgcatgagtcacctccccaatgcaggggatagcgttggcatcccgcccatgccgagcgtgcccatacgatgccgtcaccggttacgtcttttgtgatttcataagcggctttctgataaagcaatgcatacaggttgttcagcaattcaggtttcatgcctttatagagggcatccatgtggatgttttctccaaaatcggttttgatgcaggtcacgcccatatccagcagattcttcagcagtcctttataccattcggttgctttgggataagtgaagtcaatggttccggcatagtccaaagcggagaaattggaaccttccgaatcttgtttctttgtcagcggagctatataatcgtttttgcgtgcttcgtctatctgttcggcgttctccgccacgtaggggagttgccataaggacacgcgatatccttttttcttcagtccttggatgaaccctttgggatcgggaaagcgttcttcgttgaatttccattcgcacagccagtcggtcttgaaccagccggtatccagatggatgacatcgcaggggtaatgttcggcacgcatccggtcgcatatctcatttacttcatcagcgctgaagtaggtcatgcggctcatccagatgccgaaactccagaggggaggcatggaaggatatccggtcagatcccgataaccccggaggatttcttccatcgtgtcgcctgctatgacgaagacatccagcatggcctggtcgctcaggaactgtaccgagcgggtggactgtccggccagtgacagtttgctgtgggcacaggtgtgatagaatgttccatacatccggctggagaggtagaaaggaatattcttataggtacggcggttgttcacaccttgtccgtcctggttctttaagaagaacgtttgtccgcttaagtccattttggcaaagcgttcccctgttccggcaaaacattcatcgggttttgattcaaaggaaagggtggcacgttccttcactccgtttcgtttgcagaaagccagtggcagtgcatcgtaacggggaggggagaagtggtcgtaggcagccagtcggatttcacgtttgccgtcggggtaaaggcgaagatccaaggtctcttgaggatcgggcagcagttcgctccaacggtccagtaccgggggctttacatggataagtgcccgttggattccgtcttgggtagtgatcaaccattccccttctgtttgtgtcacttgcaaagggagtttctttacccggtcactgaattggagcatttccgactgatccgtcatgctttcttcaccgaatccgataaagagccgggtgatacctgaggtgtactgacggatgaccagcgtatattcttcacggggcgatgccgtatcgggcgccatatcgttagagagcacttgcttttgaaaagggacgtttatacagatatccccgtctttttcatagacagaggtgggcttgtatgctttccataatgattcgtctcttgacagatcgggatcaaagtccagaaaatcgaataagtggtaattggttggtttcattctctttttgttattttgtttttataatgattcttggttgtgataccccatctacagcgaccctgcctgccttttgctttatactttcatctacttgcggaccattcttcttccacacattatgaggtcccggacggttggagtcgaaacgttcggacggacaccagttgttttctacggtatagccatccgtcgcttcatcaaagtagatgtaaaacgcacggtcgttggtagcgtagggcgcgtcaattaaatgttcaatccggttattgcgcatcacggagccgggttggttggagagggtataaagtcctcctgcatcatacagcctccgggcaaagtggtggacgtaattggcttcaatccgattgccgctcattccgctttcctgcagggtccatccccagcccacacagatacctgagtaattgacgtggcagacttcattatgtacgatatggatattctttacatatccggctccgatgcctacacctccccaatcttcattggtcacttcctcaatcaggttgttccgtatggtgattcccgtacataattcctgttcatgaaaaggtgtataaggcacatgggtttcaaatccttcatcaggaaaggtgcccaccagtaaggctgtgccaccaatatcggtgaaatggcaattctcgacaatggaagtcgatacggcgcgttcataatctactccggtggctgctaaatgctggaatgtgcagtggttgaagtttatgttattgccgcattttatctgtattgcagcttcgggtctgcctatccatgcctggttttccagttccgctttttcgggtagccccggtatgggtagtctgtaagcatccagcagatggaagcctccttgcaatgtaacgtgtccttgataagaggggcgcatccatgaagtatgttcgaaagatatattttgaaaatatatattccttaccgggcgttctaatgttccgcttatagtcagtaaagtctctaaagccggaataatgacttgcgccttcgtcatgtcttcgtgaggacgcgggtaataatagatgcgtccggaaggataatcctgataccattctccgggctggtccaatagttccagagcattgaccagacaaaaggtggagtttcctttttctccgtcaatgacaggttgaggccagggatgggcaaactccaaccgactttcgggatcatgaaaacggacgattgtatttgccccttcagtaatcatttccttcactctcagtatggcgatggcccaacgttggtgaacgatcatctctacttgtgaagcggcattcaactctgctgtttgtggagtgggaatggtgatcgtctcttcctcagggttaaaatcaatcatgcgttccattactccgtcggaaaactgtgcggcccgctgtgcttttgttccgttgacccacatttgccgggtttccaatatcctgtttcccatacggggcgcttccgctacccatattttatttctaagtgtttctggtattctggtatctttgcatccttgttcccaatctgtcacaggaactccgccacttaagactacacgggcattgggaacagcggtgatacgggtgggagagtctgttgtcccgctatcttcggggcggatgaacaggcttttatattgtgggtatattccttcctccaataggatatttatgcctccggttgtttcgggtgattgcaatcttctccattcgcgtgcttgcttgatggcttgttccagagtctggaggggagattggcgtgtaccggcagcattgtcgttaccgtagggagaaacataaatatctcctgcggttaaataaaaggtataactgacaaatgcgataaagcagattatttttgttttcatgggttctccggatttaaaggtctttttaatcagacggaaggaatctggttttgtacccattggataatttgccaatgtgtcaatttgctgcattctactctgcgtggtcatgggcatattagcaaattgatgcattgatatattaattgaagtataataaaaaacaggccataccttaatgaaaaggtacagcctgcatcatttaataaaagagatttattttttatgagttcatgctcatcaggaattcttcgttgtctttggtattttccaaacgactctttacgaaatccatggcttcgataggattcatatctgccagatacttgcgaagaatccacatacggtccaaagtagtcttgtcgagcagcaagtcgtcgcggcgggtgcttgatgccacgatgtttactgccgggaagatacgtttgttgctcaagttgcggtccagctggagttccatgttacctgtacctttgaattcttcgaagattacttcatccatcttggaaccggtgtcaatcagtgcggttgcgataatggtcagcgagccaccgttttcaatgttacgggcagcaccgaagaaacgtttgggcttatgcagggcatttgcatccacaccaccggacaatactttgccggaagcgggagagacggtattgtatgcacgtgccagtcgggtgatagagtcgaggaagattaccacatcgtgaccgcattctaccatgcgtttcgctttttccagtacgatacctgcaatctttacgtgacgttctgccggttcgtcaaatgtagaagcgatcacttcggcatttacgctgcgcgccatatctgtcacttcttcgggacgttcgtcaataagcagcatgatcatgtacgtttccggatggttggctgcgattgcgttagcgatgtctttcatcaggatcgtcttaccggttttgggttgcgccacaatcaaagcacgctgtcctttaccgataggtgagaacatatctaccacacgggctgaaaggttatcactatatccccctttgcaaagtttgaacttttcatcggggaacagcggggtcaggtgatcaaacggaacgcggtcacgtaccaatccgggatccagaccgtttatcttttccacctttaccaacgggaaatatttttctccttctttgggcggacggatagagccttccactacatcaccggtcttcaaaccgaacagttttatttgcgattgtgaaacgtaaatatcatcgggtgaggaaagatagttgtaatcggatgaacggaggaaaccgtatccgtcgggcatgatttccaataccccggtaccggtcaggataccttcaaattcgtaaggcttttccacctgtttgcgttccggttgttgaggaatgctggcagacgcttctccctcagccgtcgtattgttattattgtttgcctgacgaggattgttgtaattattgttgcgcggattgttgtacttctgattttgatcgcgctgctggcgtggttggaatttgggggcaggtgtctgtaccggagccggtgtttctactttggtagcctcaaatttgccgaacaactcagtaggaagttctattttttctgaaggaagatcctcgatgggaataaaatcatcggtttcactgccgaattccagttcgggaagaatcacttctttttcttcgggaatagccggtgtttcttctttttttgcttttttgggtgtcggtttcgccggtgcttcagctttcacttcctcttttgcagtttctttcgttttcgttgcaggttgttcttctgtcttggctgttactttcttactacccggtttgcgtcctctttttttaggtgttttttcttccgcgcttgtttcggccacggcttctgtttgtggtgttaccgctacaggagcagtctcttttactgtttcggcagctgcggcggcaggctgcggggtattggcttccagtttctgtgccttgtccttggttgcagtatagaccttgtcaccgtcttttttaacgttgatacgtgatcttttacggggttgactttcattggctttttctgccgctactttttgggttgctccgactatggcttgctcgtccagaattttataaaccagatcctctttttttagagagtctgttttcttgatacccaactctttggcaatcgattgtaattccgacaagtctttgtcgtttaattgaataatgttatacatagagtatagttattagtaatatatttctttataatcttttaatggtataattaaggagcgcaatctacacaaaaatgtgttagaagggggaaatgcactcataattacgattatgggattgatgttgttttgattgttatcaggaagtaaacagactttcccggatagggaactgacgtatttaccgaggacaaaagtagatatttttttttaatctcatgcatattacagaagattttttgccgaatttaatgaaattaataaaaaaaacgacgtggggaaacatcctttctgtctgtgaaaaccctgatgttaaatgaacgtaaaaataggtcagattgttcagcagagtctgcatgaaatagcgaaaaaaatactaatttagcccgtcaaatttgatttttacttaattataaatagagaaaagatgaaaaaagtgatttttacagaaaaggctcctgctgctataggtccttacagtcaagctgttgaagtgaatggtatggtattcctgtcaggtcagattcccgttgatcctgctaccggtgaatttgttccgggaggagtgactgaacagactacccaggtttttgagaatatcaagaatgtattggcagaagccggtctgactaccgctaatatcgtaaaaacaaccgtatttttggcagatatgtctttgtttgctgaaatgaacgctgtttatgccaagtatttcgaaggagatttccctgcccgttctgctgtagctgttaaggctttgccgaaaggagcgcttgtggagatagagagtatcgcagtgagataacgagcttttcgccaccgattgcacggattgatgcagattatttctattgaaaagcaattgcttgatatggaacctgtgtcaatcagtgtagtctgtagtgaatgatggtggatggggaatcataaaaacaactgattaacagatagcgtagaaaagtggaatatgaaacaactgaacaagtggcaatggtccacattaatattatctgctatactggtaatggcattttcagtctttatttatcggtatgagccttttaaatccgggttcgagattaccgaccagctgggtggtaatattttccctgcaaccattctttctaccgcaaccacagatgccagtttaatcgtacctgccgattccgattatatcggaaatcccaagtcgtgtatcgccatccggctgaagaacagttatgccaatagcaaattgcgtatagaagtggccgagactccttttttctctcagtctgtatctgagtttattttacccaaggcggggaaagaatatctggttttcccggatattatatggaactatcaggctttgcgtgataataatcaggcagtgcccgttagcatctccgtcaaggcggaattgaataagaaagaacttccacagcgtttgaaaaccatctcgatgcgcagtatcaatgagtgccctttaggatatgtggacgataaaatgaagtttcacgatacgggagagttttttgcggcctacgtcaacgaggagcatcctcagattgacaaattattgcgtgaagccttggatacacgtatcgtcaatcgttttcttgggtatcaaggtaatgcacaccagtcggagaatgtggacaaacaggtctatgcattgtggaatgtgttgcaaaagcggaactttaagtacagctccaccaccaataccagtctttcgtccaatgtggtttatacacagcgcgtccgtaccttggacgatgcgctggaatcctcgcagataaactgtgtggatggcagcgtgttgctggcctcactgatgaaagccatcaatatcaatcctatcctggtgcgtattccgggacatatgtttgtgggttattacacagacaaatcacataagaatatgaattttctggaaaccacgatgataggggatgtgaatctggatgatttctttccggatgagaagctggattctaccatggtgggcaaatcccagaaccagatgtcgaaactgacctacgagaaatcaaaggaatacgctacgaggaaataccgggagaatgactccctgatacattcgggtaaagtgaattatatgtttctggagattgataaaaagacccgtgcgcaggtgcaacctatcggtaaataaatttgttgtatggatatggaacttacttatatatatcatagcggattcgccttgtcaggcgatggctttactgtaatcatggattattaccgtgattcggaggatggacaggcgcaggcggatttgaaccggttgatggatgggactttcagcaatcaagagacgggaatgccggaaggaaccgtacacagcgaattattgcggagacccggaaaactgtatgtgctggccagtcattttcatccggatcattttaataaagaggtattgcaatggcgtgaacagcggccggatattatctatattttctcgaaagacattttgcgtcatcgcagggcgcagaaagaagatgccgtctggctgaaaaaaggagaggaatataaggatgaaacattgagcgtgcgtgctttcggttccacggatgtgggagtatcgtttttgcttcaggcaagtggaaaaaagatttttcatgccggtgatttgaataactggcattggatggacgagagtaccgaggcggagtggaagggagccgagaagaatttcctgcatgagctggatgatctttacgcctatacgcccgaagtggatgtggcgatgtttcccgttgacccccgtttgggaaaagaatacatgcggggtgccggacagtttgtaacaaagataaaaactcatatctttgtacccatgcatttcacaccggagtatgccaaggcaaatgctttccgcgactttgccgaagcgcatggagtgcgttttgtgtcattgacacatcgcggacaaaaaatagagattgaataacaaaagaataacacaatatgaaagtaaaaggaagatttgatcatttcaatatcaatgtaactgatctggacaagagtatcaagttttatgaaacagcgttaggtttgcatgagtctcatcgtaaggaagcttcggacggttccttcgtgctggtgtatatggccgatgaccacagcaatttcttgttggaactgacctggttgcgtgaccatacccagccatacgagttgggtgagaacgaaagccatctgtgtctgcgtgtggaaggtgattatgacgaagtccgtaaattccataaggaaatgggatgcgtttgcttcgagaacaccgctatgggcttgtatttcatcaatgatcctgatgattactggattgagatattgccggtaaagtaagacgatcgtttccgttagtaatgaattaaaaagatagagactatgaaatacatttctcccggtggctggttctcattggaatacccgatgggctggcacgagtttgaagatacagaagagagttttttattctataatcctgaccggtggacaggtaatttccgcatatcggcctataaggatgaagcggctgactatggtccgcagtgcatcgcatacgaattgaaagaaaatacttcttccaccctggtgaaagtgggcaagtgggattgtgcttacagcgcggaaacttttcaggaagaaggcgcctggtacaccactcatatctgggtgacaggagagggggatctttctttcgaatgttcttttaccgtgtccaaaggaggtgacaagcatccggcagaagaaatcatccggtctttgcagatccgcaaagaaggtgtaagtcacccgcgtgagatcattccgatccgtgtcttggaaatcggggaggtgaacaccgcctttgagtgggcttctaccacgattaaaaagcaactcaccaaggatttcactgcgtcggagagcgatattgacagtatacagcaggtaatggacagcggacgtttccagacccagcagcgtatggcgtgggagaatttcggtattgccttcggagccattctggtgaatgagatggaaggtatggaatgggtgactgtcattgagggacagaaagaatatcccgccttgcagtttatgtgttcggatatggtgctggaccctgccgcactggtgtggggacaagctaaaaagggacttccctgcgacttgaaatccgaattcaggaaaattaagcgagaggcggaggcagtgttggatgatttaaataaatagacaaataatgaccccatatatgcaagtagacgggcttaccaagtcattcggtgacttggtattgttccggaagatttcatttggagtggccgaaggacaacgcatcggtctgatagcaaagaacggtacaggcaagactaccttacttaatataatagccggtaaggagggatatgatgaaggaagcatcgtctttcgtcgtgatttgcgggtgggctatttggagcaagacccacattatcccgaagacctgaccgtgctcgaagcctgtttctatcacggaaacagcacggtggaactcatcaaagaatatgaaagctgcatggaaaccgaaggcaatccgggactggaagagctgttggcacggatggagcacgaaaaggcatgggattatgaacggaaggcgaaacaaatcctttctcaattaaaaatccgggacttcagccagcagatcaaacatctttccggaggtcagttgaaacgggtggctttggcgaatgtgctgataaccgagcccgattttctgattttggacgagcctaccaaccatcttgatctggatatgacggagtggctggaggggtatctcggccggggaaacatcagtctgctcatggtgacgcacgaccgttatttcctggaccgcgtctgctctgaaattatcgagatagacaatcagcaggtctattcatataaagggaactacagctattacttggaaaagaggcaggagcgtatcgaggctaccaatgccgaaatagcccgcgccaataacttgtaccgcacagagctggagtggatgcgccgtatgccccaggcacgcggacataaagcgcgttatcgggaagaagctttctacgaactggagaaagtggcgaagcagcgtttcaacgacggcaatgtgaaactggatatgaaagcctcttacatcggctccaagatttttgaggcggatcatctgtacaagcgtttcggtgatttgaagattctggaagatttctcgtatatctttgcccgttatgagaagatgggcatcgtgggaaacaatggtacgggaaagtccacgttcattaaaatactgatgggcgaacagaagccggacagtggaacattggatatcggtgagacagtccgtttcggttactattctcaggatggcctgaagtttgacgagcaaatgaaggtcatcgacgtggtgcaggatattgccgaagtcatcgaattgggaaatggcaagaaactgaccgcatcccagttcctgcaacattttctgtttactcccgaaacacagcatagttatgtatataaactgagtgggggagaacgccgccgcctgtacctgtgtacggtattgatgcgtaatcccaacttcctggtgctggatgagcctaccaacgatctcgatatcatcacccttcaggtattggaagaatatttgcagaacttcaagggctgtgtaatcgtagtaagccacgaccgctatttcatggacaaggtggtagaccacttgctggtattcaagggacagggagacattcgtgattttccgggcaactactccgattatcgtgactggcgcgaggcgaaagagcagcgcgacaaagaggcggagaagccgaaggaggaaaagaccgcccgcgtgcgcctgaatgacaagcggaaaatgtctttcaaggaaaagaaagagttcgagcagctggaacaagaaatagccgggctggagcaggagaaggccgatatagaagccgccctttgcagcggtacgctgggagtggaggaactgacggagaaatccaaacgattgccggaactgaatgatttgattgatgaaaagaccatgcgctggttggaactgagcgagatagaaggata

SEQ ID NO: 3947 - DNA, 22954 bp, Unknown
  gut microbiota DNA sequence
taatggctgtgataggttctattatagctgtttggcttaacacaaaatccgggaaaaaatggctcgcaaatctatagtgtacttctcattggaatttgaggttattatggatgcattaggttttagtctggcaacaaaaagtggttggatggtctgtgctatctgatgccttacaattttggttaatgtatgaaaaggaaatcccttgaatgtttatggtcgttcaattatagtagtgagttgaacggctttttagtatttggacgttagttagaacagggaaaataatgaataaaataaaatagaaaatcaagatgatttttactaaaacgaatcttggaggattttgaatgggtagataaccttctgcttgtcagtatagtaagcgcagatcagagttcatactggcagtctaaaggtggcgagttcgagtctcgcatgctccacttttttaatgataaaatgaaggtctgcgaagcaggccttttttaatttaaagactatagatatgttaatttataatacaacttatcaaacaggcattgacgatgcgcgtaattttgtcatttggcttagtgaaagctatattcccgaagtggaaaagacgggaatattgcaaaatccccgtcttacgcacatccttagtcacaaagagcaggattcagaatgtttttcattgcaatgggaggtggaagatacagcggccttgcatcgttggcatactcagcaagggatgcatctgaatgaggaaatgatgaagatatttaaagataaggtggttggctttcccactttgatggaggtgattaagtgattcagccggtaaaagagaaaatcattctgggtatagatcctggaacaaccataatggggtatggcctgctgaaagtagtaggtactaaaccgcaggtaatgactatgggggtcattgatcttcgtaaatatggtgaccattatttaaaactgcgccgtatttttgaacgggtggttggtataatagaagcttatttacctgatgagttagctattgaggcgcctttttttggaaaaaatgtgcagtcgatgttaaaattagggagggcacagggagtggctatggctgctgctttgagccgtgatattcctataacagaatatgcgccgttgaagataaagatggcgataaccggtaatgggcaagccagcaaggaacaggtcgctgatatgttgaaaaggatgttacatataccggagagtgatatgctgccttttatggatgcaacagatgggttggcggctgcttattgtcattatttacaaatgggcagaccgacattgactaaagaatattccggctggaaagattttataaataagaatcctgataaaataaaaagataagattatgaatgtgagacatgttatttgggcatcaattgtttctactactattagttgtcagtctgtgaaaaaagaatataattcgtttgatgaatatcctgtccgtgaagatgcgctgactgaaatggagtactcgcctgccgaaaccaagttttcactttgggctcctacagcggaagaggtgcgtgtccttttatttgaatcgggtaatgaaggttcagcttctaatacttttccaatggagatgggagagaatggtacttggaatatttcaataaaagaggatctgaagggtaaattctatacctttaatgtgaaggtaaacgggaaatggttaggagacactccgggaattatggcaaaagccgtaggggtaaatggtaagcgggcagctgtgcttgatcttcgttctacagatccggaaggatgggagaacgatgtgcgtcctcctttgaagaattatgctgatattacggtttatgagatgcatcatcgcgatttctctttggattctgtttccggaattcaaaataaaggcaagttcctggctttgacggagcagggtactaccagttcttcaggcgagaagacaggtattgaccatctgaaagaattgggaattacccacgtgcacttattgccgtcgtatgattatgcctcggtggatgaaacaaaactggacaaggcccaatataattgggggtatgatccgcaaaattacaatgtgcctgacggttcttattctacagatccttataaacccgatgtccgtatcagggaattcaaacaaatggtacaagctttacataaggcgggaatcagagtggtgcttgatgtggtgtataatcacaccttcaatacagacgaaagcaatttcgaacgtacggttcccggttatttctatcgccagacgaaggacgggcaatgggcaaatggttcgggatgtggaaatgaaacggcaagtgaccgcgccatgatgcgtaaatatatgatagaatctattttatattggattaatgaatatcacatagacggctttcgttttgacttgatggggatacatgatattgaaaccatgaatgagatacgtgcggctattgataagatagatccgtctatttttatgtatggtgaaggatgggctgccagttctcctcaattagaggcagacaggctggcgatgaaagccaatgtggaaaagatgccccgtatcgccgctttctcagatgaaatgcgtgatggattgcgaggtggttgggatgatgatactaaaggagcttttctagtaggggagcctggacacgaaatgagtatcaaatttggaattgtgggagccatcgaacatccgcaggttataagtgattctgtgaattatagtaagaaaccttgggctttacaacctacccagatgataagttatgtaagttgccacgatgacatgtgtcttgccgaccgtctgaaagctaccatgccggatgcttcggtagaggaactggcggctttgcagaagttagcggaaacatttgtctttacttcacaaggagtaccgtttatatttgcaggggatgagatgatgcgtgacaagaaaggagttcataattcttataatagtcctgacagtattaatacgatagattggaaaaataagaccgcacacaaagatgtgttcgaatatgtgaaaggtttaatagctatgcgtaaagcacatcccgcttttcgtatgggggatgccgatatggtacgtaggcaattggagtttttacctgtagaaaatacgaatgtggttgcctttatcttgaaagacaatgcaaatggtgactcatggaaaaatatcatcgtggctttgaacagccgtgcagagcctgtcaagctggacattccgtcgggtaaatacactgtaatctgtaaggatggtaaaataaacatgaaaggcttgggacaggtttcaggtgatgagcttatggtaccggcacgttctgccatgattatacatcaatagaaggctcaaagaagattaataaagactttgtcatacagactaaaacacataatacgaatggaaaagacatggagatggtttgggaagaaagataagataacgcttcccatgcttaggcaaatcggggtggaaggaatcgtgaccgcccttcatgatgtacctaacggtgaaatctgggctttggaagctatccaaagtttaaaagattatattgaatctcatcaattgcgctggtcggtggtagaaagcctgccggtaagtgaagctatcaaatatgccggtcctgaacgggatcaattgatagaaaactacaaagtaagccttgccaacctaggtaaagcgggtatcaagaccgtatgctataacttcatgcctgtcattgattggatacgtaccgatttggaacatccttgggaggacggaaccagttctttgtactttgacaagatccggttcgcctattttgactgtatgattcttcagcgtgaaggggcggagaaagactataccgattcggaattacaacaggtgcgtgaattggataagactataaccgaagccgagaaaaacgaattggtcgataccattatagtcaagacgcagggatttgtaaatggtaatataaaggagggagaccggcatccggtaaccatattccgccgtcttttgtctttgtatgatgggatagaccgtgatgccctgcgtgaaaacttacgttatttcttgcaggctgtcatgccggtgtgtgatgagtacggtataaatatgtgcatccatccggacgatccccctttccaggtattgggcttgccgcgtattgtgaccggtgaggaagatatcaactggcttctccatgcggttgataacccgcataacgggctgacattctgtgccggttcgctcagcgccggattgcataacaacgtacctttgttggcacgtatgtttgcacaccgcactcattttgtacatttgcgcagtaccaatgcgtttcccaacgggaattttatagaagcatctcatttgggagggcgtgctcatgtgatagagttgatccgtatttttgagaaagaacgtccgggtgtcccgatgcgtgtggatcatgggcgcataatgctggatgatgccggcaaaggatacaacccgggttattcgtttcatggccgtatgatggccttggctcagatagaaggcatgatggcggttatcaacgaggaatcaaaacttaaatcctagattgacgtacatactcactttattggctcggtttgcatagtttagtgatgcctctaagggtccgaacatactatccaaaccgtagcctataccacagccgaacatggtatcctgttccaataggtacctcagcttgcttgcactcagcgcataattgcccgttagcgtcagataatgcacacttcccatccgttggcggaatttcatgcttcctatcagtaacgcattctttgttaattccacattgtttatcccgacaaatggtagttgctgttgcaggaaacgtccttgcacatccccccccatcgcattgagtttggagtaaggaatatctttccctatcagaaaacgtccgtatatggcaggcagtatggagaatctgcgtgtaacgggaatcactccctggcaatagccttttatggcagagaaaggagcgtggtcgtcatatttggtgaaattatccgtataaagtgaataggacgctcgtgccgatatgcctttggtagggaaatatgccttgtcgaaagtttcgtaatgcatttgtgcgaaatagctgaagaagtgttctgttcctacgtcaaaaccttggttcccttcctggtataggaatttgtcatagtcatataattcatacctcagccccacggcaaagcgtatgtttttgtaccaaacatccgaaaaggataactctcccaaatgatagcggtaggtagagttatgtgatttatctccatgatggtaaaagtttatatcattgtattggaacatatatgccagtccgatgttcttcaatggagccggttcgaatccataatctatgcgggcggcataacgtttgcccaatcgtcctgtcagtgacagcgtagtgggtacttttccccggaaattgctggtgacattaatgagcagactggctgtttcttccgaatcaaaacggattcctacgttcagcttattctcatatttcttgcttaaaagaaaatgcaggttataacctccgccgggggcttcgggcagattgtaagtggcgctggaatattccagattggagcatagtatggctgttgcttcttctatgcggcgaaggcttatttcggagtcttctttcaaatcacagcgcttcaacagccaccgtttgtctttttcgtccaatccgtcaaaggtgatttcttttatatacactttgcggttgggggagtacggatagctgggaaggggtttcggcatataggtactgtccagccccagttcctgcttcagctttatcaaggagtttttttgtgccaatgccgcttcttctccccgacgaatcagtgtgtccaccgcactgggggtgaaactggcggcagaatacccctccacatccacctttatatatgtatcggtttctttcagattctttttataaagttccagtcccattaaattgatgagttgccccaagatactgccggtgctattcagttcgttggcgggtttcaagtcattttgaacatccactcctataataatgtccgcccccatggcacgcgctacatttacagggtagttgtttaccacacctccgtccactagaaccatactgtccagccggaccggagtgaatactcccggtatggccatactggcccgcatggccgtagccaatacacctttgtgaaaatttacctcgttgccatttacaatattttcggaaacacaggcgaagggaataggtaacttgttgaaatcgatggaatcatgatatcctacggtcagctcactgaacaggtttgccaggttctgtccctttatcaatcctcctacggcttgcgttttggcatttttaccgaatggcagggaaaatacatatttttcggaagcctcccgttccgccatattctgttcgctgcgtggtattttgtcactcagcagaaaggaccaatcctgccggcgaaccatgctatccatctgttcgggagtataaccgatggaataaagtccgcctataatggagcccatactggtccctaccacgtaatctatagggatacccgcttcttctataactttcaaagcacctatatgtgccattcctttggctcctccgccgctgagaacaacgcccactttttttcggggaccaggttgggccgttgtgtgaacggagatacaaagtaaccctgctgctattaacagggtcgggaatttcatttttttcattttactataaatctagtttaagttaaaaaacaaaaacagtgcaaagatggtctaatctttcagctttcacaagtgctgattgtcatagatattggtctattttgctgctgaggtttcaaagatagggaattgtaccggaaaaaagaattttgtatatcgcttttttgtcgtacctttgtctgtgtaacgaaaaaaagtatggataattttgcagcaatagacttcgagacggcaaataatgaacgtaccagcatatgtagtgtaggggtggttattgtgagaaatggtgagatagccgaccggttctacagcctcgttcatcccgaaccggattactatttgtattggaacacccgtattcatggattgacacaggaagatactgcccatgctcctgttttttcggaagtatggaagcaggttgcccctaaaatagaggggcttccgctggttgcgcataacaaagcctttgatgaggggtgtttgaaagctgtgttccgtacttattgtatggattatcctgattatgacttttattgtacctatcaggcttcccggaagctgaaagggttgagaaaccaccagttacatacggtggccggtttttttggttttgaattggagaatcaccatcatgcgctggctgatgctgaggcgtgtgcatggattgccagacagattctgtgagttataattaaagatttatgatttctgaaacccatgatacaagaagatacttataaaaccattacagacattgccgaaggcatatatacggagaaacggagtaaatttatagctattgccattccggtacgtaccatagaggaaataaagcagcatcttgacacgtatcagaagaaatattacgatgcccgccatgtgtgttacgcttatatgctggggcatgaaaggaaggatttcagggcaaatgataacggagagccttcgggtactgcaggaaagcctattttggggcaaataaattccaatgagctgacggatatccttattatagtggtccgttactttggaggtataaaattgggaaccagcggactgattgtcgcttacaaggccgccgctgccgaagcaatagctgctgctgatatagtggaaagaacagtggatgaagaaatcaccgtatcctttgaatatccttttatgaatgatatcatgcgcattgtgaaagaagacgagcctgccatcttggagcaatcatatgatatggattgcctgatgaggctccggatacgtaaatccatgatgggaaaactccgtgcacgtctggagaaggtggaaactgcccgtattattgaataactctgtcggtacgtcgatatttttggggccatattcactgcgttcacagcagatgagaagaatacggaatgtggctgtaaaatgtcttccccatatcaaatgaaacatatttgtaatatggatgaaatattacagatataccgaacctatatctttgcagccgtaaacaaagaaagtcacattaataaaaatgagaaatacacttgtagcgtctgcttttacaatgctgagtattgcaactgcttccgcacagctgactattcctaaagaatatctgccggaagtacatggaacgatccgcggtaaatatgaacttcaaaccactaacggaatgcaacggttccaggtacgtaacgcccgtgtcagtctggacgggaaggttcttccggtaattgcttataaggctgaaatagacttgtccgatgagggaagcatcaagatgctggatgcatatgcccgctttgttcccaatgatacatggaatgtcacactaggacagatgcgtgtgcctttcaccatagacgctcatcgatctccccaccaacaatattttgccaatcgttcgttcatagccaaacaggtggggaatgtgcgtgatgtgggtgctaccggagctttctctttaaagaagggactgccgttgaagctggaaggcggactgttcaacggctccggactcaccaatcagaaagagtggcacaacacgttgaattattctgttaagcttcaattgatgccgtggaaaaattataacttgactttgagtacccagaaaatacatcccgataaaatcagcatttatatgtatgatatcggtacttactacgagtttgataattggcatatagaagccgaatacctttataaaacttatgcgaaaaactcatttgatgatgtacatgctttcaacgcctttgtcaattacgacttgtttatcaagaaaggcctgttccggaaaatttcatttctaggacgttatgacagtatgggagatcatagtaacggtaatgcggatgaagatggtaagctttacattaccgattattcccgccagcgtgtgactggaggtgtgacattaagctttggaaaggcttttcaagcggatttgcgtcttaattacgagaaatatttctatgataaactatctttggcaaaagagtccgaacaagacaagtttgtgatggaattaatggtacggttctgaaaaaagcaggggaacactccctgcttttttgctgtttgtccttcttttcttttccttttccatccctgcctttattccggaactcaccggcatatccgtgatatttcttcgggtaacaggtttttcctcgacaggcagtgcgccttcttccgccaagggggcaagtctatccccacctctctttcatcatatcttccagtttcagcagctcatccctgtattgtgcagcttctataaattccagcttcttggcagcttcctgcatcagtttccgggtacgttctatcgttttctccatctgtggcttggtcatatactgaacaatcgggtcggcagccgttgtatcggaagatggctcgatgtatgccttggggccttgagtggttccggtaacttcgttgctgttgttgcccaacaaggcaacattccgcgcacgctgtatctgtttgggggtgattccatgctcttcgttatatgccagctgtttttcacgacggcggttggtttcgtctatcgtttttttcatgctgtccgtcatgcggtctgcatacatgattacttttccattgatattgcgggcggcgcgtcctgctgtctgggtcagagaacggtgggagcggaggaacccttctttgtctgcatccagaatggcgaccaaagacacttcgggcaagtccagaccttcacgaagcaaattcacacccaccagtacatcataaacgccctgacgtaattcatccataatcttgacgcgttccaaagtgtccacatcgctgtggatgtagttgcagcggatgtcattgcgcagcagatattcggtcaattcttctgccatgcgtttggtaagcgtggtcaccagtacacgttcttctttctcgatgcgttgctgtatctcttccatcaggtcgtcaatctgattcagactggggcgtacttcaattaccgggtccagcagtccggtaggacggataacctgttcaacgataatgccttcactttccaccaattcataatcggcaggtgtggcactgacataaatcacttgtttggccagttccttgaactcttcaaattttagaggacggttgtcaaaagccgactccatccggaaaccatattccaccaaattggtttttctggcccggtcaccaccatacatggcacgtatttgcggtacgctgacatggctttcgtctattacaatcaggaaatcatccggaaagaagtccagcagacagtaaggacgggtacctgcattacgcccgtcaaagtagcgggaataattttctatgcccgaacagtgccccagttcgcgaatcatctccatatcgtatgtcacgcgctcatagagccgtttcgcctcatacatttttccttcctcctcgaatttggccacctctttcgtcaagtcgtcctcaatctgatgaatagctctcaactggctctctttggtggtcataaaaagattggccggataaattttgtattcatcaaaagttgccagacggattcccgaaacagggtctatctcttcaatggcatcaatttcatcgtcccaaaacataacccggaggagattgtcgctatatgccaggtaaatgtctaccgtgtcaccttttacgcggaagtttccgcgattcagctctatatcgttacgcacatacaggctgtccaccaagcggcgtaaaaatacattcctgtccagcagtttgcctttttttatctcgattacgttattatagaaatccgacgggttccccataccgtagatgcaggacacggaagacaccaccaccacgtccttccgtcccgacagcagggcagaggtggcagccagccgcaatttgtcaatctcttcattaatggccagatccttttctatataggtgtcgctggacggcaagtatgcttccggctggtaatagtcataataagatacatagtattccacagcattattgggaaagaaactcttgaactctccgtataactgggctgccaatgttttgttatggcttaatatcaaggtgggcttattgatgtttttaattacatttgcaatcgtgaaagtcttgccggacccggtgacccccaataaagtttgtgcggggactccttccagcaccccttcggtcagctgggcgatagcttccggttggtcgccggtgggttggtattcggaaatcaattcaaaattcataatagcatgtttggtttaatgagatgtaaaaatacagttatttccttagatattatctattcatctctaaaaaatagactcttgtcgactttttagcatttaaaaacatggaaatattgcattattcggtggaaaggcgtaaatttgcgcaattatttgaataagatgaaaaaatatatcattatagctcttgtctccggtacggttctaacgtcttgtggagagtataacaaagttttaaaaagcacggactacgaatacaagtacgaagcggccaaaagttactttggcaaagggcagaatactaaggcggccaccattctggaggaattgattaccatcatgaagggaacggataaggctgaggaatcactttatatgttgggtatgacctactataatcagggtgacttcatcacagcttcgcattatttcaccacttattataatacttatccgcgtggggtctatacggaacaggccagatatttttcaggaaaagcattgttcctggatactccggaacctcgtttggaccagtcgagcacctataaggctattcaggagttgcagatgtttatggaatatttccctaccagtagccgtcggcaggatgcacagcaaatgatttttgatttgcaggacaagctggtgatgaaagactatctggctgcgaaattgtattatgatttgggctcttatacaggaaacagtacttatagcactaccggtaacaactatttgtcttgcatcgttaccgcccagaatgctttgaaagactatccctataccaagatgcgcgaagatctttctatcttggtcttgcgtgccaaatatgatatggcgaaagcgagcgtggaggaaaagaaagaagagcgtatgcgtgaaacgatagatgaatattattctttcaagaacgagtttcccgacagcaagtatactaaagaagtggagagcatctacaaggatgccaataagtacgtaaaagaatttaatgaataaaactaaataagaaattatggattacaaaaagacaaacgctccaagtaatactgttacccgtgacatgatggatttatgtgcagacacaggtaacatttatgaaactgttgctatcattggcaaacgtgccaaccagattagtgttgagatgaagaatgatctttcaaagaaattgcaggagtttgcctcatacaacgataacctggaagaagtctttgaaaatagagagcagatcgaaatctcacgctattacgaaaaacttccgaaaccgacattgatcgctgctcaggaatatgaagaaggcaaggtttatttccgtaatcctgctaaagaaaaagagaaactacagtgatttttcatttggggctgtgcaaaaggtctttaccgcaggttacgcaatcgttctattttgaaacatgagtcgtttcgtgtggaaactgtatcaaactgagtaatctgtggtacattttgatgcacctcacattatattagccctgttatgctgaacgcagtgaggaatctgataaccattcactttgtgttttcaggtttttcactgcgtttagaatgacgggttgtatgattaaaattaaagagactatgatacaacgcattcaatctgtttatttacttgttgttaccattttgattattatttgcctgtgtagtcccgtaggctcatacataggaagtgattatagtgtttccgctttaacaaatctgtgtcttactatggcggatggtactaaagattatgctccatgggccttgtttgtgattttgctggttgttgcggttcttgctttcggcactatcttcttgttcaaaaaacgcatgttgcaaatccgtctgactattttcagcaccattttgttgatcgggtattatgccacattggtcacttttatttttatgttgaaagaagagtctatgacattttctccttcatggactgtgtgtctgccgttggttgccatcattttgaattggcttgccatccgcgccattggtaaggatgaggtattggttaaagcatacgaccgtttgagataagctgagggaattattatgtatgatataaaaagcctgcaagattcatcttgcaggcttttgtattatgagagagagtcctttttttatttagtaatatctatcaaataactcagccgtatgcctataaatgaatgggctgatctttcgaagaaatctcttttcgagttcttgtaaaagtcgctcaatcccatgtagtaacgtccttccagcaggaaatgtccgataccggtacttacttccagaccggcgccggctgtgataccataatcaaatttattctccacctctttaccgtgttccggtcttgttgtagaagtagtccagtttatcttttcgttgtcacccaggaaaaagccgatttgtggtcctgcattgaaaaagaccttcactccccggttcaatgcatccttgccgaatgccagatgtgccatgaaagggatttccagataattcatggtgcggctgtaagaattgccggaatcatcttctatcttttcgtcccatccgcgttgtgaatagtttatttccatttgcacgccacacatcatcttgaaatatttctcggacatatatctcatggtaacccccatagacatggtgttcaaggtgttcagtttgattttcgggttgaagctgacggaactcatgttcagaccaccattgatgccgacggcaaaattatgacgttcttcacccaactgtgcagctgccggcaatgcaaagagcaatgccagtacaagcagcccgaagttcttatactttttcattattcaaaatcaagtttaatcagttcaaagtccttggtaaaatgaacgaagaacactttacgattgataaatccaccccagttgtttacgcgttcaaatttaaatccggtctggataggggtgacagccaccttgtccagtttgtcttccagtttgttgccgtattgggacaggcccttcaggaagaaatatcctgtatcgaatcccagcataccatatttagggaatgagttgagcatatccttgctgtaccatttgcggtaagccgatgagaactgaacggcttccggaaataaattgtttgtgtaaaacgaagaatagaaataggtgtccagttcatagaaactggccaaatggtcgttggtataggtctgccattccggatagccgaataactgcatacggtagtcgggattgtcacgggaggtcacaatcagttgtggtaacagttttatcaatgccacgttggtgccggaagtcgggatgaatacattatccatactatggttcatcgcgcctttcaatgattccggagtaatattttccccttttaattcggtaaaaggaatgcgtttggtttttaactcctctttcagtccttttataaaatccactttgtctttgtcaccatcttctgcatccaggaagataacattggcggttgtaaacttgcgggtaaaatgctcgtaaacttccgagtacagataagattggggagtatttatctgatagatggcgggattgctgaaaacttcattccctttggaggtaaaaggtactaccagccggatattgtttttcttggcgaattccgcaaccggtttcacctggtcgggataagccgggccgaagataatatccatgctcttcaattcacttctatccagaatgttcttgatggaagaagtattgttatgggtatcgtatgagtacaggtcgatggatactcctttttccttcaagctgtctactgccatcaggaagccttcatagtattccaccatacgtgtctgttcgtcacggttgcccttgccgtctgtcatgaatggcagcattacggcagctttgatggtagatattttgcgtgcctccttcttgctttcattaaacagctggtcgtccgtggggattacggcaggcgtattatccacaggcgtttcagtctttgtatccttaggatatggaatacaaaggaactttccttttttcagtttttcggtacgcagttcaggattggcggcaatcagttcggcttctgtaatgccatacaggcggctgatgctgaatatcgtttccttgcgttccactttatgcatatccctgcaattgggtttcagtggggtggaagtggtgaccggcttggtagtctgtgcggctttcacctcgttcatgattatctcctcgctgtccgtcaccttggcgggaattacgataacctgtccgatacggaaattctccgcgctcagtccgggatttgcctggcagatgcgttgtgcggttactccatagcgttgtgtcagcttgtacaaggtttcacccgactggatggtatggaacatctgctgttccgttccgatgttcttttgtggaatcttcaatgtttcaccggttttaattttctggtcgctgccggggttcattttaacgatatcaccggtagtgacattatacatgctggctatggaataaagactttgccctttggtaatggtgtgcaggaaatagccggaagactgtgtttgagccatcattccggtgctgctggcagacaaggctgcgataagatataatgctcgaataaatttcatttgcagtgtgttgattaaactgagtggcaaaagtacaaaaaaaactgttttattcacattatatagaaagaatagaaaatattattaggctttttaattaaatatttcgtcgggaagcattaattttgcaaagattacgcagagtaagaagattatgagtgaagaaaaagaactgattaatgtatacggtgcccgtgtacataacttgaaagatatagatgttgaaattccacggaacagcctgacggtgataaccggattgagcggaagcggtaaatcgtctttggcattcgataccatcttcgccgaagggcagcggagatacattgagaccttttccgcatatgcccgtaatttcctgggagggttggagcgcccggatgtggataagattacaggactcagcccggtaatttccatcgaacagaaaacgacgaacaagaatccccgctctaccgtggggactacgacagagatatacgattatctccgtttgctctatgcccgtgcaggggttgcttattcttatctttcgggagagaaaatggtgaaatataccgaagaacagatcatcggtctgattcaccgggattatcagggtaagaagatattcatgcttgcccccttggtacgtacccgcaaggggcattacaaagaacttttcgaacaagtgcgcaagaaaggttatctgtatgtccgcgtggacggcgaggtgcgcgaaattgtacacggcatgaagctggaccgttacaagaaccatgatatcgaagtcgtgatagacaagctggtcgtatcggaaaaggacgacaaacggctgaaacagagtgttgccactgccatgcagcagggtgaggggctgattatgatttatgatgccgatacccgggaggtgcgccattacagtaagcggttgatgtgtcctgtcaccggactgtcttataaagagcctgcccctcataatttctcgtttaactctccgcagggagcctgcccccgttgtaaggggctggggtatgtgaatctgattgatgtggacaaagtgattcccgacaggaatctttccatttacgaaggagccatcgctcctttgggcaaatataaaaatgccatgattttctggcagatagaggccctgcttgaaaaatatgattttacgatcaagacaccggtcaaggatatgccggatgatgcgatagacgaaatactctatggctcggatgagcgtatcaagataaagagcaccttgattcatacctcttccgattactttgtaacttatgaagggattgtgaagtacatccagatgatgcaggagaaagatgcatcggccactgctcagaagtgggcggaacagtttgccaagaccgatgtttgtcccgaatgcaagggcgcgcgcctgaacaaggaggcgttgcatttccgtatccacgacaagaacatctatgaactggcaagcatggatatcaacgaactgtatgactggctgcaacaggtcgatccttttctggaagacaagcagcgcatgattgccgccgagattttgaaggagatccgtacccgtcttaagtttctgttggatgtgggactggattatctttcactgaaccgcacctcggtatccctttcgggaggcgagagccagcgcatccgtctggcaactcaaatcggctcccagctggtgaacgtgctttatattctggatgaaccgagtatcggattacaccaacgggacaacctccgccttatcaactccttgaagaagttgcgtgacacaggtaactctgtcatcgtggtggagcatgacaaggatatgatgctggcggcggactatgtggttgatatgggaccgaaggcgggccgtttgggtggggaagtagtattccaaggaactccgaaacaaatgcttcagacagaaacacttacctctaagtacttaaacggacagatgaagatagagataccggccgaacgccgccccggtaacgggaaatccttatggctgagaggggcgaaaggaaacaacctgaagaatgtggatgtggaatttcctttgggaaaactcatttgcgtcacaggggtgtccggcagtggcaaatccacgctgataaacgataccttgcagcccatcctgtcacagcatttctaccgttctttgcaggaacctctgccctatgacagtgtggagggactggactatatagataaggtggtgaatgtggaccagtcgccgctgggcaggacaccgcgttccaatccggccacctatacaggagtattctcggatatccggaatctgtttgtcggtctgcccgaagcgaagatccgtggctataagccggggcgtttctcgttcaatgtaaccggaggacgctgcgaggcttgcggcggtaacggatacaagaccatcgaaatgaatttcctgcccgatgtgctggtaccttgcgaggtttgtcacggcaaacgatataaccgcgagacgctggaagtgcgctataagggtaaatccatagccgatgtactggacatgaccatcaatcgtgctgtagagttctttgagaatgtgcctcagattctgaataaaatcaaagtgctgcaagaggtggggttaggatatattaaactgggacagccctccaccaccttgtcgggcggagagagccagcgtgtgaaactggctacggaactgtccaagcgtgataccggcaaaacgatgtatattctggatgagcctactaccgggcttcatttcgaagatatccgtgtgctgatgaatgtactgaacaaactggtggagaaaggcaataccgttctggttatcgaacataacctggacgtgatcaaactggcggattacatcatcgatatgggtcccgaaggcggaaggggcggaggacaggtgcttgctgccggaactcctgaggaagtggccggaagcaagaaaggatataccccgaaatttataaaagaagaattggaaaattaaccggcataccagcaatgaaagagaaaatagctaaaaccaacgtagcccgtctgcttgataaggccaagatagcatacgagcttattccatacgaagtagacgagaacgacctcagcgctgttcacgttgccgccagtttgggcgagaacatagaacaagtcttcaagactttggtgcttcatggggataaatccggatattttgtctgtgtcatacccggcgagcacgaggtggatttaaaaatggcggcaaaagtctcaggtaacaagaaatgcgacctgattcccatgaaagagctgcttcccctgacaggatatatccggggaggatgttctcccatcggcatgaaaaagcatttccccacctatatacacgagacttgcaccgcattcccgtacatttatatcagtgccggtatccgcggattacagataaaaatagcggccgatgacctgataaaagaaacgaaagcagagatttgttcccttttcaccgaataaatatgccaaaaagagtcacatttgtggctctttttttttcagatagactaaaagttatatctttgcaaaaaaagaatactaactattaattaaatctttatcaactatgtttgaaggacagcctaaaggcttatacgcattagctctcgccaataccggcgaacgctttggttattacaccatgcttgctattttcactcttttcctgcaagcgaaattcggctttacagccgccacgacgtcaacaatctttgccagtttcctggcaggagtgtatttcatgccgcttatcggaggtatcctggccgataaattcggttatggcaagatggttactaccggtatcgttatcatgtttgccggttatgtgctgctggctatcccgatggcaaccaatatcggattgtattccatgttcggcgctcttgccctgattgctttgggaactggacttttcaagggaaatctgcaagtaatggtaggtaatctgtatgatgctcctgagtatagcgcgaaacgtgataccgctttcagtttgttctatatggcaatcaacatcggtgccctgttcgctccgactgccgctactgccatgaccaactatgtgttgggcaaagcaggcttcagctatgtgccccagataccttctttggcacaccagttcctggacggtacgattaccgccgaaggcgaggccacactgactgccatgcagaccgcacagaatttcacaggaagcatggctgatttctgtactacctatattgataaattgtcagaagcctataactatggtttcggtgtagcttgtatctcactggttgcctctatggctatttatgttattttccgttctacattcaaacatgccgattacaactccaagcaggctaaaccggccaatgtacacgaagaagagctgactcccgcacagaccaaagaacgcatcgtcgctttgttactggtattcgctgtggttattttcttctggatggcattccatcagaacggtcttaccatgaccttcttcgcccgtgactacacggcacatgaggtaaccggtctggatcgccttggcttcagcgtatggaatctggctcttcttattgtaaccgtttatgcaggtttctcactgttccagtccaagacaggcaagggcaaattgatttcaggcgttattgctaccttggctcttgtggttttaggagtcaattatggtactatggaccctacattgcctatccttcctcagattttccaacagtttaaccccttcttcgttgtcgctctgactccggtatcactggcagtattcggttcattggcaaagaaaggaaaagaaccatcagctccgcgtaaaatcggtatcggtatggtgattgccgcagtaggtttcatgttgctggcattcggctcattcggtctgcctactcctgctgaagtagaagccaatggtattgccgagagcgcgttggtttcacccaactggctgatctcgacttatctggtattgacttttgccgaattgttcctgtcaccgatgggtatctcatttgtttccaaggtagctcctcccaagtataaaggcgctatgatgggactttggtttgtggctactgctattggtaactatctggtagctatcatcggttatttgtggggtgatatgcagttgtggatggtatggagtgtattgattgtgtgctgcttgctttcagcattgttcatcttctctatcatgaagaaactggaaaaggttgcgaaataattcccgcctatattatatatgaaagagaagcccgcttaaccaatcagcgggcttctctttttttataaattacagaagaaggatacgaaaacaggaacactcatatcaatcagtattccgtggaatatggccaggggaatcatgtcttttcccgaataacgtgtgatggatggcagcaatacatccatcgagttcactccggcagccgagataggagccagctgtccgaaatatttccgtatgagcggagcaccgagcaatgccatcatctcccggaaaatattggccagtaacgcaatggttcccaattcggtggccagttgtaatccgatagacggttctttgaactgtgtgatcagaatggaggatagtgaataataggcaaagccgctgcccaccgccatacagtcgaatacactccattggcttaatagcagactggccagtgccgagaaaagcaaggttcccgcaatggtagccatcggtaccaggagcattttcagccgtaagcttttaatcagttctttcaatttcttattgctgcctatgctgattcctacttggagcatcagtgcataaagcacatacatggaaacagagtgcatgtcatactggaaattattgacagctccaatcatacatcctgcacaaaaaaatgcgacaacaaccaaactgcctttcattgtttgcctcctttcttaaaaaacagatgaaataccaggaaagaagctagcatactgcccaaaatgcttaatgtagccaatatagccgcctgccatccgaatctgcctaaattgttaatgattaagctgttggagccgatagagattcccaaaacaaacagcagcaggaagatagtgagtgatgtactcttttctattttctgtaaaaactgcaagttgcgcaatacatatcctataccgataccaacaaacataatagatataatagtaaacatagcaatcaatttttttagtaaaacatatacaacccgacggtttcaccgaatgagaaccatcatgcaatatatctttcatcgggcacgtgtgtgggtaggatgaaagttgggtaataaattacgtgtgagtggaaatctaaacaaagccgctgaaccaatgtacatgcacaatgaagtgattacacaggggggtatttcccgatgtaaggtgatgtatgctgtatgtagtctgtaattggttcatatcattgattcatttgcggtgcaaagataatccttttatgtatattttcaaaataaatattcataaatcttcttctgttacctttggacggatatagcgtgtgttttaacataggatcatttattgggaatttatctccgaattctgacgataaaaaatattcattaattgcaggggataagaactttatcttttctggagaattatacttttttcttgaattgaatattctgtgtaagtgtttgtatactagttgtttatatttgtttgagataaaaatgaaaataatgtcataattggtggcaattatctatacaccctattgat

SEQ ID NO: 3948 - DNA, 7821 bp, Unknown
  gut microbiota DNA sequence
aagatacgatgacagagcctcttacaagcttatttatattgtgtaggcaacaccccaaacagtttcttgaatgattttgtgaaataactaggcgtattaaaaccaacctgatcagctatctcagcaatggtaagccctccctctttcaataattcggcagctttacgaagacgtacattcttcacaaaatcagaaggcgagcttccggtgatagatgtaatcttccggtaaagagtagcacggctcatgcacatatccctacttaaatcttctatggaatattcaggattactaaggttcttctcaaccatgtccaatgccttctttattaattgctcatcagatgctgaaatagaattcgcttctacttttccttcttccggcaatggatctatttcatgcctttgctccggattttgttccagtggcagaagagtctgtgcaacaatgggcttccgtaatttcatatacatccggcccaatccccaaacaaccgataaaacaacaagtatataaaacaaatacgcccaacctgtttcataccaagcaggcagacactggatcataaccgtcaatgtactcttactccacagcccgttttcatctgtagcacggacttccagttcaaattccccttttgacaaatcagacaagccgatactatttttccctgccggcaaggccacccaattatcgtttctttgtttataacgataagcatatcttaccttattcgtattcaaatggtcaaaagtagaaaaaaacaattccacatttctttcataaggagacaggcttattttcttttgattatccaccccgatttcagaagtgttattcatttcgacggatgtcaaacgcacaattggctcaggtatcctcctatttttttcattatagtgaggaaaagtcacaattccacctcgtccacccacactcatttctccccgaggacctttatacaatgcctggaaatcttccagatttatccaagaatcagcacaagacatcatagtaaagatatgtgttccgggatgatagaccatcacccgctgtgatgtaagaatccaaagattcccatcgtcatccgactttatatccaaaacagcatcccctgtcaatccacaatcttttgtccgggaaataaaatcactcgtatccggagaataactatacacattgccctgtttagtacccacccaaagatttttgtccggagcgacagtcaataccgaataattttctcctgtatcctttatttgcaaccggctttctccggaaactctccacaaccctctactttcagttgcaaaataaacaactccttcattagacgaaacgatagcatttataaaactaacatcatcacaaactgtagtcaatcggccttcctccaagctataccgaaataaatggtaagtagtccctatccaaagattcccacgacggtcatcatgcaaagcacggatacgctcaccttgtttaatgggtatggcacatacgatggattcaaaaagccggttctccttataccgaattaaaattaccgaatgatcccttaccatatagagtccctctctatccgatggtctctcaaagaaaaaagaaagctccctgtcattcttaacaacagacatacgctctctctggggatcataagcatacagtcccaatttcttttgcctgatccaataataatttttctcttgagaaaactgcataggagacgcgattatccccagattttgctttaccccttccatagacaaaggaagcacttcattaggaagaaaagaaataacgaaagaagaaggataataacctgtcacccataaatttccggattgatcggaaagaatctttgtgaggattttcctgtcagctgataataaacatgagagatctaccttatccaaggatgcatcggccgttattttataggcatataagttatctgccgcagtcacccacaaatatcccttaacagaatcttgtatgatatgatgaagctttcgggtatcggagtcagaatacgcattatccactgtttgcaatctaaacattttgtccacgccctgtgccttggggtcaaaacgtaccataccttttccccaagtagtaacccaataatacggggtgttatgatcttccgtcatgcttgtgggatactcatcataaggccaaggatatgaaataaaagagtcctttaccttatcatagcaaaaaagcccaccttttgcttgagttacccaaactttctttttcttatcctcataaatagaattgacggtattctcttgtcctttccatttaagaatatattttccagttctttcccctgacgcattgtatcgaaacaagtgtctgttagtcgaaatccagatcgtaccatcagatgtcgctgtcattgtagttatagtccaaccctttatcgtttcatcagcaagcgcccttatctcataatctgtttttgacaaaatatagacgccacgcttcgttccaaaccatattttcccttcaccgtcttcagtaatacacgtcacactgttgttttccaagactcccgggttcttgaaatcagaacggaatactttcaccatatatccatcatcacggcacaagcctcccccctcagtgccataccacatatatccttccgaatcctggaagatacaaagcaattctttggtcggcaactgttccgaattaggaaggtttcttactatcatatcaaatgctttgaccggaacggcatttatccgcacagtcaataacaaaataatgattggtaatactatccttcctatgtttttcatatccttcacgcaagtactcctgttaaaaaacaaacgaatacaaagctaggaagaaattcaagaacttgcaacttgtcggtttaattaagtatattaagaatgacttaataaagaatatggctattgaacagacacttttttctattcaacgctcagtccttcaaccggaagctgtacccgccctgttttctcagtaccagtggcttctttccggtcttttttataattctgactgtacatccggccggaatgtcaatagtgctctccccctcggcattcagtttcaagacaatatatccttcctttaccggaattctggaatgaatccacttcaaatggagtaactccggtttaatggtatattcattcggttttaccgaagactgactgaaaccgaccagaccgttcaacgcacccaccactaccggaactccattcgcgccgtgacaaaggctcagcccatacggacggttatagaacaccagctgccgggccctggaggcattcatcataaaattctcaggaaaacgggtatgtccctgatccatccagtcgccgaacacgccatagatatgatcccataactcttttatccgcccggctttggcataagccagaaactcataacccttctcataactgaccacctcataatagttcggcaaattcggcagaacattttcaaagaggttgtcataatgttcttcgggaaagatatcggccagtattccccaatattgggcatgatgcgaaatacgcttgtccacagtcacattgtcattcattgtaccgttgatgaagactttccggtcatcatcccaaaaatgttcaaaaatcttctttttcagattccgggccaacttgcggtatctgtccgccaatgcactctccttccacagatccgcgaaataagctccggtcacataattataatagagcatgatctgggcataggccgccacccctttccgggcaggaccgttataagtggaccatccgggggtataaccgaactgtctgtctccataattgccgtgtacaaaaccattctcatccacgatggaggcataaaaatcaagcaactgaatgatgcggtctttgtattgaagggaagtagtcaagtcaccgaaacgcagatagttctgtttcaggccgaacagggcatgcaacggataatcaggaattcctatatctgatttctgcggatcaagcggcatcagtgctatggaaattccgttttttgacacctgctggtcaccgaaaagataatcccccgccagggtgctgaccagcgcatccatggaccagggaagaaaatcacgcttcaccccgtccagataaaagcggtgcatactagtatgcaatgtcgcactgctcattttgaacaggttgttcacataatcatcatccgtttcaaactgcatctggtgctctaccggccacaatgacgcatcaaaacgaagggaggtaatctcagcccccttgtcgcattccagtgaaacatatcggagagcgcgttccggcaaagtgatggtgcctccttcttctgacaaggtaacaggagccaatggatattgttccagtttcttatcatcccgttccagtgcttcttcgggagtttcgccaacgcgtacggttatagttccctttcctttcgcttgaaaggtcagtgttccaatctcaagatggaaaaagtcgatgaggacataaccattctttccgatactaattccgtctttaccttgcatctcagcattgcgcatggggagtatttgtgaaggtttaatccgggctgtcatatcttgcggagcatccggcagcacgcccggtttattatacatgacggcactctcgggtattgtccaatgctctttatccatgctgacttgccattcatccggattttccagtcccgcccctttcagaatgatacaaggtaatgagtcatccgttgtcacctcaaacaataaagaggatctgcccacgggtaaaataacctgtttaccggaaacagactgttttacaccatttatataaagaataatatccgacggaccctcccagcaaagactactttcctttttcaatcttacctcttttctgaaccaggcatgattgttctttgcaaaaaatttacccggatatcctacattaacgcaacgctcttttgagatacgggcacattgttgctggtagaaagcagccagttgtcccggataccacatatagcgactgttccattcctcctgagattgccggctcacgatggttacattaggatccagagaaggatcgaactcttttgtctgggcataacaacataaagatgctgttataaagatgccaagtaattttaatcttttattcatatatttcctttcattcttttatcgttttcaaccgaagtgtgcctttcaatccagctgaggatattttgaccgtaacattcccagcctcctgatcgcttcggagaataatttgcatccttccctgatacattcgtttggaagttatgccatgaaagagctcatccgtataatgatccccgttatccaatgccaccaatcgtgccgcaccttccatttgtaaagtaagtggctcgttgtagtcccataccggacgaccttttttgtctatgaccgtcacgtttatatattgcaagtccataccgtctgccttccagtccgtcggtgtttccgcctcaatccggagtgccacggcttttccggcagtttcaatacgatgacgcgccacttctttgcccgacttgtcacgggctattgccaccacagagccaccgttgccataaggaacatccttccaataaatcatattacgcaggtttgcccgtgtcgtatcgtttttttgaattcccatgctctgaccgtttaccaacaactctacagaatgtgcattagtgaaggtgaagagtgaccgtctgctgcccggagtatgattccagcactcgttcagcgccatgcgccccactatcacatcattccaactgacgctttccgctcccgccgcatcgaccactccgatatgtacttcaggaatctccggcatgaaagccgttttaataagataggcctggggataggggcgcatggtatgctcaaagaaggagtagttccaccctttcttaggccatttattggattccccccaatactcgaccgaaccccaataggcgataccgaccatccgctctttatccatattataataaggctgcaacaagttgctggtttcagcctcactctggaacaggataaggtccggccggtatttcaaataagcgtcatatttgtccgactggtaattgaacgatgccacttctgtggcacaagccagttcaggcggtactaaatagtcgttgaactccttgtcgtgccgggttatagctcccgcacgggcggggaacatggctacagtggtgagacgtgtatgatcccatctctttaccagctggttgaatatgttataggtagtgattccccagtcgttggttccttcgaaacctgcccatccttcacgaatctgaagttcgtttcccaagctccacaaaatgatggacggacggttacggtcgcgtttgatccattctgtaatcagtttgtgccagatatgggtgaatggctggcgtccgccccaatagtcattgtcactccatttgtccgtcagttcgtccaccaccagtatccccacacggtctgcaatgcgggcaaaactgtcactgtacggattatgtgagcagcggatacagttgtaaccgaaggatttgagttgcagcatcatgcgttcgatggccttgtcgtaacaggtggctcccagtgcacccagatcatgatggttggcattgccctgcaagaatatcttcttcccgttgagtttgaagccgaactccggtgagaattccagactgcggataccgaactgttcggtcaggctgtccaccaccataccgtctgccgtcaccaccacttcggcattgtagagctgtggggactcacatgaccaaagttgcggattctccagagtaagcgccggtaacttcacttccgtgcaggtctggtgcgtatgttcgggcataccggattgcacggagcccactatgacacctttcggattgcggagggtggtccgtatccgtacatcatgcttctgccagccgtccacctcaacctgtacggctaccgttgctcgggaggaggaaacttcgggggtggtgatatacaccccgtggcgggcgatgtgtgtgggattctgcacctgcagatacacatcacggaacagaccgcctcccgtgtaccagcgtgagcctttcttgggaccggtggaggcataaacggctaccacgttttctccgtcgtgacgtagaaaaggggtaaggtccgcttcaagccccacatatccataatctgtcgaggctatttttgtaccgttcagatagacatcgcccagataaatgatacctccgaaatccagaaccacccgtttccctttccacgacggatcggtagggaaagacttgcggtaccatccttcgcacatgggtttaaatccgcgtgcacctccaccattttcagtccaaggttgttcgaactggaaatcatgaggaaggtccagtgtacgccaggaagagtcatccaagacaggtgaggcgaaatcggtatttttattctcgtttgtaaccaactggaatttccagccaaagttaaaaaggactttctgctgtgatgcaaaattttccaaaggtacattgaccagaggagctttttcctgtgctttctgatattgggctgttactccgacaggagcaagcatcaagaagaaagcgataatgatgtttttcatttgatacattattataaagaatgaacaccgatttgtgtcggctcgtttattatgcaaatatcggaattataaagagttgcagacatggaatttagttgcaatacctgtattatcgtacaaaaaatacatacaatggctactcttttct

SEQ ID NO: 3949 - DNA, 575 bp, Unknown
  gut microbiota DNA sequence
cgtacgccgatgccgttaggctccgtcagctgtttgatgatacccggcgaaggcatgaagttgttctccgtgtcttccgcacagatacgacattcgatggcatgaccgcgctgatacagctcttcctgtttcaaatgcagcacttcatcattggcaatgcggatctgctctttcaccaagtccacgcccaccacttcttcggtaatgggatgctccacctggagacgggtattcatctccagaaaatagaaattgcggttcttgtccaccagaaactcgatagtcccggctcccgaatagttcactgccctggcagcagccaccgccttttcccccatctcctgacggagttccggagtaaggaacggagacgggctctcctctacaatcttttggttgcgacgctgaacagaacactcgcggtcaaacagatggattacattgccatgattgtcacccagtatttgaaattctatatgatggggttcctccacaaatttttccagataaaccgtatcatccccgaaagaagacatggactcggaacgggcggtgttatatgcctccaccacttc

SEQ ID NO: 3950 - DNA, 7456 bp, Unknown
  gut microbiota DNA sequence
ccggaagactgctgtcatccggcctgtcagatgacctgaaaacgttgttgaaagaagccgtactgaccggctacgatttacagaaggatgattttgatgaggattaaacgatcaagcatgaaacagaacaatgacataccggataaaaccatggaacgtatccgcaagctgatgcgtctgaaggagtccaccacttccgaaggtgaggcacgggaaaccgccctaacatgctgccatgacgcgcttattgacaagtacctggaaaaaataggagccggcacttcaaaggcacatccgagaaagaccggaaccgaccgctccgcgtattactcaggcatgggtgacggcaggaacatcagtctgaaccggcagataaaaggaggtggtatatgacagtattgtggatatcatttgcggccctgtatgcactgggcatgctgtggcttgcgtatcagatcaggaccgcccccagtgatctggatttatggggcgaggaaatagaataaaccgttaaaatcataatagtatgtactttatacattatatacagacttatgcgtcggtcaataggaaaggcagcgagctccagagccatatcctgaagtttaaggactgcctgctcaaggaccggaacgcactggatgatctgaaagaggagattcattgccggatagaagaactggatgccaggtatccgcgtacccaacccctgcatttcgatgcgggaaacgattccggaaggtggtacatccatgtgaaaggaaagccggacaatcttgtatgcatcatctccattgcaaaagtgaggaacctgctgggaaaaggcacagtttcctttcccgggaaagacaaggacggagagaaaggatgaggaacacatactggtttgccgtggactataacggtacgggacatcttttcacctgtcctcccgaaagggacacggggatgtggaccggcgaggaagccctttacatccccaaaggacagttcggagagatgtttccgcgaatcacctggcaggacgcgccggtggtggtgaccctggaggtgcttccctgcgtggagacccggcggctgcgtcttgtcaagcgctgcctccatcttctgcggaggcataccggcaggaatcagtcaaaggatatggaggattcacaataactccccctgatggtagatgtattaagaaagttgaagctattaaattggatttaatacaataagacctatggaagcattaacggcattacaatgagcaaaagagggttatgtacctaacgctgatgcggtaggtgaagaacgttggactaattgttttcacgggcagaaagcaacatactacaaagacaacgaagttcacaaagactctgaaactgcaaaggacatgcttagagctaaacgaaaagagcacaaaaaagcatcagataaaagggacgagaagcgaaaaaaaaacatggcttatcgagagaacatgaaaacagaatggcagtggctccaggaaggtaggataccgaatccgaatgcacggtgggaatatggcgagattctgaacaatacattcaacgtgtgcagttacggcagcaaatattgctattgtcatattgatgaaacacatatacccaaagatagtgaagagctacagaaagccatttttgattttcaacggaaatagctggatatgactataaacgatatagaaaggaatgaattatgaataaaagaacaattcaaatagatgttatcggtacgatagaagaaactgaattaatgaaatgtaaattgtatgttgatggtcgtgtgtgtgtaatcggaatgtcacgatatgactatgaagagttaatgcgagaaaaagtgtttatccgggatggtaagagcgttgattctgctggtgtgataaacacgactaacactttcgttgaagatgattaatattaaattaagaatgagtatagaacaaattatattcaaccttctcaataagaacgctcatacatgggttagatattggcaacaaaaggagatgtcaggtttaacaatgcccggagaatatattgagataaggacttttttcttatcaggcatcgaactttctgattttttagaagccggattcaaaatcaataaaatacaatctcaaaaaatagatgcagatgcctattgtgacattctgctaaataaaaccgattaaaaatggaaatacaaggaaaagttatcgccgtacttcccataaaggatggggtcggcaaaacttccggcaacgagtggaagagccgggagtttgtcctcgagacggaggaaagcagaccgcagagcctgtgcctgcagctgatgaacgccaacatcgaccggtatgcggttgaagccggccagactgtgcatgtgaaatttgactgttccgcccgccagtgggagaaccggtggttcaataccctgacggcctgggaggtgaccgtcatcaaagcaaaggaggcatgagaatgaatacgggaaaaaagctgtttctgtgtgcgggactgctggcattcttcctgtcggtatcggcacagtcctactcattgcgtaccaatgtgatcggtctggcaacgaccaacctgaatctggaggcttccatgacgctgaaccgtaaatggtcactgcacctgcccgtgcagtacaacccgttcaagttcggccgcaaccggcagttccgcaatttctatgcggcccccggagtacgctactggctgctggaaagctacatgggcggattcatcggcatgtacggtacggccggcacctacagcgtggggaacctattcggcaacaagtaccgctacgagggggaaggctacggagtaggtttaagtatcgggaaggcctaccagataggcaggcgctggaaccttgaatgggaagccggtgcgggtgccgtatggctggcttatgacaaatatctgtgcaaacgctgcggggaccttgtcggacaggagtacggctggcattttcttccgacccgtgcagctctcaatgtcgtgtatcttttttaagcgggaaggatgaggactacaaaacgtatcataccgtttgcactgctctcgggcctgctcctttcctgcggatcggagcaccgtctggcacgcgtgcgcatttcgcagcccggggtgagggaggcgacaacggatacggcctgcaaggtgccggaacagatagcatggacagacgacaagggtgagcggcatatcgtcacgcgggccgagaaagacagcgtgaccggtgaggagatcacttccgtggaactgtccgaaattaccgttatggccagaagcaagcaggtggctgaacgcaacgggaagataaacctggattttgtcgtaacggttccgggagaattggtcagcaacaagtggcaactccagctggccccggtggcctacaagccttcggatacgttatacctggacaggatcttcctttcaggggctgactttgccaagatgcagaaaagaggctatatgcgctaccaggcgttcatcaactccattatacccgacagcctgtacctgcagaaactgttcgatgggaaaggctacaggaaggcgctggccgaactggaagaggaatacttccaggcctggaagcacgaggtgctgcagaaagaacgctggattgactggtcggacaaggccaatgcccggtttgccctgttcaactggcgtgtcgagcagaaccggagagccatcgccggctacaattcaatcctggagcatcttcccgcctactggatgaccagggagcttgaagggaaatatatcccttccagatggaggatgtttgccgaaggcggatataagatccgtacccggagcatctcccctgaagattccgccgtcatcacgaggcgtttcaccgattacggcaagatggcggagaaccagaagagaaaggaacaggccggtgccatgtatgacaaatatgtgcgttttccgtatgagccggcccgtctggatacggtcatccgggaagggaacaagttcgtctattactacaagcaggagctcccggccacggaaaacacgaaaaggatagatctgacgcttgacggactgatcctttccaaggacgagacacgtaccccgcttccgccgtcggacacgatcacctatttcatatcgagcatggtgcagttccttgaccggactccccgctataaaaagaagattgtcacccgcaaggacgaggtaagcctgcgcgcatacgtggcctataagacaggcagtaccgagttccgggaggaaaccggaaacaacaggtcggaaatcgacaaggtgttcaaggcgatacggagcataaactatacaggagagttcctcatagacagcgtgctgatgaccgcgacctcatctccggagggtgatgcggggatgaatctgttcctgtccaggggacgtgcgacggaactgaagaagtaccttgcaagacgtacggaggatgcggaaggcgttgacaccatcttccgccctgcatggcggggggaagactgggaaaggctgcgcggacttgtcgcaaaagacgacaccctgagacaccggccggaactgctccggatcatggaggaaacaaggaatccggacatccgtgagcacgccctgagaaaatatccggaggattacaggagaatccgggaaaagcattatcctctcctgcgcggagtggaattcctgttccatctccaccggcgggacatgattcaggacacggttgtgatgccggtcatcgacagcacctatatggctgccgtgcggatgatagaggacaggaggtacaaacaggctcttgccctgctggacgagcactacccggcagactataataccgctgtctgcctcatgtcgctcggctatgacgcccgtgcgcttgagatcatgcgggaacagcgggacacatcagaccggaactacctgctcgccatcctgtacagccgcctggggcgcaaggaggatgccgtcaagtcatatgtcaggtcatgcgaccaggatgccggcaagatatggcgcggacggctggaccccgaaataaacacgcttattgaaacttataatttatacaaagatgaatattgacagaaaagtactggtacttgcgtcattccccgcaataatgctcggcggctgcaatttcaatgaggacttctgcatccgggaaggagaacttgtagcctggtgcgatttcagcggaataaaggaaaagccgcctgtcccccaagaaagacacgtcatccctttcggaacggatgtgccgtattccgaaggaacaacgttcacacaggatacactccgctggagcctgccccagggggcatacaggttcctgttctatacggggaactatgaactgctggacaggaatgactatcatgagacgcgtctgtccgtccggactgacaccattgacggggaggcgcacatttcagaggtacagaaattctgctgttcctcggccttcagtgaaaggcttgaataccggaatcccaaacgggtaaggatacagcctgcggcttttgtccagaaactgaacataaagattaacgtgtccggcaacaccgtaccgttgtccggcttgaactgtaccctttcgggaatctctacggccaggtatctggcctcccgtgaaaggaccggaaccgcaagtgcgaccgcctccttcgcaaagaaggccgacaatgtatggacggcgggcctttatgtgttcggattcagtccggcggcagagaacattcttgccgtagaggttctgatgaaggaggaggactccgtattcaatgaacggcagtcagttgacctgaccccgtatctgcggggattcgacggtgacgagatctcgctggagctggacctgcacatcggcagggaactggagattggcgggccggtcatcatcccggactgggaggacacccccgaaacggaatttccataagactataattataacaaaaccaaatcaacaagaaaaatgaaaacaagaattatgatttcggcagcggtaattgccgccgggatgctggcttcatgcagcaacaaggaaatagtggacgaacaaccggaaacagacggggtttcagcctccgtactgaatattgtgccgacagtcggcacggacacgagggccggcttcgtgccgaaaaccgaatgggcggtaaatgacgccatggggctgttcatgtacaaggccaccggatggggggacgcctatccgcgttatgacgcgcagaacaacaagtccacaaaaacagcggccggatggagccaggcaaaacccgtctatcttctttcggacaaggcgacgatatgggcgtattacccatacaaccaggccgtcgctgacggtaccaaagtccccgttcccatcaatgcgggaacctctgtcgactacatgtggggaaagagcacaaaccaggtgtcggtcattgaaacggatgccgtcattcccatgaaacatgcattgtcccagctcgtcatccgtctgaaagtttctccggaatatcataatgacggcaacctgacatccgcgaaactgaaatccaaggcggccaagttcggaacctcggggacaatgaacctgaacgacaacggaaggatcatcttctccccgacatccacggaactctcatggactcccaacacgaccattccggcacaggggaacccgtcggtagacttcgccgccgcaatctatcccatgagcctggcatccggagaagtcagcatggaggtcgtcatcgacggggcaacctatacctattccattccccagataagctgggaagccggaaagagatatatctattcgataacgatgcgctccaatgacgcggaaatcggaggcgagaacggacagtccgtaaccatcgagccatggggttcaagcgaatccgacgtaacgcttgtaccggtcaaataaattacagaacaacaggggactccggtccccgtcctaaaaaaacaatcatggtaaaatcaataacaacgataatctgcggcttccttgtcctgctgtccgtatcctcctgccggaaggaacaggaggagccatgcccggaaaacggccgtgtcacctttaccgtcgcccaaacgcgtgccacccaggaaggcacgttcgaaaagggaaactccataggcgtatttgccatcgagcccaagaccggcgtgtactgggccacaaataacaaatacacctatgacggccgggcattcaaacccgcaacggaagaggacaacatcattgtgacggtggggaccgatcttgacttctatgtatattatcctttcaaggaggggcagacagacatcaccgccatatcccatgccataggagaccagcaggacaagtccggatggctttcagccgatttcctgacagcgtcctatacggacgtaatacaggactatacgataccgctgcatttcgagcaccggct

SEQ ID NO: 3951 - DNA, 9495 bp, Unknown
  gut microbiota DNA sequence
gaataagttggatctgtcccgttgtcttatgtttcggactgacccgttttcaaactgagccgccggataccctgcacaaagcagggctaccaaataaaaaagccatcgatttatcgatggcttttttatttggtagcccgtgggggaatcgaacccccctttcaagaatgaaaatcttgcgtcctaaccgatagacgaacgggccatcctttttatcgaggatttctctctcgattgcgggtgcaaaggtagtgactttttttgaatttgcaaacatttcccaaacttttttctaaactttttgttcatagtccattgaattgactatttacctaaacttaacttttatgaaaagtatctttaaatcaatgagttgccttgtattgggcgcaatgattgttacgccgatgtttgcgcaacaaaaaaaactttatccggagttggaaggaccgggacctgctgttattatctcaaaagataaaaatggcaaggaagaattaatcaatgtatttgaagaaacgcaacgtccgcatttccatgatccccgtgctcctcgttttttacttactgaccaacagggaaagtttgcattgggtatcggtggttatttgaaaactacaatggaatatgattttaatgggatagtggatgacgttgactttatccctgcactcattccgcaaccgggatccacgtctgtccgtaatcagttccagatggatgcaagcacttccactatctttttaaagttggtggggagaaccaagcatttgggtaacttcatcgtttatacagccggaaacttccgtggaagtggaaagacttttgaattgcagaatgcttatttatccttcctgggctttactatggggtatgataccggattgtttatggaccttgccgcagctcctccgactattgattttcaaggacctgacgggatgactttctatcgcgccacccagttgcgttatgaagccaatgtgatgaaaggtttgaaagtgggtgtcggtgtggaaatgccgtcagtagacggtactccggcacaagatgtgagaatcggtaagcagcggatgccggatattcctgcctatgtacagtattcttgggcaaaggctagtcatatacgtgtgggaggaatcttgagaagtatgacttatgaggatcaagtgaataataaggcaaagtcattgaccggttgggggatacaggcatcggggacagcaagactgggtggtttccagctttacggacaatatacttatggtagaggtattgctcaatatttgaatgatatcagcaacttgaatgtagatatcgttcctttggccgatgagtccggacgtatgcaggtactgcccatgaaaggatggtatgccggattacagtataatttctcgaaacgggtattcgcatcggctacgtatagccagtcacgtctgtttacagaagattgctatgctcactttaatgaaactcagtataaaaaaggtcagtacctggttgcaaatgtattctggaatgtaagtcataacttgcaggtaggtgcagaatatcttcatggttggagagagaattttaatgatgtgaaccgtgaagcaaaccgtataaacttgagtgcgcaatataatttctaacttatttttcctatctttgtgtctatcaataatggaaagagaatgaaaaaaataggtgcacatgtatccgtaagcgggggcgtggaaatggcccccgttaatgcattagggataggagcggacgcattcgctctttttacaaagaatcagaggcaatgggttgcaaaacctttgtctgtcgagagtgttactctgtttaaagaaaactgtgagaaagaaggttttgatgcccggtatgttcttccccatgatagttatctgataaatttgggacatcctgacgaggaagggctggagaagagtcgtgcagcatttttggacgaaatgcagcgttgcgagcttttaggattgaaaatgctgaattttcatcccggaagtcatttgaacaagatatccatagagaagtgtctggacaggattgccgagtctgtcaatatgactttggataagacgaccggtgtgactgctgtgattgagaatacagccggacagggaagtaatgtgggaaatgaattctggcatttgagatatattatagataaggtggaggataaatctcgtgtgggagtttgcctggatacttgccatacctataccgccggttatgatattgtgaatgaatatgaccgggtctttaccgagtttgatgaggtagtggggagaaactatttgtgtgccattcacttgaatgactcaaagaaaccattgggtagccgggtagaccgtcatgacagtatcggaaaggggctgattggtattgatttcttccgccgctttatgcaggattcccgttttgacgatatgcccgttattcttgaaactcccgatgacaccatttggcgggacgagattaaaatgcttcgcagctttgaaccatagtttgtggctggatgaaaacatatttaaggaattcagctatcattttgcttgtaagagcgaggcttgctcgcccgaaaataggctgatttgcatattctcccaagatcgtgcccgttggttcgggcaggcaaaaaaacttatattcgtcaatctgagttggcaaatagtattttcaccaccgtaggggcaggcccgtgtatctgcctgatagtacgaaagcagttgcaggttctctttccaaagtatgaccgaccgtggtcttgtaagcagcttcttgacgataaagtcgggagagaagcggaactctggaagagcctgcagactgttatttaaaacttataaaatgaagaaaccgacccttttggatcggtgttctacggtagatgttttccctttgcttgacggctatgaggcaatccctgcccctacagctgaatacatgacagcactatcggactttcggcatctcctcatttacttgaaatccgggccatactccaaccaaaataccattgcccaatcctggtcattggcaaacgggtcataaagatgagctttttgtccgttcactttgtccggatagataaaggcgcagcttcctcttccgtcttcggtgaagaggcatagattgttccggaaaatattcaaggcccgttctgcatattcttgttttccggtcgctttggcataaagacggaaggcaatacccgataaagtgctccagtaatgtgggaaggtatctccccaaatccggtcttttccaaaccaataaccatcccagtgacgaatagcgatgtcataaaggtggaaactgggctgttttccgccaaatgattctaataaaggaagctggctttcggcccctttcagatatttttcatctccggtgagcatatatacattcagcagatggataatggacggagctacgatgctctgttcgtaattgacttcggaggtcggataattaggcccgttttcacaaaatacgtctgccattgatttgaaatcgttcagcagagtgtccgcttcggcagtaaatccgttttctttcaatagagtatagccgtaggtcgggatattgatgcaataaaaaccatgcttgaaataacggaccagtgcacgcagtgtgccgtacccgtctttcagatattgtttattgcctgtggtgcggaacatggtaaaccagaaatcggccacccacggatagttgtatccccggttcttgctcttgaagtctacggtggaattggttgtgtagtccggtttctggatgcggcggatgaaagatacgtagttgttcagggcatccattaattttttgtcggaagtacgttggtattgtagagccagcagaatccccatagccaccctttctctggcttcgtcgcagtcagagcgtttgctgccattttctccgttgatgtaaagggattcggtatcgttgtcataaacaatgaaggcaccgcttctagggtcaccgggcttgatgaactgttggtgtccggcaatgaactgacaccggtggttgaccaggctgtcaaagttgctgacggcaagacactctaccgatgtttgctttccgttcccgtaggccagtgtgaaaatcttctctccgggttcatttattgtggtggtataagtgatgttgtcaccgcttacttctgccacttctttaccgttcagcaacagcttgcctttcagtgaggggcagttgcttttgaacgaaacatttattttttcgcctgcttctactacataacggtctgctgaggctatgatcagaccgttgtctatggcttttgcttggaattcatcccagttgtccgccgataggagtaaccattgtatggtataacattctcccggctttaaagtcttgtcctgtggattaagttggaaaacaccgcggaagttggagcttccgtttttctgcgagcgctccctcacttcatagcctttaatggcaccttcttccataatcagtcccaatccgccgggggctccgctcatccgggtgcaatagacataggcttcatttcctcctgcccatatatgtgcattgcaacgggcttcgtagcaagtccgggcatccggataattgtcattgaaaggtgtgttgatggcaatatcctgtaagtcggcgtctttttctccggtgtttacgaattcgtaggattctaccaggttcccgtccctgttccattttcgggctacgtttatttctatgtcacctgtctggtatttcacggtcatgtgatggctcgtgtcatgtttttttgtcgggatattccaggagtattcagtgccgtttatccgaagatgtcccaatccccatctatagcgggagtccacccattcgtattgtgttccatccgtacgcaggatccagttcatggaagtgtcgcttgtcagataaagtccgcttagcgcccctgtttgtgagtcggctttgaacgtgatgtttttagggtagctacaactgcctagtgcaattaatgccaaaggtaatgcagcatacaagaaaagcttcatgatgtttttcatacttattgggattattgatgtaactgtgcaaagaaaggaataaaaagggaaattaatttgtacttttcatacataatcctgtaaaatagttcattttctttataaacaggcttgaagtgcctgttattttgtggttttgaatcattttttaggtgcgggttgtgcgggataacgcggattttttcttatgataacatgagtttattataagactagcttataactgacaggaatatgagcaagactgatattgaattttaataatccttttgtcatttaactcaaaaccatcctgtaacgagttatttcttatatcgaacttatgttaatgttatatcccgccggtagagtggtttgtgtctttcattgtatggttaagccttttctatcctatccctaagcttaaacgaacgtatcctttctatctccatagcctttggagttaactcccaagcttatggagataactccaaaggctatggagttaactccgcaagtttgggagatagaagttgtcagtaaaagaacctttaacctgaaggatacaaccgcttagcttgccgtagtttataggataatatatcctttccgtatccttcgtttattttatgtcctgattacatgtcttttatttcatccaagttcttctggatatcttcgtcttttaactcataattcatcaagttacctgccaggtattggtcgtatgaggccatatcaatcagcccgtgacctgaaaggttgaacaggatcactttctcttcaccggattccttgcacttgttcgcctcgcgtacagcggcggcgatggcatggcacgattcgggagccggaatgattccttctgcttgtgcgaacaaacaaccagactggaaggattctaattgctggatatcaaccgcttccatcagattgtctttcaataattgtgaaacgatgacacctgcaccgtgataacggagacctcccgcatggatattggccggagagaaattatgccccagtgtaaacatgggcagcaacggggtatatccggcttcgtcgccaaagtcatactggaatttaccacgggtcagtttcggacacgaagccggttcggcagcaatgtatcgggtttgtttcccattcaggatagtgtggcgcataaaggggaagcagattcctccaaaattggaaccgccaccaaagcaaccgataatcatgtcgggatattcgcctgccatttccatttgcttttcggcttccagaccgataaccgtttgatgcagtgtgacatggcttaataccgaccctagtgtatatttacagttgggagtgctcattgccagttcgatagcttcggagatggctgttcccagtgaaccttgataattgggattacgggtaatgatatccttgccggcacgggtagacatggatggagaggcggtgaccgttgctccgaatgtctgcatgatgctgcggcgatagggcttctgattatagctgatctttacttgataaacggcagcttccagcccgaatacctttgcggcatacgatagagcggcgccccattgtccggcaccggtttctgtagtgacattggttacgccttcttccttgcaataatatgcctgggccagagccgagttcagtttgtgggagccgatggggctgacactttcatttttgaaataaatatgtgcgggagtccctagtgctttttccagtccgtaggcacgtaccaatggtgtgctgcgatagtatttgtacatttcacgcactgcttcgggaatttcaatccatgcgtctgtctggtttaattcctgtttgcaaagttctttggcaaaaatggggtagaggtcttccggtttcagcgcttctttggttttagggttcaacggcggcatgggtttggtcttcatgtctgcctgtatgttgtaccagtatttaggaatttcatcctctggtaagataaaacgtttctgttttgtgctcataatctttcaatttaatagttttgcggtcaaaattaggtaaaaaaagtattccttactaattttcaactgcttttttgtcgggaacaataaaaaaagggatgtcagagtaaaaatgcgaagttatttgttattataggcagagatgtgaatattttgattaagtttgttttctgttaatgcaagatgatatcgacatggaacctttacacaaactatttatctatcgtaagaagttagtaaaaccgtacatagagcgattgctgaaatggatggacgggataacttatatgatgtcggccttgttcatccttacattggtttatgagcatggatttcttatttcttttgaagaaatggagatgataaacacgctgtatcattttgtctggattgtttttctggttgatatttccctgcatcttttattaaattactcggataccaagcggaagtaccggggactggcatggatactgagtctgatgctttatctgactttgattccggttattttccatgaaccggaggtgcaaggaggaattcatgatttctggtcttttttccacagtcgtttatatcatgtggtgctgctcactttgctttcgctgctgcaattgtctaatgggatagtccggctgctgggcaggcgcaccaacccgtctttgatctttgcatccagttttctcatatttattctgataggggcagcgttactgatgcttccgcgtgccacttatcatggcatttcctttatcgatgctctgtttaccgctaccagtgccatttgtgtcacggggttggtttcggtcgatgtctcttctacattcacgtccgaggggttgttcatcattatcatgctgatacaaatcggcggtttgggagtcatgaccctgaccagtttctttgccatgttttttatggggaatacttcgctctacaatcagttggtggtccgtgatatggtaagctcgcagtcactcagttcgctgctttccaccttattatatatattagggtttaccttggtgatagaggctgctgggatgggggttatttttttaagtatacatggcactatgggcatggatattgaggaagaactggctttttctgctttccattccatttctgccttttgcaatgccggattctctactttgtatggaaacttaggtaacgaactggtacttcataatcataacttgctatatatcactatctctttcctggttattttgggaggtataggtttcccgattctagtaaatctgtatgaaacggtttcttatgaaagcaagcgcttgtatcaccgttatgtcaaaaagaataagaggacaatccgtaaaatacatttatataacctgaatacccgtatcgtattgattatgacggctatcttgctagtgacgggtactgtggccattgttgttttcgaatggaatcatgcttttgcgggaatgacggctacagagaaatgggtgcagggcttctttaacgcaacttgtccccgtacggcaggattttcaagtgtgggcatgactactttcagtgtgcagacgttgctgctgatggtggtgctgatgatgattggcggcggtacgcagtctacggccggtggtgtgaaggtgaatgtgtttgctgtagtcatgttgaacttgcgtgctattcttataggtgccgataaagtcaatattttcaacagggagttatctcatgattccatccggcgttctaatgccacattgattctttatctgctgattgttttcgcgggtatcttcggtttaagcattctagagccgcaggcttcagtgatggcgttggtttttgagtgtacttcggcactcagtacggtaggttcaagcctggatctgacacctactttgggaagtgacagcaaactgattgtcattgttctgatgtttatcggacgagtaggggtgcttactttgatatccagccttattaaacagaaaaaaataacaaaatataaatatccgagtgataacatcataatcaactagttatgaaatacattattattggtttaggaaattacggcggagtgttggctgaagagctttccgtattgggacatgaggtgataggagtggatacaaacgagcatcgtgtggatgtgttgaaggacaaaatcgcgacttcttttattattgatgctacggacgaacaatcgctcagtgtgctgccactgaaagatgtggatgtggttattgttgctatcggcgagaattttggtgcttctgtgcgtgtggtggcactgctgaaaaagaaaggagtgaaacatatctatgcccgtgcggtagatgatgtgcataagaccgtgcttgaggcttttaatttagatagtattctgacaccggagaaagaagcggcacggagcttggttcagttgttgtatttagaatctcaaaacaaccaaaaataaccag

SEQ ID NO: 3952 - DNA, 16503 bp, Unknown
  gut microbiota DNA sequence
tctatcagaatattctaaaaattaacacttttcggctgctttttgatgcttcccaaatttccacatatttttgagacgtatttctgacgtggagaatttgcggagcttgttttttgccacatcgtgcggacagttgacaagggtttacaaccgtttacgatgagcgacaacaaccgccctgatatgcagcaatagtaacattgtgcagaaaggcgacaacggttgacctccgtttacatccgttcaccatttcagagatatacgattgaaggaatgaaccagtaaacgataaaagcagcatgaaaacaaccagaaaatgcaatttttgcagcaagtcatttgtaacccggagcggggtacagaaatattgcagcgaggcttgtcaggcggaagccaaacgagctagaacggaacagaagaacaacctcttcaaagctgtccgccccttgatggagatacagcatcaggagtatctcaccttttccaaagcagcagtactcatgggctgttcccgacagtacatctataaactcgtagccctcggcaaactgaaagcctcacgtatcagcaaccgcatggcgtttatccgcaagacagacatcgagcggatgctggagggcaatccctaccaccgtgtcctgcccggcagtacttccactccgagaaagtccgcttcatcttccccgcttgccaaaaaagaaaaaagggaaaaggaaacctatgaagtgctggacttctattctggcgaggaggtgatgtcgctcttcaaggtcaggcagtcgtggctctataccacagccaagcgcaaccgcattcccatctgccgcatcgcagggaaaaactattacagcaagaaacacgttgacgagttcttcggtatggctatagatacaagcaatatcaccgattggctcctgattgaagaagcggaagaactgttcggcatgaaaccctccgcactccgggcatacgcctaccgccacaagataccgaccaaaagagaatacgggcgcacctattactccaaatcccatctggacgaactccgcaggacagacctcgtgaacgatgaacgctactacaccgtggagcaagtccggcagatttacgggctttcctccgccaacatcagccatatcgtcaaggtgaagcacatcgaaaagataaaagtaggcgtgaaaaacctgcttttacgctccgatgtggagcgtgtcatggctgaaagggagaaacaaccgtgagcaaccgacattgccggaaaattatttcaaaatgattgtcgtggaggtattcacggttgtttcacgttgttcctttgccaccgtaaacacgggaacacccccgaaaatgtacaacttaaaacatcatcaatatgagcaaatgcaagacagttaccttgcgcaagcgcaagattaagaacggaacacagtattcgctgtgtctggactattatcccggctaccgtgacaacaccaccatgaaggtgattacacgtgaagctcttgggatttacatcttcgccaaacctgccaaccagcaggagcgtgatttcaacgcacgcatgatgaaaaaagcggagatactgcgtaataggcgttatgaagccatcttcaacgagaacaacggcttctttgacaaagccaagatgaaaggcgatttcctcgcctacttcaaggggttggcagacaggaagaatatcaagtggcagcacgtctataaacatttcgagcggttcgtgaacggcaaatgcacctttgaggaggtggacgtggatttgtgccgcaagttcatggaatatctgcttaacgccccacaatccatacacaccagccaaaagctgcatatcaattctgcggcgggctactggtcggctttccgtgcggtacttcacaccgcctaccgggacaggaagataaaggagaacccaaacggattcttagaccgcatcgagtgcattcccaccatgagggaacatctgagccaagaggaactgatacggcttgccgaaacgccttgtgaggaagaggtattgaaaagggcgttccttttcggttgtctgaccggactaagaaagagcgacatcaggcagctcacttggcagcagatacagccgtacaccaacggcaagatgttcgtgaccacccgtatgcagaagaccaaacagattgtacacaaccccatcagcgatgaagcctacggactgcttggggaacggcacgagggacttatctttgacggtttcaaggacaagatgctgcaaggaccactcaaacgctggctcttggcggcaggcataaccaagaagataacctttcactgcacccggcattcattcggaagcctgcacgtggaaatgggtacggacatggctgtcatccaagcctatctgggacacaagaacattaccaccacgcagatttattccaagatggcggcacagcagatgtgcgaggtcgtggacaagataaccctgaaacgcaaggaagcgtaaggcggttcaaaatccatgatattcagagggagcggttattgtttggagctttaaccgttccttttattttggttggtacttaaagtatgataattgagtatgattccggacatttggtgaaaaacattgaaaaagaaaccactgacaaaggataatgagtaataattgaaagaagactattaaatttgcgaaaacagtaacaagtaacaaccgaataagacaaagaatatggaaccgtccgtaaaagacaaacatatcattttaggatttgtcggctttgccatcctcctaatatcttccatagcgacactgattgtcgctgagaaattcaaccaagacacctttgtaaggctgatagtctttgtgtgcagcaacctgttggggtggctgctctacttctccttccagacagtcattttcgatacatacgaaatctacagaatcaagttcggcaggaaaaagacacctgccgaaatcacagaaattcaggaagaccagtcccaagatgcacacaagcctgtaatatcggcatcaatgccaacaggtggagaagcgaccccggatataaaaccgacagagattgccatatccccggagcttcacgagaagaaccgtgccgattacgaggacagggagcagcgggaaaatgaggagcgcatcgctatggtcatggaatacatccatttcatcatgccccgtattgctgacaaggagaccgtgaaccacatctgtgccgaggtcaacaactggatgcggctccacagttacaagcccaagccgataaaagggcggctgaccaaagatatttcaaacattccgctccgccatttcgtgtggaatatctccgagcgtttcatgtacaagaaatactacacgggggataaccgtgcccgcttcatcagcacccttttcccacgggagtttgccgatacggacatagctaccatcaagaacttcaaggtagagccgttaaagacactgattcccattgacgagcctgaaaacggcagactggatttccattatcctgcggattatgtgcaggagaagcggatttaagcctgttttagagtaatcacgataataacgacaaacagccaaaactcataatcctctgttatacaataattcccgaataactttacccgtcatttgcggttgggcatcgttattcgggaattattttgcaatgacctttcgtggagatattcacggctgtatcattccagtcctttgcgccaagccttacaaaagaggcgagtacgcaaatggaaaaaacagtgattacattcaacgacctcccggagattgtggctcagcttcgggacgaggtgatgagccttagaagcctgcttactgagcagcgcagtgtgaacaacgcaagggcggtggacacccatgtccccatgtcagtggaagaggcggcggaatatctgggcattcccaaaggcacgctctacatgaagctgtcggagggaagcattcccgccaccaagcccggcaaacgatattgcctttacagggacgaactggacaaatggctggaatcctcccggaagaatcccgtacccctgtccgatgaggaactgagcgaatccttatattcttcccaccgccgcaagcccgctccgcgtaattggtaaacgtcatggaagaggacaagaattatatcagtctgatacatggcgacctgacgagggcgacccaagtacagcacgggatgccggacagcatcggcgtgatgagtatcaagaccgccaaccggacgatactcgaagcatcgctgctgcccacgccccgtgcgctctgggacagtttctggtatgagggggaactgtcctgcctctttgcggattccaatgtgggcaagtccatccttgccgtgcagatagccgaccgtatcgcccggactgacgatgtgctgtatctggactttgaactctccgaaaaacagttccagctacgctataccagcgagcatggaacgccatacatctttcctgaaaggctgtaccgggtatcgcttgactgcaattcgttgctggaagccgatttcgaggaagccatcatgggaggcatagaacagatggctctgcaaaccgggtgcaaaatcttcatcgttgacaatcttacctacctgtgctgcgccatggagaaaggcgatgcggcaggacggctgatgatacagctcaacaacctcaaaaagagatacggattgtccgtccttgttctggcacatacacccaaacgctctttggactgttccatcacttccaacgaccttgccggaagcaaacggctctacaatttctttgacagcgtgttcgccatcgggaagagtgcgcaggacggagggcttcgctatgtgaagcagctcaaagtccggtacgggacattctcccacgatgcggacaatgtaatcatctacgagattgagaaggtggacgctttcctgcaattcgtgttcaggggttattcaacggaaaaggaacacctgaagaaactgggtgacaacgaatccagccagagggattgccaaatcctgcaattgtcccagtccggcaagtccgtcagggagatagcctcacaggtgaactgcggcaagtccaccgtcagccggataatccagcgcagcaaggaggacaggaatgcagccgtcccaagtgtcccgctgtcccaacagacaggaagtgggacaatgggacaggtgggacagcatgggacaagcgggacagtaagagaaacaaagcaggcagagttgtttacaggatatgggaaagaggagaataaggcatgaaaaagcagtctgcacatagctgtataaaggataaccgcttcatttacggtacaagggatgatacaggcagaagcctgatgtcccaaggtgtcccggggtgtcccactgtcccaagtcttatagggacgggacaatgggacagcgggacaacaatcgaaaaactcaaaaacaaagacaagccatgagcaactattcgttacagaaatataaaggaacggcaacacggcatacttgcccgaattgcggggacaagcgttctttcacatgttatgtggatgaaagcggtatgctcctgcatccgtctgtcggcaggtgcaatcatgagagcagttgcgggtatcattatactcccaaggagtatttccacgaccaccccgaatgccataccgacaaggggttctcttttgacaggcaaaggtcagaacggaagcccggacagacatcaccaaaagcaagcataggctacataccgccaaagtatgtggagaggtcgcaaagcgtgcacagcaacttcttccgcttcatttcctcgctccttgattcctattacggcagcaaggcaaaggaagtgttgaagcggttgctggaagagtaccgtcttggagcaacccgtgacggggctgtcatcttctggcagatagaccgcacaaacagggtacgcacgggcaaggtgatgcagtacaatccagaggacggacaccgtatcaagggaggagaggtgtcggcagtggactggatacacagcatactgaaaaggcaacgggtactgccggaggattggcaactttcccaatgcctgttcggggaacacctgctgaatgtctatcccgacaaggtagcggtcttggtggaatccgaaaagagtgccgttatcggctctgccctctttcccggttatgtatggctggcgacaggcggcaaaagccagttgagagaggaaaagctccgtgtgctgagcggacgaaccgtgcttctctttcccgatgcggacggatattcggagtggaaacagcatgccagggacatgacctattgcaaggttgtcgtgtctgacatcatagagaagaacgccacaccggaacagaaggcagcccatatcgacatagccgactggattgtcttccagatacgagaaagtaaaataatgtgtacagccaatcatcttgtagaggcggaaaaagtcctccggcggatgatagagaagaaccccgtcctgcaaaagctgatagatgatttcgaccttgtactggtcagtacatccccaatcggcagtggcgatgaaaaccctccttaatggaggagagcggaagccgtaggctgtagcggacagacaagggcttgcccttgatatagcccactataactacacgctccgctttcgtagttgtgggctctcccgaggggctgggcgttgccccgtcccactcagggcgtttcacccctgagaaccccgagcaaagagtgaccctctctttgcaatctcccttatgggcacagcctctaagaaccccatagcggttatgagcgaacagcggcaaacaactttagttaataaccaaatcaacataaaaatggcaacaaaatcaagcatacatatcaagccctgcagagtcacatcaagtggggctcataaccggagaactgccgaatatatgcgcaatatcggcaagtctcaaatctacatcgtacccgaattgactgccggtaacgagcagtggataaacccgggcttcggcaatcccgacctgcaggcgcactatgactacatcaagcggatggtcaaggaaaagacaggacgtgcgatgcaggagaaggaacgtgaacgaaaaggcaagaacgggaaaatcaccaaggtggctggatgctcgccaatccgtgagggcgtgttgctcatcagaccggacacgacactggcagatgtgtgcaagtttggcgaggagtgccagagacgctggggcatcactcctctccagatcttcctgcacaaggacgagggacactggctgaacggtcagccggaagcggaagacagggagagtttcaaagtcggcgaaagatggttcaagccgaattaccatgcccatatcgtttttgactggatgaaccatgacacaggcaagagctgcaagctcaatgacaaggatatgacagaaatgcagaatctggcatccgacatactcctgatggagcgtgggcagtcaaaggctgttacaggcaaggaacatcaggaacgtaacgactttatcattgggaagcagaaggaggaaatgaagcggcttgatgccacgaggcaataccgggaacatgagctggaaatggcgaacaaaaagatgcatgaaacggaaagcattaccaacgcccttatcgaaaaggcaaatgaaaaggaacggcagagtgaagaccttgacagggctatcagcgagaaacgctccagactgaacaaggaaaaaggaagtgaacttctgaacgccgctgtcggctgggctaccgggaaatcgaaagccctgaaaaatgaaatagaggatttgcgctgtgagatttccacgcacgaggaaaccatcgaacggttgcaggataaaatccagaccatacagaacgaccacagccgtgagctgatgcaactggaggccaaacaccggtccgaactgaaccgcaaggaaacggaacatgtacaggaaactacgagactcaagaaccggattgcatggcaaagccatattatcggctgcctcagtttcctgctgctaaaaacaagcgacatcttccgcaaggcggtacacagtatcatccgttttgcccgtgattattacaagtcccgttttgacacggaacaggtatatgacatcaagaacgcccttaacctgttcggggatgacagacaatcacatcaggcggcaggggatttcctgtacttcactgccaggcaaaagggtgaatttgacaaccgggagcaaatcaaagccagacgggaagttgacaatgtggtggaagggaattatgaccagcagcagaaaagaggtttttcgatgaaaagataatacctttatcttataatcctcgcttcaggagtaacgatagaaatcagtgcaggttatttgaatagcaaattaaataatccgccaccgatatcaatacccaatttgttgcctttatactgaaaatacggagctactatcggaagcgttttcgttttatgcaacggaaaatcggtatggcttctgacgccgaaatccatcccccagttgggaatgatgtcataggaaacgaatcccccgtaattcgaggaactgaaaggagaagaaagaatgaaggagtatgaggcaaatgtgtttagacgaattttctcgttgacgggatatgtcaacagcccggacaatcccaatagctgactctcgcgtctggggacactccattttacggtatatgcctgcaagttaaatgaccagcaaccgggagaatatacatatccgatacctgcatagttcattgttcccaagccgatgaagttttcctgcctgcctatgccgtaaaaatagccggaaggatagcttttaatgataccggaggtcgaatattccccctcatgcaaaggcgatttgtcggtagggaatgtcggattatatgggttctgcacgtcaaatgttatctgggacgggcaactgccggaagaaagatcaaccgctttccgtatatccaaaggctttggggtaatgcttctttcgttatgaggcgaagtatttccttcctgaacggaaaccttgacggtgtcacgcgacacttgaaattcctgaccgtaagaagcggctttatttagaaaaaagaaaatcactataaaacaagtaaatactttcctgctcataaaatgataattttaatattcgggacgaacatttggctatatcagagattcgtcccgaatgattggtgaataatccggttcaataaggattacaattgcacagtcattattccgcagttttcttcaccggtaccgcgagtccacatatacaatttcgctccatttgggaaaggattgcccacgatcataatgtcatgaccgcttttcacttctttaccaaattgtacagggccgttaggcgtgtatttccaatagtacgcagtcgtatattccacccagccccataaaacttttttagacgcatttacacggatagcctgttggtttcctcgcataccaatctgtgcggtgaactttcttttcttcgttttcacgtaaaccctgtttataccattttcgatcgttacacccagcgggacaggataaagtaaagaaagttcttttttatatccgtcataattttcaaactccttcatgttctttctctcaccggcgatacatacgaacccttcgggggtcaatgtgattgccttgcttacattcaacaccggcatatatatcgacaaatcggtgctgtccttgtcgttgaatataaaatcagtctggtaagcagtcttaatggattcatattcttccttgcatgtggcgtttaatatctgtcccaaggcttcgctgtgcatcctgtacatggaggtgaagcctttctgtccggattcccattgcagaagttcctcatcggacaacgtgcccaaggaatcgagcaaggcattgtattcctcctcactggaaaaggaaagaatattttcatgcaaacttctggaggccgggaaagaatggttctcctcattcatcggattgttcactatgtcatcagaactacatgatgataagacagccattgccaaagcaagactaaaaagcgtttttctcataattgaaaaaatttaataattggttattatttaaacatgggcacatataatgatatgccgaactctttgttattctttgtattggaggcaaaagcattgtcatacaatggcttgaaaccatgcttgtaggaagcggacaatttcatgccgttcttaaactcatagcctaaggtgaggactatcggaaagtcgaaaacccgcccttccaagttttccttcaatttatcggttttgaaataaccggtgggttcaatgccaataccggcatacagtccggaacagatgcggtaattgattgagccgttcaaagcaagtccccatatccatgccttgtcagaccagggaacaacgttgtttccattcaaatcgaaggactctgcttttccctgaacggcttttcccaatatggaagcatcaatccagaaacggttggaaagatcgaagccaaactggtagcccaaattaaagcctactccgggtgtccatcgggtttcggggtaggaagagttgttcgccgttcccgtactcatgtaagcatatcccgaatattttcccaaatgtccgtccgtcacaccgatgataatgccggatttttgtgcaaagcatcctattcctgccagcaagaaaagcattgataaaattgtctttttcattttttttattattatttagttttcctgtaaattgtctatccatttcgtctggaacatcctgcatcctcccacgacacctatcccgtttatgacattggtgtaagtagagcgtatgggagccagttcagagtttccaagcccgttgtttttctggtcgttcagtgatttcagatacctgtaaaactcttccgaaaggctgtacaggctgattctgtatttcacttggcgtttgatatgttcggttccgtcaggggttatgaagtcgtcttcatagtctgcctcgtaattggtattcagacgaaccgtgtagcttttccctttaattttcgtatcgtcccagtaatacaaattccggtagaacccgttttcaatcatcaggatatcgtctaacccggaagatgtattcagcagaggttcgtcgtccaagttcaacgcgagggtactgctttcttccgaatacttgccatcgttccagaacagttgtttacgctccaccttcaacgcataatagtcttttgtctgcgcattgtctgtaaagcctatccgaaactgaagcaggttcggttcaccgtctttgagagccaatttgattgatgtcaaagggaatcgggacgggacaaccgtagcggatgaaaccgctttcattctttctgccgctgcggttatgttgaccttgtcgccatcttcatacgcctttaccgcgtaatagctttgggcggggactcccggtatggaatcgtccgtccatgcaaggggtaccgcttcaccgtttacggacaggtggacgtccgctcccttcagtccccggacgagctcgcctttctgactgacgggaaggctgcgtgaaaggtggactaccgttgtgtcgccgcttcccggatagctgtatagcaccagtttgggagaagcgcccacatcgtccagttcaaaatgataggtacaggacgaaagtaagccgatatacacgggcagtaatatatgatataaatgtttcatgcacttaaaatttgagggtataactaaacgagggtataatcgggaaaatgccaaatcccttacccctgaaaccgccgtcgggcagacgctctatccgggtataaaacgcattcatacggcaataggcgttataaatgctgacgttccagatacgctcgaatccccttttggtagtacgccggaaattgacacccaaatcgagccgatgatatgccgggagcgtgatgttgttcggtttctcgtaaaccagttccggttcacctgaatccggtatgcccggaaaagagggcccgtttacatactggttcgggacggtggcacggtcgccgctacggtaaacccatgcggcgtaggcatctatacggtcattgaacttatgccggtaggcgatgttcagtttatgccggttgtcgaacttgctggaataccagccgggataaaaatcagtaaacttttgcaagctccatgaaagcgtatatcctgcttcgatgacattgtaacggtctttgtatgccaatgacaattctacgccgtaagactttcccttgccggtcttgaccagattgtcccagttctcggcaggaagcatcaggctgttgcccccgtcgtattccagcagttggcttgtggtacggtaatatccttccacgttcaaactgatatgccaaggcaactccgtatatatcccggctgccacttgccttgaacgcatgggacgaactttgcgtgtggaaggaacccaactgtctgtcggcaggttcagataggtgtttgacagttggtgcgcaaattggctcatttccgtataggacactttcatcgtggctttttccgagcattggtaactcatggccagtcttggctccaaggaatggtacatctttccgtctgtctgataaagggtgtaatgcagtcccgcgtttaatttcgtcctggaggacagccgcatttcatcttccacataaaaagcgacctcgttacccttatagctgcttgcgttttctgtcgataaggtatccctgtccgtctggtttctggaagccgtgctttgcggatgatatatgtgatgcagataattgctgccaaagcgtatatgatgattcgtgccgggacggtagtcgaactccatgcggtatcccatgtcgtcgattgtggaacggttggaccgttccattcccgtcatggaagtttgttccccgtcggaaaagaaacggctgccttccacataatcatacatggagatattgcgtgaatagacaccggtgaaactgccggacaacttcgggacgatttgacagttccacgtcaaagccgtagtcaggttgccccattgagccttgaaatcggagtcgtaatgttccccgtcttcgaacgtctgccgggcttttgtcttcagcaggtcatttccggaatacacgctaagggacagtttattattgtccgaaaaacggtgggtgattttcccgttgatgtcgtgaaaggcatagcgcacgttctttttgtcatcgggattggaacggttgagcaggaagaatgccggagctgtgaaaagatctgcccaacttcttcgcatggctatgttgaacgaggtcttgtcttttatgatcgggccttcaaactggactctgccatcgagcagccccaaggagaaagtcccgtgaaactccttcatgttcccctctttggtgcgtacatccactacggaagaaagtctgccgccgtaacgtgccgggaaaccgcttttatagaaatccacgtttttgataatatccgtattgaaagcggagaacagcccgcccaaatggttgatctggtaaagcggtgttccgtccagcagaaaaaggttctcatcgttcttgcctccgtgtacatacatgccggaaagcagctccgttccggaagccacaccgggaatattctggagggtctttaccaagtccggtgaactaagcagcgaaaactccgtattcaactgttccgaggtcagcgacactttgccggtctgtgtcgtgcggagggaagcgttcaagtctgcaaccactactacttctttcagcgaagtattgctttctttcaggtagatgacaccgttgtaattggatgtcaaatccacctccttcaccacatcctgataacctatataagagaaacgaagtttgtgtttcccctccggcagcgtaatgctgaaaaatccctgttcgttactcagtgttcccgtttgggtattcaaatcgaaaatggtcacgttgatcagcgtttctcccttatcctcgcatatgtggccggaaaaagtatagttgttctggcggaacagcaggacatattctccctgaatctcccatcggatgccggttccgctgaaaatcctttttaggttctcaggcaaggaactgctccgctggaagatacctttgggctttatatttgccaaggaagaatcgtatacgaaatgaacagaatacattttttgcatggcatctatggcttttttcatttcggttgaatcctgttgggctttagcacccagagagacacacaatataatcgcaatgattgttaacttcattgttttactttttctatctttacattcaacactttctctataaacctgattatttcatcaaggcttttgttcttgaagctggccgtcaggcgtttattctcattgcttgcggatagtttgactttataatatcgggacaattcctcaagtacctttggaagtggggcgttgtcgaaaataaagctgcccgctttccgttctttgattacctgtacgtccggttgttcttccgtcacttgcgctgccatgcctccggtcagtatcacaacgtccggttgcccgattgctgagaactgcacctttcccgatgtgacttgcacgatagctgtgtctgcacggctctcatcgacggtaaagacagtacccaataccctgacttgggacagtttcccttctaccgtaaacgggtgggcattgtcatgcttgacagaaaacgcgacttttccttccatgtgaactttgcggctggatttccggtaatcttttgcgtggaaacggacggaagaatgcgggaacagggttatggaggaactgtccggaagcatataatccacggggtgcgagtaagccgttacctccttccatgctccgttttcccggaagcggggataaataaggactgcgaccagaatggctgccgccataccgggaagtatccaccacaagcggaaggatttccgttcctgttccgttatctggtatttctctttgaaagccttcaatgctttttgcgtatccaacttgttcttctgatagtggcgcaagacaaaatgaaggcatttttcatccgtggttctcatactcttttattttggttttcgtattaatgactgggattacagacaaattcactatgcggaatttgtgaatattagttaaataagaatgcgtaaactttctgtgtcccttcccgtatcagtcggagcgccttgctgatgtggttatccaccgtatttacggaaatctggaacttggcggctatctccctgtatttcatgccgtcgcgtttgttcagcaggaatatctcccggcagcgttcgggcaaggcatcaatggcagtccacatccgcgcttccctgaccgaacgttcctccgcttcctcatcgctcaacgtatcttcaaaatcagaaggggaaagattcggatcataaatctcctccttcttcagatagtccaggctgcggttgcgggcagtcgtataaaggtaggctttgacattttctatctcggctccactgatacttaatttctcccacaaggcagaaaaactatcttgtacgatgtcttctgcaatatccgtatcatggacatagtgcagcacgtacaagcataacgaacgataatggtatttaaatgtttcgtctatgtctattgtaaatttattcatacaaataggcttattattctgtgtgtctacataaaaggacacaaaataaggcaaaattcactatttcatattgttaaagaaatataacgtacccctttcccatatacacatggtggaaaacatcacggggtttccgcactttcctttccgtttttccacattctttctttttttccgtcctatatctatcggaaaataaaaaatacgtttatggaagaaaaagaagttgcgcaaggtttatttgatggtggagttcggaaaaccttttgcggtaaaaaggagatgtatgtagccctcatggcagaaccaactttttcgcagttctccaagttcatgcccgtatccaagaaagacgaggtatcggctatgagaacgcttatcaaggactgcttcatcgaaggtgaccacgaactggtaaataataatttccggttcctcttcggcttgatgggacaactcaccgacttattatcacccgctagagcacgctcataaattaatagaatgttgggcggtacgtgacgaccagcaacatccggcaacagatgatttacgcgcgtcactactttcccggcgtcaaccaacataaggtgacggacgaggagcccgaacaactttcggaagaagtactctgactgtacgaacaggtgataataagtcaaataagctaagaaataataaaaatgttaaatcttcatcctttagaatgtacaattaaagacaacgaccatattcctgacttattgcttataaaatattgaggaataattagttgtaaatacctcatatggatttacacgtcaacgtggagtcttttcagat

SEQ ID NO: 3953 - DNA, 4115 bp, Unknown
  gut microbiota DNA sequence
tcaaacttccttcttgttttgtaggctataaggtgagtgatctgtcattagaaacggaattcaatataaaaatcattgcattgataaaaggggagaaagtgctgaacggtttgggtatttcgatattggagcatcaggtggagaatcattttgaggaaaattatgagttggaggaggaagatcagttggtctgctatgggctttataagaattttatggatttttggaaggcgttgtagcaggaatgcctttcaaagaaagaatatttttttctaagtgagattaaaccttttcttttgggtttagtctaacttaataaataatttagtttagtttttagttttctctgaaggccggccaatgtgatattgcccggttttcgctttttatggaggttttcttgtgagtgtccgttactttttgttactttgtcacctagaaatcgagatttagatgaaacagatatattttttatttgtcgttttgctggttgtaatgaccgcttgcggaggtaagaaagaggcttccgttgatgcagaacaattgatgttccaaatagacagtgtggatcatgtgacaggtttgcagcgtatgcaggtttcacgtattgaccagcatattgtcagtggcggaaaaaaatataatttgtttatagagcgtgctcccagtgattctctgccttcagtcaaaagtgacttggggatttttgccgacaatcgtatcatcgttagaatttcccgtgaaaatgggagccgggtctttgccaaaacttttaccaagcaaagtttctctggattcgtaagtgctgatcatctccgtcattttatattggagggcgtggtatttgatgaagagaagacccgtgagggaaaaaatatcatattggctgccagtgtgagttatcctcagacagatttgtatattcctttctccatcactattactcctgaaggaaaaatgagcatatctaaaaatgaggatatggaggagcttcctcccatgttgggagacagccttaattaaatctaaaatacaggaataatttttcgcgtcataatctttttaggcggttagttgttggtatggcattaactaactaaagaataaattagattatgagaaagattttatttttaatggctatgctggtatgctctcttcagttcgccatggcaggcgatgttgtgacccgcgatgtgaataagcttcctgttgccgcacgtgaaatgatcggcaaacatttctcccagactaaagttgcgtatatcaagattgaaaaggacttgtttcagaccacttcctatgatgtgaaattggccgatggcattgaattggagttcaattcaaagggagagtggcttgagatagattgcaagaacaagtcggttccttctacttttatccctcaggctatttccaagtatatgaaagctaattataacgggcataaaacggtgaagatagaacgtaaccgcaagggatatgaactgacattggaaaatgggttggaagtagacttcgatcagtttggaggattcttgaagttgagcgattaaaaaagattttttctgtaataggggaactatctctccttatagtaatgatgccataagagggtgtatcagaaataaattgaactatctttttattatcagcgttgaaaaagatagttgcaacgaattttgattcaccctcttatgtattataaatacagttctcggtctttgccctgttattaatccatcggctcgtaatcctttgccagaccgccttcgctggtttccttatataaggaaggaaggtcatgaccggtctgtttcattacttccaccactttgtcaaaggatacacggtgattaccgtctgtaaaggcagaatagatattggcatcaagagctcgggccgctgcataggcatttctttcgatacaagggatttgtaccaatccgcataccggatcgcaagtcattcccaagtgatgctccaagcccatttcggctgcatactctatctgggccgggctacctccgaataattggctggcagcggcggatgccattgaacaggccactcctacttctgcctggcaaccggcttcggctccggaaatggaggcgttgtgttttactatatttcctatcaatccggcagtagccagtgctcttaaaatccgcatatcgctgaagtcacggcttttttgcaagtgataaagtacagccggaaccactccgcatgatccgcaagtaggggctgtgacgattttgccacctgaggcgttttcttcactgactgccagagcgtatgagaatactaacccgcgggaacgcagattgtccttataaccttttgccttaatatagtaagtggaggcttttctgcgcagattgagtggcccgggtaatacgccttcttgatccaaaccacgctcaatggcttctctcatggttttccatacttctgccagatagtcccaaatgtcttcgtcttcacattgctggacgtattcccagtaattgcgtccggtacgttcacaccagtagaggatttcactcatacggttcatatcatagatttccggagttgagcctttgtcgtgcccttcttcggctagagcacctccgcctacactgaaaacagtccattcatctgtcacttttcctttttcattcaaagatttgaaagtcattccattgggatgaaacggatagaagacatgggctttccagataatttctgtaggcgcatgcggttgcaatgtatctaaaatggctacatcggtcatgtgtcctttaccggtagcggcgaggcttccataaagagtaacttgaaaagctttggcttcgggatgttttcctaagaagatttcagcagccttgcgcggtcccatagtatgactgctggacggaccggtgccgatgcggtatagttctcggatagatttcatttcgttttataaggttagttattatgaggaacaaaggtataaaataaaagggggaaagtagcaaaaaaggaaaagaaaaactctcttgacaaataggaaagttgtcaggagagtttggaaaaccaccggtaggatttggtgtattgtctttattctaattgtctttggatacctttgtcaccgacgacaaaatactgattattttcaatcagcatggcacgtccgcgctttttttcccggttttctttattgtccacatttactccgataactttgccgttatagaaagtggaaatatctttgaaaatggtatgtcccacaataatatgttttgccttataacggtccataatcatttctagggagtcttttgccagcggattgtatttgccatcagtgcgtactagtccgcgataccagatgggaccgctgtttccatacaggaaggctgtgagtggagaaagcgctttgcgttcttttttcgtcataaatagccctttactcatttcttcattgacagtgggaatgctcaagttcttgtcatagaagtctttgcccagtccggcatgtacatataggtcgttacctatcatttgcatggtgttacgggtttccaaccatctgcccagttcggtatcgggaccgaatagccgggggtactccatctttagtttttctgctaatattttatatttttctttggtgtatcggaggtcattggccagtaccatcggttcatgatttcccagcatgaacgatacgtgtcctccggttttggctgcttcctcttccagtttgtaaaatagccagaagatttgcggtacatcttttcctctgtcaaaaatatcaccgataatcatcagatggtttttcccgaagctccatttgtagtctttatcaatgatatgattgccttgtaacaggctgattacacagtccagccttccatgagggtcggacatgacaaaaactttgtctgcctggggataattccatccgggacgttttaccgggtgtagttttacatcaaatggaaacctgcctttgtgatctgtcacatgcagggtaaagttttgaggtaatgtggtataagtggtatcaatgatattccctttcttatctacattgattactctgatttggccgtcaggctgatacaatacgtatggat

SEQ ID NO: 3954 - DNA, 38161 bp, Unknown
  gut microbiota DNA sequence
tgtttttccttgcataacagatagaacagattcacgatccattccattatcaacatttgcatacgaaaaagcagccggcatacataatgcagctgataatcctaacacaacaggtgttcgtctgattccgtaacccaacggcttaggacatttcttcatgtcttttctcatttttctatggttaacaaattaattaataatccatattatttatctctaatgtagtaaaaatacgatgttttagttttctttcttcagataaagtcattacttccattgcttcatcagaaaccaataatacattcttggcctcttcaaatactttcagtagttctgcgtgctcctttaaaagcttattccaatgaaaagctgattcaggagcatcatccagaacatacttgataaagtcgtcatccttcaaaaagtcttctaccttgctatacatcttttttgtatccacgttacaatcatttttcattatgacggatagtggttcaaagttgtactcacctgaaaacttaaaatattatcctaccaattcccttaatcttgtaatacctctatgcatcaaatttcgtaccgactggtaattcatatccataatggtacaaatatcttcatatttcttctcttctatataatataaggtaagtgcctcacgttggcgcggagataattgagccaacaaatgttttacttttatattttcaaaacaacttttttccttttccaaatattgatgttctacatcatcacctgctgcaacgggattcagttcctcaacagccgtttccgacatgaacatccgtctgcgaagttcatcgcataacttatttttcaaggaaatgaggaggtatgatttgaagttgtcaatgatacccaattcagccttctttgtatacaattttacaaagacatcatgaatgcagtccttcaacaattctttgtcagtagttaacttacatccataattaaatagaagattaatatgcatatcatataatgtagagaatgcacttacatctccagattggaaagcggttaccaagcaagctgtcttatcatttaagttttgttccatcacagtatactaattataggttgttttgatgatgatgcaaaactagggaggatacgctacttttttaggtaatatttgattattggaccgaaaaaacagataacctgctgaaaaacatatatgctaaataatacagattttcattaaaaaggagaaccaaaataagtccggttctccttccatgtactaaattctatgaaaccaataaatacaatctttgttttcctctgctttaagcatatatatatctttaatattcaatcgtttagcaatcaccgttattgctccggtcttcggatcaacagacttcaatatgtatttcccaggtgataaatgaacaggaatatctgttgcagaatgggaataaatgatacttccaataccagattttaccagtttctgatacttatttgtaccagtatcctccatatccatagcagccgcatcagttaaaaagctttcatcggcaaccggaacaaccgagcaagagccacttgccatgaagacagcccaagccatatccggataattctgcgcatagtaagtaaccgctttttccgggaacttcttacgatattcactcaccgcccgataagcttcatcaaaagtaaccttacctactttcattttacgggcatgctgacggggagccaggttctttccaccttcgggagcataaagaccatccactttatagtgccagtaacgaatatcaataatgtcaactaatttcgcacgctgcgtatcattcagaatggcatcttgaacatcctttgtcgcacttaacgccacggtcgctttcttaccggtttctttctcccactctcctatcacatccagccagaattgtacaaaatgcaacggaccggtaaactccgcactgatcagttgtaccacatttgcatcatcggcaaaattatccaagcattggcgaatatactttctatgaaactcacgacgtaccggatgactgatatcataaaacatatccgctacaaagatacgtttgtcaccggcaaaaggaacaggttcaggcatatcggtctgattgatattattggccgaccgccaaggacagtctacccaatgtgctcccgcctccaagatattatgctggaagtaattctcatggaaaagcaaaagacctttctccgcccctttttcggcaaactgcttcaaccggttccaataccatgcattgggacggttcaaatcatacttgctcaatccttcccaagcagtaccttctccactgcgggcaaacggttgttcgtagaatggcccccacacatctccatcacggcgacggacacgctcatgatcgtcacgacgacgctcataccacaaaccgtaattatgatctaaaaccaaaatctgattcttcaccatataattcaccgtagaatcaattctatccgtcagcccaagtccttcgcgtcccggcacgaaacgggtaacatgtggcttggctttagacaagaagctggtcctcagtttcccattccaccaaggaacctcctgcctgccgcctaccagtaaccggccatccacctgcatacgtccattaataatggcaaacagatgatcctctttttccttatatataggtgtcttgaacttcaaatcttctaaagatttcagttttccggaagacacactggctgtataaggtgcttcctcaatccatttttgcatagtaagacggggagtataagcttcctttgccatctccattgccgcttctacggtaggactgctggttgcgttggtagccctaggaagaatacgtgcctggtcagaacaatctttattcaaacgtgccgccaactgtgcataaaacaagctgcggggatgtacgtgattatttgattccgcccattggccgtcacccgagaattgcgcccaacaaccgtatgcacggtttaccgcatctcttgccggtgaataacactctatcccggcagctgtacattgccagaaaagactgttgcctgtattccaaccggcaccatttttatcctgtcccaaattcttaaacaccaaatcatggccatcaatgtttaccacatcaaataataacccgcaagcccaggaatcaatagaaccgctgaatcctaacgactcttccgaatcacactgtacaaaagcattcggacctgccgcacaaaatccggctgagaaatcatgaataccctgtttagaataacaacgctgaaaaagtgtctgctgccccatagtataaaatgtactgcgacgcattccacctatctctgaaacaggttctgtggatacacaatcttctacagttgttttagagccggtacgctgtacaatcacagcacttcctgcaaagtgcttaaaatttaccctgcgcacccaacagttttcggcattttctatagatacccccgtccagcaatgatcctcatctttaggatacttcttatcatagtcagaagccaatgtcagattctccaaacctgcttctgcgattctgcccggccaactataacgtaacactttgacagttccccatttattatccaaagccattgtcaaaggagcatccaaagtcaattggtttccatccgccttacttaccgacctatcccaaaccaaatccatctctccttctttccagcccaaagcggaaatacctccgccaaaaatatcacaaccgacagaagcaatccattctttcgtagaggggcggacaatccggacccgctctccggaaaccagctgtacattattggttacctgaaaagtacaagtatttacaggaacgtatgatgtcaacacatccaaggtatccgtaacagccaaatcattccgcccttcaatataaagcaaagctcctctgtccactccctttttcaacaatacggtctgttccctgtcactgccgcgcagcacgactcccgacacagaaatacgcaagctctcattcaattcaaaagttcctttatccagcaaaacagccccacgaaaaccatttttatccaaagccaatgaagatacatagtcaatggcgcgctgaatacgagaggaattatccccaggcttccatgaaacaaaaacggcattcgccacatcaggtatagggtattccgagttacggtaaccgcaagaagaataatctagaatacggtttccgcgttcatcagtcacataagtcagtttttcttccttcacctgtaaaggaaaggtttgcgcagaaatccgcgcaaaccccaaacttaaaaatccaaataataataacttataattcattttacatcaaacttttacgttttgccaaagtatcatgattgttctttatatccgtccaatccactttctttgcaggatctatgccattaatgtatttttcaatattggtatacccgtcgccattacaatctttcaccgcatcacccggatcattaggattgagtccgtatctcacctcccagacatccggcataccatcaccatccgtatcaaccacaggcgtacctttatattcgggcaagccacctacctgacggggatctgtaatgataccttgtttataagagtcaacaggaagacgtctttttacataagtactaacgaattcaggagcgtctttcacgtaaatagctttccctgtcttcaccgtcttcatcacacgggcatccaccgcatcccttttagggaaagtagccccggcattttccaatacataattataggcagttttggcatccataatagtcacatggggcattgagaaaggctcgtttacacgaatttgatctgtaaacttccctgcgtccggcatatcgtacacctgcacgccgccatcccaattattctttgtcacacgcgcattaccttccactacatttccggctacatacgctttaccaaatgtatccggtttcttcttgtcacgacttgattcgggtttcacaatccggtgggcaatcggcttatctttcggagtgataggccccggtttaaaataattattaataatattcaaacggctggtttcatctcccccgtcaacagaacggttccaccaattaaaagtcacattgtttaccagattaaaatcctcattcatgccaatggaacagttacggctgatattggatgcgaacaagttacggcaaaacatactgttatgcccacctatagtcgccccgaaagcatgattgtaacaatccaaagcttccgaaaaaatagagttctgaatagttatgttgacagtaggaagcttcagaccatgccctgtggaatcgcgattgtatacatggcggtaaacagacatgttttcatccagtccccaactggcagagcagtgatcgataataacattacccacacagttacctcccaaagcatcatcccggaagaacacatcctgcgccccccgacggaaacgcatatggcggataataatatcatgcgtatcaagcaggaaagaggctcctgttacacaaaccccatcccccggagctgtctgacctgcaatagtgatatacggagcacggacgtttataggggttttcagccggataacgcccgaaacattgaatacaacaatacgcgcgccaccggtctcacatgcctcacgcaatgttccgggcccactgtcggccagcgaattgaccacaattacttttcctccacgtccaccgggagtataggcccctcccccttctgccccgggaaaggcaggtatgttgctctttattaaatcctccggtttggatgcccatggtttataaggacgtccttgaacagcctcagacattactacaggtaatgctttcgcccatgcctcatccgatttccggtctatttccttttgttgttcttctcctctgatttttaccgaatcaggaattacaggatactgtgccgccacaggcaacacacatgcagtcaatgctgccactgcaaatagtttctttagttgattcatttggtcgctaaattattattttttctataacttcgtaacataacaccctgcttttaacatgattcaaacacacattgcgagtatttctatatcaaagacggaacagaaagcctgttgtactctctatccgcacataaaaaaagagcttgacaccgtttcaccgggcaagctccttttccgcttttcaataaacattaatttatatctttcctccacgtgccttgatacgttcataccaagccttacgttctttcactaaatcatatccccgcttagagaggtaattattaatccggcctttgtatttgccgaaagcagcatgtttcttatttgaattttcagcatccatggcaaattcacgggcttcaacaagccatgccataatctgcgctttctcttcttctttcaaggtaggaatcatgtcaaccgtagctttataagttaccattaccacaccataagtcatgccatctttcactgcatctatctgcttggcatccaaatagagcgaaagatcggccgggaaagcgaaatgagtacggtaaagcgccgcatccttttcagcttcggcagctttaacggcttcttgtttcgcatcgcccgtcagggtttcttttgccagcttcactttggcatcgcgcgtttcgtatatgtcattcagtttaaaataacggttggctatgatagttgtcacttcacgggcggcaacggtatctgtcaactccagtttatctacaatcttctgcgaacgtttcacaatagattccacgtaagccggatcgcggccttcacggtccaaatccactgctccggcggtaatgactaccgccatgagcaacagaaacattatacctgacttttgtatcatatcctgtcttctttcctccgtttattacatcaactttcctttagaagccaatgtatcataattgtttctcaaatcagaccagtcaatacaatttctagtgctgataccattaatatatttctcaatatttgtatagccgtcaccggtacagtccttattagcatccgaaggatcattaggattcaagccatttgccttttcccattcatcgggcataccgtcaccatccgtatccacatacggagtgcctttgtattccggatatccccccatctggcggatatcggtgatgataccctgtttataagaatctttcggcaagcggcgatatttaaactgtccgtcttctcccattgatttaggagccagcccggtcaaatcaccgttagcatccttggccatcttcttatcataataaggaacgcctgttctcacttcctctacaatacgttcatccacaatatcacggcaaggaatgttggcacctgcatttttcagtacaaaatcgtatgcatcatgtgcagaagtaatgcggatgtacggcatttcaaaaggacggttgctacgcatattctccgtatatccatctgtattcggctgagtttcaatctggataccacctgcccagttgtcctctgtaatggcaggatagccttccataatattaccatcagcataaacacgaccatacactttatgatccaatttgcttcgtcccgcttcgggtttcaggatgcgatgccccacaggagtatctttcggagtggccggtcccggtttataatagttgtttatcatattgaacatagcggtataatcgccaccgtccgaagagcgatgtacccagttgaacaccacattgtttacaaaattgaaaacaccattccaaccaacggaaggattacgtcccgaattacttgcccacaggttacgcataaatgcacaattctcaccacctaaagtgctgccgaatgcatgattgtaagtatccagcgcttttgccgagatagtattctgtatggtaacatttacggtaggtagtttcagatcttttgattcatattgtccttcgctggggtcgtacatatggcgatagaaagaaatgttctcatccaatccccaagtacaagagcaatggtcaatcatgatatttccaatcgggttgcctccgaaagaatcgtcacgatgccatacctttgtttcgccacggcggaaacgcatatggcgtaccactacatcatgcgtatttacccaaaaagactctccggcaatacataccccgtcacccggagctgtctgtcctgcaatagtgacatatggagcccggacgataatgggagattccaatttaataatacctgaaacattgaagacaatgatacgtgctccacctgtctcacaagcctcacggaaagaaccgggaccacggtcattcaaattagtcacggtaatcaccttaccgccacgaccgccgaaactgtacatacctcctccttcagcaccggggaaagcaggaattcgtgcctgcggcaaatcgtatggacgggaagcccacgaaatatacggacgaccttctctcgcttctttctgtacaacaggcaatgcttttgcccaggcttcgtcagagcggcgacgttcttcactcatcattttctggtaggcttgcttcgcttcctcagtcaactggggatactgggccattgccactggagcaataaaagtagccatacacagtcctaaaaacatttttcttttcatactttattcttaaaaaattatatctgtgctataagtaagttggaatttatattccgttctctttttcttaacaattatctttttcaagacgcacttttcggggatatgtactcaaaaatgcttgtatctgtcataataaactagcagatataaaactatcgtattaaattatttcctagcatccaatgtgccttctgattcataataatccaaccatccttttgattgttccaaccacggattcatattcaatacattagagggcagaccggacagataatagttttcctgccatgaaattactgcttcctgaccattcacattatctaccggagtttctctatcctgtaaaacaaagtgctggctccagaactctcccaacctattcatttcggcttgtaagtctgccgcattatccacatctacaggctcaaaatcagcaatgacagaaacaagaggatctgcctttccgtcataatccttcacttgtaaatatttacccacacgggcagtaccatttaacggctcaatacccaaggtagtacaggtggtattgttatcacttgcatcatcattatacagcatccaacgccataaatcccaataacgcttaccctcataagctaattccacctgacgctcacgcagacaagccttaatagcttcattcttatcggtaatcgttcccaagccataattattggatgcaggaatacctacacgggcacgaatttcaccaattgttttcactgaattacttatatcccccgtagctgcataacattctgcaaggttcaacaacaattcagcataacgatattcgtatacatcagtgccatcccattgatatgtgtttgcactattttcagccggatcggacattttacgtactatcgccggactgctgccttcattttccgtgtaataatgcaactgagaaccatcttctttcgtttcactccaacgataattccaaactacggcatctgcatcctgatcatatccccatttcgctccggagaaagtaaacgtgtaatagaaacgcggatcacgattcttgaagaataaagaacggtcgtacccgtttatcgcctcaccatcatcatttacagctttggaaccatccgccatcgggaaaatatccaacatacccataggaacatgataaccggaaccactgccacccattgttttcaagcggattgttttctgccatccactatgttcatcatttttagaggtagagctagccaacagtttgaccataatcacctccttacattcctgattgtcaaacttgtagaacatttcattccagtctttggcggaattgccatacaaaccataaccttcgctgctcaagaaagcctgtgcttctagagtaatatccaacgcatctttccagcgtttactgcctgtattattccaatctgcattaaagatagggcttgcaaataccagcgccacgcggcttctgtatgccaatgcagcttccttggtcaaccgtccatactggtcacttccccattctttacgagtgggaagcagattcgcagcctcttttaaatcactcaagatctggttgacacatgtttccacactttcacgattataatctttagctccctcacggtcggccgccataagcactttatttaccacaggaacagctccgtatacacgtaccaaatcaaacaactgcatggcacggaagaaataagcctgtcctttcgctttttttatggcagcttccgacaagtcctgaccatatttatcaactccttccagaatttcattgcaactgcggatacggctatatggatcattctttatattcgtagccagattactgccaaaataagtttcacagtccgtagcttttttcaaacttctggaagcgtcaaatttcttctcgataccccatttctcctccgtataagttgaatagtcattccagttaccggacaagccgtatgactgtggaggggtcatacccgacttataaaaatagttataatacacattctgaatatataagtccaaattagattcgatgccgaaagtcttttccggtgaataactgtcatacggattcatatcctgcaagaactggtcactgcaactgctaaatgccaatccggctgccaataacacagtatataatatgcgctttttcatatcaatgattctttttaattttagaatgatacatttactcccaacgaccacgttctcaatgtaggatacaatgaagttgttccacaatacatattacgataatgatcgggatacgggttatagaaatcccatagattattacctgtcagacttaatttagccgactggatctttaaaggtgacaaccatgccttaggcagcgtataaccgatacttaagttacggatatagcaacggaacgtactgatagaccaaaaatcagacggtgcaattactgatcctgatattctgttgtctaaacctaaattaggatatttccccgtcgtattatttctttcatcaaacatatcttcccagaatgagtccggtgtccaaagcatatccccactggatgttgtgattttattgacgtcaatctggcgataaccaccccatgaagtggcaatcatcatattaaagctgatacctttccattccgcccccagtttggtggtaaaaccatatgtctttccactcttattcagtttggcataatcctgggtcttggcaatacgtccgtcgggccccgactgcgtaccatcctcattcaatacgccacccaaatcctgataagccaacatacccggttttaactgactggcatcttttacgcccaaatattccggagaagtgcctgcggcttctgcattggccgataaatagttccaataattctcaatatcatcactgttccgtaaaataccatctccggaacttgtacctctccatactttatacccgtatgtagggaatatagtagaagcaccctctcttacagaattttcctgtatataactcggagcagactggggccattctcttaccctgttgccattaaatccaaaattcactccgatattatatttcacctgatctattttatcgcgccaattcaaagagaattcactaccaaaagcatcaatacgcccaaagttcacttctgtcaaagcacctcctgcaaaaataggagtacctatgataccaccgatattctgattcaagatgtcagagtttatatcatagtacacatccacagtcgcacttaaacggttattgaggaaacgcaaatcaaaaccaagattaaatttatcggtattatcccaatgcgcatcaggattaggagtcgctcccggcttgatacccgtttgcaggataccaccgttagaaccgaatccatatcctctactaggatccaatgaatagagttgcttccatccccatgctttgatattatctttaccggtacgtccccatgagaaacgtactttcatgtattcaaaccatgacggcagcaacttcttcataaattcttcttccgaagctacccaccccacggaaacacccgggaagaagccccaataattggccggagcaaatttagtggaagcatcgctacggaataggaattggaacaaatacttatcggcataattatagcttacacgacctaaataagacaaagaaccctgtttgtatttatatgtaatagaattacctgtatccatcgctcccgcacttggcgaagtacccaaataaccatccgggtcagggttattaaacaacatccgcttggaatgcatataagcctgcattttttccactgcagccatggcggcaatgctatgcttgccaaactttccttcataattcacatagaagttcaattgctcgtttttagccatctggtctgaatataccacacgagtgcttcccgtaaattcttttaattgataatcggaaacagacggatgatcgctataaaaacgatttccgggtgtcaatgcatcgcttgctttcagataagccaacgtaaatggcataaatgcctgctcactatcactggcactacgcttcaacgcatagcttcccttgaatgaaagacctttgataaacggaacggcataagtgacggagaagttggcatcataactgaaattatcattcgtggaataagaaccgtcattattctccatagcaaaataattccatgtactcattttattgcccgatgttgcattacccgcactcgagtaactattcaacaaaggagatgtataataggtattaccatcatccaatgttatctcccatggcaaataattcggcatatgagcaagaaccaaataatcaccggattcaccgggcttagttcccccataaccgttcaaattgcttaaacctttggtaaaactcgatgtggtttcctgctggttacccgctatggttgcagaaaatttcaaatcggaagtcaatttgatatccacacctgcacggaagttccatctattataatcctgttttccaagattcgccccctgagtatagtaagaagcacccgcaaaataagtagctttctcgctaccgccacttacattgaccgaatggttcattgtaaaagcgccggaccaggcttcatccagccaattgtaattcaagccatccatctcggccagttccgcttcattataaattttattcatccagtttccatccggatccatacttatcttattattggccaaattaaaggaattggcaaaacgtccataagctgctccttttaaggttttaggatgtcccactgcatcattaaatccgaatttacctgaataattgattttgggagctcctgatttacctcgtttggtctttacaataatagcaccttgcgaagcacgggaaccgtaaatggcagcactggcatcacgaaggactgaaatactttcaatttcagaaggatcaagggcattgaaagtttctaatgtcggaagaccgctgttggcatctatctgaatcacatcatcgattatgaccatcggattagtactaccaccatctttagaatacgagaaagattgacgaatagacatagttgccccttcacccggacggctgtcaccaccactgatactcaaaccaggtatctgtcccgctagcgcagcacccaaattcgacaccggcaaatctgaaatttccgaaggagtaataaccccgatagatcctgtcacatcttttgctttctgagtaccgtaaccgactacaaccacttcgtccagcattttggaatcttccttcagcaccactctaaagtcttttccttgtttcggagcaatcgtttgcggcacataccccacaaatgaaatgacaaccttcttgcccgaagggacttgcaaagcaaatcttccgtcaaaatcagtaatggtaccgtttgtagttccttccaccaccacactggcaccaatcaccggttcaccagtttcatcaaccacctgtccggtgacagttttagtctgttgcaccgactgggatataggaaatcctgtctcagcggatactccctgaacagaaactcctgtcagaaacagactgagacagaccacttgtgtcaagttgccaatcttgtccagcttctgaagaaatgcattttctttcttcatagaatcatttttaaaattaaaatattatcttatttttcttgttgaaatatctgtttcagataagcgacattcgtcccgaagtttttctttacattccggacttcatccttattccgtgaccgttcaatgaccagccatccgctccaccccatcttatcaagggtatgctttacggcattcatatccagacgggtattataaggaagagtaaccccgtctgtatccgtacaatgtatctgacaaatccgatcctttcccaattttttcaactctttacagaggtcgcgtccattttccaacgcattttgaaaactataataaatctttatacctttcgaattaatttctttcaacagttttatatcccctccggcgtccaaaggagtacggatacctatcactactccatctttcactgccatttctcccacttcgtgcaaacggcttaccaactcctgacgtgcatcacccgctactgtccagtcctcttttatgccgcctaatggaaggaaagctacttgggcccccatcaccttcatcgtattcaaacaatcctgcactaaagctttataattatgatgagtcaagaaagattgtccaaagaatccggacatcgccacagaagggacttcaatatgctgttcctgtgctgtttctttaaataatttacagaaatggggctggtggaacttattatcaaaagtatcccgttttcccaagcctcccatgtccatttctatgccatcacctcctagttccttcatcaattgaaaagaaccgatcttctgacgctttagcatcatccagtcacacgcagctattttatagcgttgttttccctctgaattctgtgctcccaaaggcagtaacataaacaggagcatgattaaactgataatttttttcacattcatcgtaatctagttattgtttagaattaagacgaatcacaaaaaagtatgtaatcactaaatcttaataaagtccaaaaataacttagcaaacaaataagacaatcccgcaaacacgacgctcgcctacatctgtttacgggattcctgctttataaggtcaagaaatcaacctttacgccattcattcatatattccctcggagtctgatcatatttcttacgaaaacatttactgaaataaccggaatccttgaagcccacggcaaaagctatttctgaaatactcatatccgagtttttaatcaactctattgatttattcagacgaatctctttcactaaatccaccggagcaaacccggtcaggctctttaacttcttaaagaaagccgagcggctcagcccgatagtcgatgctatagtatctatattaaaatcactattatccagattctcttctataacctgatgaatcttttcaatgaactgcacatctttcttcaccaggaactgttcgtatgtatcctgttcctccttatgttcttcgggctgctgccatacacgttcacggaacaatttacgttcattcagcaactgttcgatacgtgctaccagatagtctttgctgaaaggtttgatgatataggcattcgctcccatgcttatcgctttggtcttcgcttcatcattacctttcgccgtcaggataatcaccggaatatgactgatctggaaatctttacggatgcgttgcaacatctctattccatccatattcggcatcatctggtcggtgactaccatgtcgggatgataaagatgtactttcttcagcccctccacaccatcattggccatataaatattgaatttatcttccaattgcagcttcaacatattgcataaatccttattatcttctacaatcagcacggtaggcaaagacgaatcgacaggctgttctttctcctcctcgctttccttgccggcagaggcagaaacagattcagcctcaggaacactcaccgtttccccgcccatatagaaatcgacttccgacggtttgtaatgctccttacccagttgcaattcaatggtaaagaccgctcccttcccttcaggactctctgcatagatttccccatgatgcagactgataatttccttagacaaagccaatccgatgcccgttccctgataataagcgccacgtgcattgtcagcctgcgagaaacgctcgaagatttcggaaagcttgctttggggaatccccacaccgctatcttccacccgtacataacaatgcctgtcatcatccgacactcccatcgtgacataaatatttcccccggcaggagtgaacttgaacgcattggagatgatgttgcggatcacgatagccactttctccttatccgcccataccatgatatcctcaccggccagctggaacgtgaagctgacttcattttcttcggccatcaccctgaattctttctcaaaagagtctaccatctcattcaggttgaacaacgacacatgcagacgcatcttgccgttctgtattttacggaaatccaatatctgattgaccagttgcagcatctgtttggtattcttttccatcagatccacatattgcattcctttctgagatagtttctccttttctctcagttcctgaataggcccttggatcagagtcagcggagtacgcaactcatgcgagatattggtaaagaacttgattttcaattcggacaatttttgttcgatatacacatcattcttcaccttaatcatgaaaagagataattttatagccaccagcaataaggctacggctataatcatatagataacatacgcccaccaactggcccaccaaggcggcagaatgacaacggtcaactcacggaaagactccaaaccgggatttgcctcatccagtgtctgtactctgaaaagatacttgccgggaggaacattggtataggatgctatacggttcttcccgttatagtgccattctttttcatatccttccaaaatatatttgtaagacacacggttctgattattatagttcaacgccgcaaactctaaagtaaacatggactggttatgattcaatgtaatcctgtctgtataggtaatggaccggtcaataatgggatggtccgtatagctgcgtatatcccggtttgatatctgacatcctacaataaatgtattataatcaaatctttgcgtttccagcttatcgggagaaaaggtcaagataccctctttacaccccagccaaagttctccgtccagcgttttcagtgcggtgttttcttccatcacaaccggaggaaagccatcatatttgtcatagttacgcacctggcttgtcgctctgtcaaaacaagagagtcctttttctgtagcaagccaaagaaaaccgttatcatcttctataatagacatcaccacatcattattcaatccgtcttcccagccatacgatttaaatgaaagcttatgcgtttcctcatcgtatcccgacaatttgctcaatcctccaccaaacacacatacccatatctgagagaactcgtctttataaagcgcgtacacatcgctatcggcataatttacccggttggaaccacgataggtttcaaaatcaatctgctccactgaggcaaagttgtttttaaaagacatcagcccgtccatcgtacctacccacatacgcccgtcattatcctctatcatatttctcacttccatataaaggccatacgtaggatagttcttgaatccgttatatttattcttaaaagtgacttccccattttcctcacaaagcagattcaatcctccgtccaaagtacccacccagatacgtttcttttcatcctgataagtgaaatacacatcattcccgctgatcgacgacaaatcagacaaattatgcagatagcgtttaaaacggaaaccacctgcagctttctcatcaggaacagctttcaccaatccgtcgcctttggtagagaaccaaaggtttcccttgtcgtcttccatgatgtgatatacattacctatatgctcgtcacctgtcgaaaaaacatgtttggttacaccgttccggtccatccgataaacactctgccaacgggtgcccacccagatatcgccactttttgattggaaaagggctcttacccctgtcgcataattttcccgaccggctgattgcggagacaacgaaagcagattgaattgcttcttggggaaattcatgcaatacaccccttcatcggcagaggaaagccacaataccccgtcattatccaacatcagatgataaaactgctgatttgccctatcattagaaagttgtttcaatttattaatataaaccatctccacatgttccctgtcgaacaaccaggcctctcctgccggagacaggaaaaaaagccctctttcgccggcatcttccgaatacagggtggttatcttgccgaacatggtaaacggaaaccgttttgcggtatggttcaacggatcataataaatcagcgccttctcattttcgtgaaaccatattttatcatactggtctatgaatgcatgagtaaccatagcgtcattcatttcagtatttatcttttgcaacctgcgctcggccaaatcatattcgtatgtaccttgtccggccacactgagatagacataacctgccggagtaaccagcaaattgctgatcgcaccttttatttcggaaagtacataccggtttaccaaaccggtccttacatcgatactgtaaaaaatacccgcacgatctccgacccataccttcctgccatcctcaaagaaactggtaaaactatccttgtcaccggaattaatcttactggttatgaaatcggcaggccgggatgccaattccgctcctttatgcacggcagacaccttataatcagttcctatccaactgatatattcctccgtttcgcacaggacatggtgtttcagtgtataatcatgcttgtttatctcgtcccgagagtcgaacagaatcttgatagttacctgccccttttcatctaccccggccaacaacagatttttatctttggtcagcaacaacacatccccctcggccgtattttgtaattttatcacctgaatattctccgaatagttcttcatgtcatcataaacagcatgaaaacattcggtcactttattgaagacatacaacttacggtcaatggtctttacccatatatacccgtttttatcctcgactatgcgctggatcttacgtggcggcacatccgaatcgtgctcctgtttattgaatgttttaaacttcactccatcgaaacaacataagccataccaggttccgaaccagataaagccatctctgtctttcaaggtacagtttaccgtattattaggaagcccttgatctacagaataatgttccacaatcatattcacattatatgaccacagaggaaagcttgtcaggcaacaaagtataataagtatatatttcttcataagtatttagttttcttcaaaccgagatcaaagataagaaaaaatccgttggtacttaaattgaaattagttaaataccaattattggttagattggaacgagataagtccgcgttctatctatattacttctccgtaccgaattcagtttgctgtctctccacctccatcaatactttttgcctttcctcttctgtcagcacaactttccccgccattctttctgttctaacagggcttccggccagtcctgctccggctgattgggcatccgtctcctcctccgtataacagaaaggcagttctgacggaatactttctaattctatttccgtagcaaccggtgcattcgttccttcaaactgcacatgggccttcacctttattttgccgggcttgcgggtagaacggatcaatacgggagcagagccaaactccaccgtgcgcggattggcattgatagaggcatcccctataactcgtccttcaccttctacagtaaatacgatattttcttttgccagacggcgcacattaccgctatcatccgtcacttcggccactactacgataaaatccgaaccgtctgccaccaattgctttccttccgtatccacatacatacgcaacttcgtgctgcggcgtgacggcatccgcttataggtgcaaaccactttaccgtctataattccttctgccaccatatttactttctgccagtttttttgcttataactatactcgcgtgcttcccagaaatcccatacatccttgaatatcaccggggcattaggcatgtgtccctgcgcatgaacaaccggaagcgtccggctctcagtaccgtcatagacagagagacgaaccgagtcacaattactgaacaccaccacatcggcatccgagaaaggagacatctcatgggcgataaacaccatagggccacattccgccacaggatgcttcaatgtcgcggcagactggctgcgaaaagcataataagcgtatttaggctgacggaacgcatcataaatgcccccgaaatacggatcgggatgatacccccgctgatggtcaaaaggatgccattgcgccccaccgacaaactgccctgtagtgcggtacatttcatcataactctttgataatgacaacgcctgcaccagcaacgggcgttccccccagctacggctggcacggttattattattatgtgcataccagtcatccacattctcgccaaactcacgagtaaaaatacattgttccggacggtctgccttctcatcatctcccggccatccgtacaccacatcatagttttccgccactcctttcgaatgaacatcggctgccgctacaggacgtccgggataaggaaactcctcccatgtaatccgtaacgcctccagtgcgaaatcgcgcggataaggcgtttcattcaaaataggctcccacatcagcacactgggatgattgcggtcccggcgtatcatctcacgggtattccgatgtaccagctttgcgaactccggatttttattccaatattgccatcccggagtagccacaataacaaacagccccatttcgtcgcaagcatccatgaatgccggatcttgcggataatgagctacacggataatggtacatcctgcatcacgcaagcgtttggcatccctccattgctggctgttgggcagcgcattacccacgtatgcaaaatcctgatgacggttcgcgccgaccaattgaccaaaaggcttgccattcaaccaaaagccatccttacctttaaattccgctttgcggatccccacacgtgtcactcccccatccaacacttcatgtccggctttgacacgagattgtatcctatacaaataaggcgagtcaggagaccataacttaggattgcgaactgcaaaccgttgccgcaccgtcttcgattcccctgcttgcagcttcacctgttgcgaaacccgttttacgggaacatcgccggcatccgccaaaaccgtctccacggctacggtacgcgtccgctttccactgttatgcacttccgtatccacatacacttccgcttttttcccgcttatattgtcaaaatgcacaaaaactccgcctccggccaccttatcggcctccaaggcatctgtaatagctacacttgattttcctatcatccacacatcccggtaaattcctccatgataagcgaaatccaaggtatattgacgttttcccggaggaaaattcttatcatcactattatccgtcatcactgccagcaagcaactgtctccgggctgtaccccctgttccgtcagttgcacagtgaaaggaaggtatcctcccaagtgctcttgcaccctcttgccatttaaataaatcacctgttttcccatagctccctcaaaatgaagcgacacctcttttcctttcatatcttgaggaatcacaaaatgtttccggtaccatgccacaccctgatagttacggcaaccgcttgcctcggcaggcatcagttccacagtatgcggaacagacactacctgccaggatgtatcatcaaaacgtacggcttccgcgccttttatgtctccacgatgaaagcgccatccgggattgaaattatatactattcttccgctaccggataaagggatgaatccggctacagaggtttccatttgagcttgtgccaacacaggcaacaggcacacaagtaaaataaacagtttcttcataattattacactatctgggaaaagagacggaccggccgtccgtttgtacccgttccttttgaaaaaaggtcttgttgtttttgaaaaagatccagacatttaaaaaaaaggtcctgatgtttggcgtcaaagacaaggttcttttaaaaaaacgtcaaggtctttttatacaaagaacaggtcttttgaaaggaattacaaggtcttttcaccaagctttccaaggctcagggctcaaaggctcacttaggcggtatttaagcccaaaacaagcttcaagaaacctaataacgcactgatttttaattaattacaataaaaagaagggaacaagactatattctaaaaaataaaatgaataatataatgagccccagacatacacgaacgcatccgacatttaccggaaagaaaaatgtataaataaaagaaacttctattgacatcatcacttggtcattccgggcatcgtgaaaaatccgaatgtgcccatatccattgatccggccattatgaataaaacccggcaaaaaacaagcctggtcaaagcaaacacaaattctataaaacgacagacaaagtcaaaacaatcctgaactttccaaagaccaaagaataatattcaacccgcacgttttgtcccaccaaacagactgtaaagcaaatacttacacatctaccaaggtttaaaataccgcataagtgagccttgagccttgtgagccctggaaacgcatcggaacgactctttttctttgcagaaagacacccgatttatttattccaaattttaatcccatttatgtactgtgagtcaacaccagaataggatactaaatgttcttttgaggccgatccatatctagacacaacttcgttagctgccccggattgagctgctagatctattgacttttttctttttgtcgtaacactttctcctaaaaaagaagtgtgacactgccaataaccacattttaaagtgcaggtcctgagaaaacctaaatcaacagatatggtaaagcagcccacgctataacgtgggaactaccatgcctattcttgttgattttgtgtttagtttctcaagcttcgcacttacaagagtagcataacgcttctttattttcaaatgcatggaaatggttacccaaatccgagtacagaattacggaaaaacatttgaaaaagaagcggtaagataaaaatatctgtttgatatttgctctattgtttggtaggttagaaataattaattacctttgcaccaacaaatcccgctcgcttcccgtaagattagcgtacccagcgggacatttttatttatgggagtcaggtatacaaatcgagccataaccacggaacaacaaattgatattctcaaagaaagaggtttgcttattgatgatgttgagcgagctgttaaagcccttgacatcataagctattttcgtcttgctggttattggcgacattttgaagctgaccacactacgcatcaatttagagaaggttgtcgttttgcagatattatcgacctgtattcctttgataagcaacttagggctttgctctttactgccattcaaacgattgaagttgctgttcgcacaaaaataatcaagcactttgctcttgaatttggagcattttggtttatggacgaaaactttgccaccaatgaggctcgttttgctaccaatttagctgttatccgtaaagaggtggaacgctcacacgatgattttattactgagcatttccgcaaatacaacgaaccagagctgcctcctgtatggaaaacattggaggttatctcaatgggaacactctctaagctctattccaatttttcaaatgccacggcaaaacatgctgtcgcaagagagttcggtttgaatcatcacaaattttttagaagctggttagagtgtcttgcggtgcttcgtaattgttgtgctcatcattcacgactgtccaaccgtgtctttccagtaaaaccaaagatgccaaaacgtatgccaaatacatggattgctgatttctcattccgagaacaaactctttatccacaattatgctgtgttgtgtattggctcaactccattgttcttgaaaatacattcattaccgatttcaagcaactcttgataagccatccatcagtgaaaactcgcttgttgggcttccctcgtaattgggaacaagagcctttgtggaggtaataatatctacaataaaattatttccaaaaaacaataagtaacagacaatatcggataaaatattgtacctttgtattggcttagacattgagcccaaatagaagtgaaatatcggaaacgaattgcaccgaaaaaaagaataaatcgctcgtattgacaccgtagatgagttaataataactaaaagggttaaatattcaccacttagaatatacccttaaaggctacgaccatatttccggcttaccaccagtaaactattgattaatagagcattgatagcataaaccattatcagtaagcatctaatacaaattacgttgcactatttgtttttcattttttttagtgttcaaatcgtgatatatccactccttttactttctgttttttataaccaccgaaacggtatgtgaaattcagagatacagtacgggtatagtatccgctatccatatccaaatattgttccttgaagtgaaccttcatatccggcatactggagttggatatatcactgcaacgtgccgtaagcgaacatctgtccttggcaaaattccatttcattccggctgtgagattaaatgaactggcaagatccaacgttccctgaatgaaaggtgtctgtatgtttcctatcaattcaattcaaaggataggttcttgcctactttgaagctgttgtcaagtgtgccgataaacagccattttttgcggtcaaatggtacatcaaaaaaacggtcgcatttttgccgtgcctgcatgcctacaagcgtgagtcttgcatcataccagtttcccatgctgagcggcaaaatgacattcacacctatcatacgcatataattccagttggtatttttgtatatcaatgccagtcggcctgttgcctgataaggtgtttgggcaaagtaatcggatgtatgcgtgtagaacagaccgaaaatatacttctgtttcagtatgtacgtaccattcaggttatagtttgtcatagggcgcaatcccggtgttccctgaagttcggaatatccgttcagatatgtaacgtatatgtttagtggctatcagattcctgttctttctctatttcctcaatcgtaggcaaactgccacggaaatctttcggcaaggcttgccctaattcgtagtcggatatgcctattggcttctgaatgtcacgcaaagcatattcagccttgatacggtctttgcttttacaaagtagcaaacctatggttcgattatccccctcccggcaaaggatgtcatccacagcagaacaatagaagttcagcttaccgatatattccggcataaactccgtatctatcaactctatcaccaaatagcggtgtaggaaggtattgtacatcaatatgtcaatatagtaatcatctcctgacacctcaatatggtattgtcgtcccatgaaagcaaaacctgcgcccatttccacaaggaatttctctacatgtttcaccaaaccgatttctacatcacgctcattgtattggtcggtaaaggtcagcatatcgaatatatacgggtctttgagcattgatttcacatcgtttacttcgggaacaggcagggtttcagtgaaattgtttgccaacgcaccatgcttgccatagtcatcaagtttgatagcttcttgcagatagcgtgtattccaatgcgatgtaatactttgcaccatataccaataccgtgcgcgaatatccttgacttgttgtaagagtatcaggttatgcgtccagcctagatgtttgataggaaaggaaaaattatattcgcctaattgcgcaatcattgattgcgcaattgaagaatcagcacctttcaccatcgtaagttcttgattgtattcgttgaagaactgtatcatacactgcatgttgcgcacagaaaaaccctttatttcggaataatcgttcttcaagtccacggacaagcgttgcaaggttttcttgccccaaccatctgcatcttgactttgccgcaacatacctccaatatcccaatacattcggagcatttcttcgttggcggcataaatcgctcgttgttgggcaaccaatacccgctgcttgattttacgaagcagtgccgcataaccattgaaattatctgccaagttatcaattgcttgtttatctgtatttttagtcataatcttctttgacatttccacaaagttacgctttttattcgattgtacatcaaattcttacaatattattagttatacccattatggactattttctcattgagaaacctcttttctgctgttggtcataatgttatcttacaatcggtcttttcttttagcatttctataaattcgaccaagttattttcttttcccatgataagttgtcatccaataaacacaatgtttccatgacttcctagttcgatgcagtcatttcaaaatcaagagaataccgagcgaacggataagatacactgttttcaacctcaaattatacggaaaaacccataccttttttatacctttgcccccaaaagaaaacaacagacatggaactattcaataaaatgattgccgcagccctgaaggtttccgtacatcaagtagacaatacattatctctactgggcgggggagctaccatccctttcataagccgataccggaaagaggcaaccggaggactggacgaagtacaaataggcgaaattaaagacagaaatgacaagttgtgtgaactggccaagcgaaaagaaactattctttctaccatagaagaacagggcaaactgacagaagaattgcgcaaacgcattgaacagagttgggatgccaccgaagtggaagacatatatctgccctataagccgaaacgtaagacccgcgccgaagcggcacggcaaaaaggactggaaccgcttgccaccttactgttattgcaacgcgaaaaccatctggacagccgtctccccgcttttgtgaaaggagatgtgaaagacgaagaggatgcgctgaaaggcgcgcgcgacatcatagccgaacaagtgagcgaggacgagcgcgcccgcaaccaactgcgcaaccaattttcccgacaagctgtcatcacctccaaagtggtgaaaggcaaagaggaagaagctgccaaataccgcgattatttcgatttcagcgaacctttgaaacgctgttcctcccaccgtctgctggctatccgccggggagagtcggaaggcctgttgaaagtaagtataagtcctgatgacgaagagtgcgccggacggctggaacaaatgtatgtccgtggcaacaatgaatgcagccgccaggtaggcgaggcagtgcgtgatgcgtacaagcggcttctgaagccttccatcgaaaccgaattttcagccttgagcaaggagaaagccgacgaggaggcaatccgcgtcttcgccggaaacctgagacagcttctgctggctcctcctttggggcagaaacgggtcatgggagttgatcccggctaccgtaccggatgtaaaatagtctgtctggacgcacaaggctctttgctgcacaatgaaaccatttatccgcatccgcccaagaatgaatactcacaggcagcccgcagcatcgtgaaattggtagaacaatatcagatagaggcaatcgccataggcaatggcactgccagccgtgagacagaacaattcatcacttcacaacgctataaccgtgaattgcaagtatttgtagtaagcgaggacggagcatccatttactcggcctcgaaaaccgcccgagacgagttccctgaatacgacgtgaccgtgcgtggagccgtatccataggccgccggttgatggacccgctggccgaactggtgaaaatagatgccaaatctatcggggtgggacaataccagcatgatgtggaccagactttattgaagaaatcattggaccagacagtggaaagttgtgtgaacctggtaggtgtgaacctcaataccgccagccgccatctgctgacttatatatcggggctaggtcctgccttggctcaaaacattgtggattaccgcaccgagaacgggcctttcagttcacgcaaggagttattgaaagtaccccggatgggagcgaaagcgtttgagcaatgcgcagggttcctgcgtatcccacaagcgaagaatccgctggacaactcggccgtgcatcccgaaagctatcccatagtggagcagatagccaaagacctgaactgcaccgtagacgaactgataaaaagcaaagaactgcgcagccggattgatatcaagaagtatgtcaccccgacagtggggcttcccaccctgacagacatcatgcaggaattggacaagccgggacgcgacccacggcaacaaatccaagtttttgaatttgacaagaatgtaaagaccatagaggatttgactgaaggaatggaactgcccggcattgtgaacaatattaccaacttcggttgctttgtagatataggaatcaaagagaagggtctggtgcacgtatcacaactggccgacaaatttgtgagcgaccccaccaccgtagtcagcatccatcagcatgtacgggtgaaagtgatgagcatagacctagagcgcaagcgcatccagctcactatgaaaggattgaatcaataattgcaacaaggtaaaaaagaatatggaagaagatatagaaacctgcggctggttcgttttttataaggatcagctgctgatagagaaaaagaacggaatgtacaccatacctttcggaacagagcctcccatgcctgttccggtgggaagcactatccacaccatcggagagatagagggacgcactgccaagactttctccgtacatgccccggtgcccggcagcgaaaatgaccgccacctgatgatggatctccggagttcatacgacgtattgccttgggaagagtacaatgtgggtggaaaagccttccagatactgaattgggacaagaacagccgctattgccccatgtgcggcgtacctaccgtacagatttctcctattgctaaaaaatgcccccaatgtcgtcaggaaatttatccgcgcatctctcctgccatcattgtattgatacgccgagaagacagcatactgctggtccacgcccgcaacttccggggaaccttcaacggtttggtagccggttttcttgaaccgggcgaaactttggaggaatgtgtgcaccgcgaggtactggaagaaacaggactccatatcaaaaacctgaaatatttcggcagccagccgtggccttatcccagcggaatcatgataggcttcaccgccgattatgaaagcggaaacatcaaactacaacaagaagaactgaatgccggcgctttctataccaaagacaacttgccggagatacccaaaaagctgagcctggcaagaaaactgattgatgcgtggctggaggaaaaggatcatttatagaacgagatgagtcatgttccatccataaatacctatttatcgcttgcagaacttaaaaatgtactatctttgcaatatggaatggttaaatagcttattttttgaacacacgcctttacaggcggttgtaatcctctcgattatcattgccgtggggctcggtttaggtaaaatccacctgtttggcatttcattgggagttaccttcgtcttttttgccggtattctggccggacacctgggattctcaatcgacccgaatatgctgaattacgccgagagtttcggtcttgtgctttttgtatacgaactgggcttgcaggtaggtcccggctttttcagttcattccgtaaaggcggcgtacagctcaatatgctgggcataggcgttattctggcaggtacggtcatgacggtgcttttcagcaaactgggaggcataccgatgagcgatatggtaggcatcctttgtggagccaccaccaatactcccgctttgggggccgcccaacagacattgaaacaaatgggggaacccgccagtggcgctgcgttaagttgcgccgtaacctatccgctgggagtggtaggtgttattctggccatgctgctggtacgcaaattatttgtccgtccctcagatatcaacattcacgagcacgaggacaccaatcaaacgttcattgccaccttcaaagtgcacaatcccgccattttcaataaaagcataaaagaagtagctttattaagctatcctaaatttgttatctcccgtttatggcgggaaggtacggtaagcatccccacttccgaaaaaatactgaaagagaatgatcgcctgctggttatcaccaccgaaaaggacgctccctcgctcacgattcttttcggcgaacaggaaaaccaggattggaataaagaagacatcgactggaatgccatagacagccaattgatttccaaacatatcgttatcagccgccccgaaataaacgggaaaaaactaggctctttacgtctgcgcaacagctatggcatcaacatcagccgtgtgatgcgcagcggggtacaactgcttgccacaccggggctaatcctccaactgggcgaccggctgaccgtagtgggagaagccaaagccatagagaatgtggaaaaagtattgggcaatgcggttaaaacgttgaaggaccctaatcttgccgccatttttataggtattgtactgggattgatactaggctccatccctatcgccatccccggcatcagcactcccgttaaattaggcctggcaggcggacctatcgtagtaggaattcttatcggatgctttggcccccgtttccacctcatcacttataccacccggagtgccaacctgatgctgcgcggtatcgggttatccctctatctggcttgcctgggactggatgcaggcgcacatttcttcgagacagtgatgcgccccgaaggagccatctggatagctgtaggcttcgccatcacctttattccggtagtcattatggcattagtggccctccgcataagccacctcgacttcggaagcacctgtggcatgctgtgtggaagcatggcaaaccctatggcattgaactatgccaatgacacgttacccggtgataatccggcggtgagttatgccaccgtatatccgttgtccatgttcagccgggtcattatagcccaattaatacttatgttttttatataatttccagccatgaacgcttataattctatcaccccggaaaccatacagaaagatatgcgatacctgcaactgctgtcgcatagtttccccactatagccgatgccagtacggaaataatcaacctggaagctattctgaacctgcctaaaggtacagaacatttccttgccgacctgcacggagagtacgaggcattccagcatgtattgcggaatgcttccggagccatcaaaagaaaagtaaatgaaatattcggcaataccctgcgcgagaatgaaaaaaaagaactatgtacgctgatttattatccggaacaaaaactggatctggtaaaagcagtggaaacggatttggacgactggtatgtcatcacgttgaaccaactggtacgtgtatgccagaatgtatcctccaaatatacccgttccaaagtgcggaagtcgcttcccaaagaattctcgtatatcattcaggagttgttgcacgaaaactcaatggttcccaacaaacaggcgtatattaatgtcatcatcagcaccatcatttctacccgccgcgccgatgactttatcattgccctatgcaacctcatccaacggctcaccatagacacactgcatgtgctgggtgatatattcgaccgtggccctgccccccaccgcattatggacatattatgcgattatcataatttcgacgtacaatggggaaaccatgacattttatggatgggagccgcagccggcaacgactgctgtatggcaaacgtgctacgcctggccatgcgttatggcaaccttgccgctctggaggacggatatggcatcaaccttctgcccctggccacctttgccatggaaacatacgctgatgatccctgcaccctgttcggaccgaaagtagagaaagaagactgtacgtacaatgccaagacgctgcgcatgataggccagatgcacaaagcaatcagtgttatccagttcaagctggaagcggagattatcaggcgccgccccgatttcgagatggacgaccgtatgctgctacaccgtatagacttcgagcgtaagaccatcacaatgcccaatggaaaagaatatgagctgaaagacagttttcttcctacggtagatcctgccgatccttataagctgacagacgaagaacgggaaattatgaacaaactccatcgttcatttgtcagcagtgagaaattgaaaaaacatatccgctgcctgttccgttacggatgcatgtacacggtgagcaactcaaatctgctgttccacgcctccattcccttgaatgccgacggtacgctgaaagatgtgtccatagccggaaaaacgtacaagggaaaagccttgctggaaaaagtagggcatttgatccgtaccgccttcttcgctgaggaagacaacgaggacagaccctttgctgtagactatgtatggtacttgtggtgtggcaaagactcccctgctttcgacaaagacaaaatggctacttttgaacgttacttcttaaaagagaaagagttgcacaaggaagtgaaaggtcactattacagcctgcgcaatgaagaaaaagtatgtgacatgctgctggacgagttcggcgtgataggaacacaccgccatatcatcaacgggcatgtacccgtaaaaaccatccaaggtgagaatccgataaaagcaaacggcaagatgatggtcatagacggaggattctctaaagcgtatcattcggaaaccggaattgccggatatacactggtataccattcgcgcggattccaactggtacagcacgaaccgttcacctcaatgcaaaaagccattgaagaagggcaggatatcaaatcgagcactcagatagtagaaatgagcacccaacgcatgatggtaaaggacactgacaaaggacgggaactggtgacacagatcaacgatttaaagaaattgctgatggcctaccggacaggacttatcaaggagaaatccatataaacagattatccgcaatcatactaccggataataaatgaaagtttattgccctatgattgcggataaaaaaataaagcccgtatcagactcacgtctaccgggcttttggattaccgaacaaaaatatcgttatacaatcttgttcatcgccgaatcggggaaaaccaccgtcggcttgaacgatttagcttcctcaaaatccatcatggcgtatgacatgataatcacaatgtcacccacctgtactttccgggcagcagccccattcagacaaatacatcccgaaccgcgctcacccttaataatataagtttcaaacctctcgccgttattattatccacaatgtgcactttctcgccggcaatcatgttggcggcatccatcaagtcctcgtcaatcgtaatactacccatgtaattcaaattggcttccgttacacggacacaatgcagtttcgactttaatacctcaatcatcataattctaatggttaacgatcactatcccttatattttatattatctatcaaacgtacctctccgcaaaataccgtaatgcaacctactgcataatccgtatcttcccaatccgttattttctgaagcgtagtgccgtctactatttcaaaatattccagacgcaaacccggagcggcagcaatcgcatcttctacaaacttctgagtctcagcgaccggatgagattttgcaaaagtacaactcttaaataaagtctgcgaaatattcagcgcatactctctctccaccgcagaaagccgtgcattgcggctgctcaatgccagcccgtcttcctcacgcacaataggacaacctacaatttccagtccgttgaaccctatctgtttcaccatttcacgaataatagccaactgctggaaatctttctcgccgaaataagcacgggtaggatttacaatcataaacagcttgctcactatctggcatactccattgaaatgtcccggacggaaacggccttccatcactgtgtccaacggcgcatagctgaactgccgggtatcaggctcaggataaatctcttctacagacggagcaaaaacaaaagccgcccctactttttccaacaattcacaatcggcatccaatgtacgcggatattttgccaagtcatttttgtcgttaaactgggtaggattcacaaaatcacttaccaccactacatcattttctgcaacagcacgtttcaccaacgaagcgtgtccggcatggagtgcacccatcgtaggtaccagacctattgtctttccctcactacgcagggcatccagctctgactgaagctctttgattgtttgaactaacttcatctttttatctcttttgtttgagtagtttcatttaaaacggctgcaaagtaaaccattatttgggagataacgaagaaaaaaaagaattttaattaatgatgagtaattagtaataagcggttaataccttgcagatatggcgcaataagccctcttcagccaccggcgggccacttgttctttcccgtttttcacctaattccgcaagacatcggccattaacttcaaattgctaacgactaattaccagccacttaacatatcataaggaattattattcctcgtttcttgccactctcatctattttttttatatctttgcaaaatgattatgagcaacaaaaagttaagatgaaggcaaataaagttttatttattacacaagagattaccccttacgttcccgaatccgaaatggcaaacatgggaagatttcttcctcaggctattcaggaaaaaggcagagaaatcagaacttttatgccaaaatggggcaatgtcaatgaacgcagaaaccaattacacgaagtcatccgcctgtccggcatgaatttaatcatagacgatacggaccatccgctgattatcaaggtagcatctatccaagctgcacgtatgcaggtttacttcattgacaatgacgactatttccagcaccgccaaatggtagctgacgaaaacggtgtagaatacaaagacaatgacgaacgtgctattttttatgcacgcggcgtattggaaacggtaaagaaattacgctggtgtccggacattatccattgccaagggtggatgagtgcatttgtacctctttatatcaagaaggcttatcaggatgaaccgtcattcagagactcaaaagtagtattttcggtatttgaagatgatttcaaatcggactgcgaaggtaatctgactgaaaaactcatgctgaaaggcattgaaaagaatgatgtggaaagcatcgtcaaatctccggcaaattacgaggagctgtgcaaactggccattgcctactccgacggtgtgatacaaaacagcgaaaaagtgaacgagaatgtcatgaaattcgcccgtgaatcgggtgtgcccgtgctcgactatcagcctgccgatacctatgtagatgctttcaatgagttctatgacaaagtatgggagtttgaaaagaaataactcactaagaataataaagatgaaaatcaaatacttatgcgcattgttgttggctgcacttatttatagttgcgatgattcaacaaccggcatcgggactgatcttatccccggtggagataagattccggcaaatacagacagttatgagtttaccaccaaatctctgttggccgactccgtttatgcacgtaccagtactgcatatttaggacgatataccgatgagcaatttggagaatttactgccgactttatagcacagttcacctgtatggacaacttcaaatttgaagaagagctgaccaaagtcatcggagtaaatataagtctgcaatacgggtctttctttggcgactcactgaatgccatgcgcttacaggttgacacattggacaaggttattcctgaaaaagaactaagcactttctataccagtgtggatcctaaagattattataacgaaaaaggaaagcctatcgctgtaaaagcctattcggcagtaggtccgtctacaagcaaagatgaaactacaaccacaagcagcggtgtcaagcaaagaacaattatacagactatcaaattgcccaattcattaggcgatcacatcttcaacaaatacaaggagaacaaagagtatttcaagactcctgaaagttttatcaagaatgtattaaagggagtttacattcgctgtactcatggcgacggaaccattttatacattgacggtttaagactgaatcttaattttgaagccctgatagaaagttcttccggcaagcgggattcgttggtttacaagtcctatttctttggagcaaccaaggaagtgatacaagccaaccacttcagtaacggtaacagattggaagagttagcccaagatccggaccatacttacctcaaaagtccggcaggtatttttacagaagcgactttccccattgcagagatttacaatgaacataaaagagatacgctaaatggtgtaaatgtatcgttcacacgctacaacgagaaagagtccaaatacaaaatgggcatcccccaatatgtattgatggtcagaaagaaagatatgttctcgttctttgaagaaaacaagattatcgataacaagatttctttcttaagttcatatagcagcagtaacaatacatacacctttaccaacatcgctcccttaatcacttactgcattgaggaacggaaaaaaggcataacagcagcaggtggagatcctgaaaaggaagaagacggaaaaaaatgggacgctgaaaatccggactggaacaaagttgtcatcatacctgtcaaagcagtatccaattcaaacaatgaaatagttgaaatatccaacagcttaggtatggaaagcgctatgttaaaaggtggaacgaatcctgagaataagctgaaaatgcaaatcttctacactacattttaagacttttttatttaaccaaataaagaacaggcggaaactacagcaatatagtttccgcctgtttaatttactccaccgtaatcataccacaccggatgataaatgaaaattcatggaacgcaaatatcgggtcagcggattttcctggttggtaagcttt

SEQ ID NO: 3955 - DNA, 7076 bp, Unknown
  gut microbiota DNA sequence
ataaatatagccacttatcgttatacatccgtttcgaggaattaccatacactggtatggctactcaaacacaaggcaaagaaaggagatgcaaaatgagaatatccccgacattatatatcctttacctttttgttttcttgttagttgcctgtaaccgacgcgaactgacttattcgcccgaagcaacaataacaatcagtgccgattggagtcagtcaggactgaatgaaaaagagcaggattatggtgctaccgccatattctaccctaccgatggcagcactccttttttagcactgatgggtgaccgtacatacaagaccctatgcttgaaagaaggatgttacaatgtcgtccttttcaaccgttcattcgatgattttggtaacctctgtttcagaggagaagaaaactaccaaacgctagaagcctatgtaaagaagatggaaataaggaacgaatcatcctctgaaagaattattatggaaagtcctgacgaacttgccgctgattatatcgaaggctttgaagtgacttctgatatgccggaaaactattcatcagccattacccaacaaagtaaccgaaattccaccaggaacgaaaatagttgtcacttacgcttcacccccaaaaaactgactcaaaaaataacggttaaaatccgtatcaaaggaatgaacaacatacgaaaagctacctgcacattagacggcattgcagaatccatatttctcgtttcgagacaaaattcggaaaagacagtaacacaagtgctacgcttaagcaatcccatttatgattccggctcggtaacagaaggaacgctgagcactactattagtgtgttcggcttcgatgtagagattccacacaacctacatctgaaagcaaagttagtagacgggaagaccatatttgaagaaagttttaacgatttggcaataagacggttggatgaagaagacggaactatgagcgtttttattgacatggcatgtgaaaagaccgtgccgaatgtaaaaacagaaggtagctcaggatttgacgctgatgtagataaatggaacgatgaagtgaacagcgatatagatatatgacagatatgggtagttataatattaattttaaaaaaagtagaaaatggaagtgaaaagtttattgatggtgatggcaacactgactatagctggttgctcacagaatgaaatgacagaaatgaatccggatacgaaccggacaatcgggttggacgtatatacggaagtacagaccagaggaacggaaactacaacgtccacattgaaagcaaatgccggtttcggtatttttgcctatcagacaagcagtgcgggatggaatagtgaaaaaggaaacacaacacctaatttcatgtacaatgaacatgctacatggacttctgatagttggggatatactaatttacgtttttggccaatagatgataagaaaataacattctttgcttatgcgccttatgaatccaaaccggaagttggaacagaccaaaaaataaccttatcaggacagaatgccaaaagcgctccgacaatcacctttgaggtaaagacttctaataactggaaagatatgatagatttggtaacagactgccatactgccatacaagaccaaactaatgaaagtaataaggggacggttcagttcaagtttagtcacgtacttacccaaatagccaatatcaaggtgaagccagatgtgaacttaggtactgataccaaaatttttgtaacgggattaaagttagatccaggaagtacaacactttacaacaaggctgtttataaattcgataacgacacttgggaagccatatctcctgacgcatcttatttttcaacagaacaagacctgagtgattttttaaataaaacaaccaccgaccaatggggatataataaaagttctatcaatgtaagtgatgaccagaatgcaaccgcgttattctcagatacagaagctctttactttattccggtaaataacaaaaacggtaccaccaacgcaggtgacttaaaactgaaaatcaattatgacatcgtaaccaaagtgaccgacacaagtaatctgacaagtaccataacaaacaaagaagtttcactaccgaaaaatacgttcaagaaaggaacgaaacatacctacgtattgactatcaagatgaatgccattaagattacggtggaggataatatggaaggttggactgatgatagcgactctgatattaatgtagagaaataatttccttttgcagccaaaacatgatacatactggctatggaaagaaaacagaccggacagggttgaatgtttcttccctgtcactacggtcaaaaaagcacggacgtacaataaaatagaaaaagaaacatgaatcgaaaaacagaaagcataagggtgaaacaattgtatggcattttccttgctgcaactttgttattgggagcttgtacccaggaagaaggtacgaacgaatttcctcaagaaaatatccctatcagcttttcaggaaacgttccggtaatgagatctgttaaagagtataccacaacaagtgaccttgaaactatcggtgtgtttgcctacttcacacacggaaatttcaatgaagatgccgcaacaccgaatttcatgtataaccagcttgttggtaaacaaacagacggcacatggtcttatagtccggtcaagttctggccggataattcaacaacagataaaatcagtttctttgcttatgctccttatataaatgaaacagcaagtagcaactttttcgttcaagacaaagagagttcaaatggatttccgatgttgagttataccgttcccacagccgaaaacaaacagatagattttctcgctgcaactccggtaatgaatcaaaacaatggcaatgtaagttttaaactgcgccatacactaaccaagatcaatgtttatgtaaaaagtaatgatgatacggagggaaagtccgtaacctttttctccattacgggaataaaaagcggaatactgacctattatactcctacgactgatagcgacaaaggctggctgtgggcatttccatcacctgacaagaaagaaacttttaccgctgacataaccaatttccctgtaccgaatactattgcggaagaaaagaaattgttagctacttttttcctgcttcctgccggaaaaggaagtcagttcagcatcacttatcaatatgcggcaaaagacggaaataataatgccattactcaagctatccgcatagaaaatcaatctttaccttctactgacacttggaatccgggagcttctgtaagttataccatcggtatctcaagaaaaactatttccgtgatgtcagaaaatgatatcgcatcatgggaaggaggcacggattctgaaacggtaaatggaacagaagagaaacaaataacgaattaatgggacaaataaaaatcagccttgtactaaggtgctaattttaaacaagataataacaaagaaaaatgaaatctttcaccggcataatcttttggagcatcctcttgatttgtagtgcatgcaccgacgaaaatgaaacaaataatggaaaaagaacggactgctacaatggaactcctctcactgttcgagcaacagcaaccgggtttgaaaacgttcccggttccgaaaagccttccacacgtgcttctgtgacagatgaacatcttaaaacagaatttgtagacggtgattctattggtatattctccataaaagatggcacaatagtagatgacattaacaatatcccattgatttataacctgtcaaatgatagttggagtccggttgaaaacagcaagacactctattggtatgatggagcgagttacatcgcatactatccatataggaagaatatcacactagatgtttcaaaggatacagatgaagctattgcttcgttgaccaggaatgagaaactgcaaccttcgaaagaccaatccacaaaagaaaagcatactgtgagcgacctgctgattgctaccggcgtacctactaccggcaattcttccggaataatcctgaacctgcagtttaaacaccaatttacattgcttgtgctgcaaccacaagcatacataggttgttttgcacccgaaaatgcaggttttgtttaccacaaagaatcaagaattttaggaacagactcagcagctatcaatgtgaacttgaatggcattactccatatcagatcgattctgtaaaattctgcgccattgtcccatcacaaaaaaatgccagaattaccggaagctatgtaaccgccgacggcagaaataatacgaatacaaagataaactattcgggcagttccatcacttttgcttctgggaaatgctatactctgaaagtaatcagccctgtacccggcaaaggaagcacagaaagaaaactttatcccggagattttgtctttcagaatgaaaccgaaaaacgaatagagatacatcccggagacggcatgctggaagaaaacgggaaaatatatgattatcagaatgctattggaatggtcattacttgcgattctaaaaaaatgacagatgtaaaatgcaatgaaaacggttggactcatgcttatgtaatggggtttgaaaatttagggaccggtcgttgggggggaatggaacgaatcgaagaagggattactccaatgacaaaagatgatgaaattgagaagaatatgaacggttattctgaaacagaacaaatgttgaagaattatactgctaatgtacagggtagttacagtgcttttgaatcaataagaaaatatagagacagtaacaaaattcctgatggacttaatcgcagtccatggttcgtaccgagtatcggacaatggtttgatatgctggtgaatatttgtggaaaatctccaagagattttcgaaatgaaaccagtaacggcctaaacgacacaggatggggacaagaaacactggataaattgactatacagttatctaaagtaggtaattcgttaccgcagtttagtgatacctacagacttggcttcagttgcagttcccaatatgataaagacagatgctggatgttactttggcacattgatgatcctgaatatcctaattgggatagagtctgtttgcaaggatatgataaaaaagcttattggaatgtacgtccgttttttgctttttaattatttatcgtcttgaaacaatcttgtttcggagcagcagaaacttagtggatatttttttcatgcggttgtttgtgataccctgtataaacactcgtcattttttaggggggggtgtatgacagaccaaaacaagtctgccaaagggaattacacccattgcgggagatgatcagaggacgtttctttcatgttcctgcaaagtttttgatacatatgcgtaactttataatcagattcatacttaaaagatcttacccatatctctaaacctttcctgccctatggttaagggttttcttcctgtttgctttatctccgcaagcctttggagttaactccatagccttgggagataactccaaagcttatggagacaactccaaaggctatggagatagaatacatccgtataaaaaggcttaatcagggaagagaaaaggcttatgcaacaggaacgaatgtgatatgttgttattacggcagcagaaagatcgaaccgtttaaaattcatgtcaactcttttcacacgcaggaggtatatactgaatctaaagaaagatatgaacaggaaaataagaagtagtccccgttaaatttcttccccccttatcttataaattgaaccacatagttccattaaataaaaatccccttcaaccgtagctgaaggggatttcactatataataaagtattattaatagcttcctcgcatattcgaagcactacatttcactgtagaaacaagttctttgtcattttctccctttgcagtcaccttaactacaatagtatcactcttaggtactactttattgaaagtttcgtaaaatttcatatcattaaaaggcatatggaaactaatcaaagcacctcctgtctgataagcatcatcagcccctttggtctgtcgaagtcttgtcaccaatgtatcctccttggcttctacagcatataaatggaaatcattcatgttcagctgttctttagttttaaaggtaaaaggtacgttgacatatccatttatagcccatatcttattattagaatcctccaatgacactagtgcatactcatttttcaatgtatcagcctgaacattaaaatctttataattcaaaatagctattaggccaacttcacttaccttataagactttttcccctctgtaatcgcttctccttccatcagtttgatccctacctgcacacgcttgtaataactgccatcagatgccttaagaccggccaatacacttgaagccactggagtataagtatatccccatgcatctcctttcaggacaggtccaccaaaaatactaccatcttccacagtaacgatctcataaagatcataattggggccgctatcaccatcattcaaacaagaactaaaagtaaacaccgatactaacccagcaaatattgctgccaatttcatttttttcattttcttctttataattattagggtttgcaaaattaaataaaagaatcggtttccaagaaagaaacttaattctttttattgttttaatgattaaatgaaaaattggcttaaatactgcgtcgccacttgtcttttaacattattttttattcatgtttcatcctctgataagacttgctttatcttttgttttaactatttttttcaccgaaattcacttgtagcctatccgccattaacccattaataaaaattaatacataaaagaacaagcagttgggctatagtaccactttatttcctatctttgaaacaaaacacccattaaccataaaatctagaatattatgctaatactcaaga

SEQ ID NO: 3956 - DNA, 3854 bp, Unknown
  gut microbiota DNA sequence
ccccatgccaggactgtttttccagcagtcgtgaatagcccagatctccggccggatggtattcgaaatccgccgtctcataacgccacttgctatcagccccgcgttcccagcctgtcgccgcctttattgttccggcatccttgccggacttttccatttcgcgggcgacggcgaggttctccagccgcagggaggccccttcagaccggtcaagtctggaggcccctttctctccgatgaagcggaaacgttcatgtgcggttatcttcaggtcggcctcgctgaaaatgacatagttccgcgcgccgtcagcccggccgccggttgaacactccgccggatagtcaatcccggtaaaacccgcccgcgaaagaaacccgctggcaagccgctgtgaatcggtatcccggtccggattcatgaacatatggtccaaaaagccgtagaactctttcccgctgttccatacatgcgacctgccgctccagaactccgccgtggcttccggaaagaagaaacgttccttgcggagctgcaggaatatctttccctgctgctccgcggataccggcctgtcccagtacagatagttcatcccgttgtcttccggaatttccaccgtatagaggtggcgcggcggctcaatgcgtatcctgcccgcatctatgtcggaaagcagctcctgcttctgccgctcgaatgccttcctccgtccgctgtgtgcgcttgcgatacgcccgtccatatacacggaagaaatgttccgtttcaaactgtccacatcggtggaagaaaggatctggcgtttccatattctccatacctcatcaaaataatattcgttgtcaagcaccggggataaaggctccccgtcataggtgatgtggtttccccgctttataccgatggccgcatatttgcgggcgattcctttcacttccgtcacgtatgtcccccatccgtaggcctgcgccccttcaccggttccggtaaaggcatggtcgaaatgcccgaaggaggccggactgccgtgatagacctgacggaagcggatgttgtcatttgatgtggaaaacgcgcccgtgttttcataagcgtccttcaactgtccgggagacatcacggctatgtatttcactccctcgtcgtaaccgacaagcccgtcatagcccgcctccctgattttggacaaaaactccggggtttccgtcagcatccagcagtttcttttgcttgatgccagctccagcgctttctccggggataccgtacctccttttcctccataaaaagacaggacaggtatctcgctgcccaatgactgcaggattttttttacggcctgcccgtctttcgggtcaaaagggtttcttgaatttacatacaggtcatacacgtatccttcttccgtccattgttcattgccatatttgtcatcaggaatgctcattgcacgcgtctctgcaatacctcttgccttttccgcatcgacggaggtgaaaatcaggccggaatattcaccgcccttgaatgtgtggaacggagccttttggggtatataagtgatcccgtccctctgccatcccctctcgggagtaatctggtctctgcgcaaaggtgttccatggtggacaaccagaggctcgccattctcatcgacaatccttgaagctgcctccggtacattttcccagtttccaaaccagttcttgaatgctctggtgcgcacttggacccactgcctctcattcagggaagtcggactgccgttcggagctttcatgtatatgccgtccgccttgccacgtgtgacaagttccagttcttcgtccgtgacatgtttatcggaagtatgtgtcattgtttgccggcttaatatgataccttgttcataaagtcataaagagttttatcagcaaaaaacttgtttacttatttacatttccgaaatttaaagtaaataagtaaacaagtgatatatgtagaatgcaaatgttacttacatttccgcattggcctgccggcttgcctggtttatggtgcctgccgccttcagtgcatatcccgcgggtgttctggcaagcatcagtgcgcttccttttcctgcggctccggatgcgccggaaacaaggggcggctgtacggccttccccttcatcagggagtgccattccccggctttcatgttttccacggccaccctttccttgcgtagttccttgacaatcttccccacattgcattccttcctttccggaacggctgccgagttgaatttttcataagctttgacaagcttcttctccctgtttttcccggcagccgagacctcgctttcccgttccgcggcgttgtccgagtactgcgcctcgtaagtggcctggaagtactccctgtttatttccctgatctcgctatccagtttttccaccgcctctctgacctgctttgccgaaggtttctttgccacgtcctccgccgctttctttccggagtctccggaggtttcggatgtccgggccgctgccgcctccttgccggcggcattttccagtctgaggccgtacatttccatcgccagtcttttgatctcttctgtaggcgaactgataaacggtgccgcatcccggtctgcgttcagaacgacagactgcaccttttccgtagggttttctatataccggatattcatcggatcgtttctgacagccgccagttgtacagcctcggacggggcggacacgtatctgatgttctctcccttggcctgcaccgccgccagccgcacgctttcctcaggctgcctgatctgccggaagatatccggacttctctggacggccatatgctgcaccttctccgtcggttccgctatatgacggatgcattccggatttttctgtacggctgccagctgtactttttctgtcggctccctgattgccgagagataccggggatctttcaggacggccgtcagctgtaccttttctgcgggcttctgcagcaggaagatgcattccggtctcttctcgacggctttcagctgtactttttccgtagggtttgggatgaagccgacataggaaggcctgatgcctatgaccgtcagctgtaccctctcacttggcgaagtgatgaaatggatgttgtgcggtgcgtttctgacagctgtcagctgtaccttttccgtcggtttctcaataaagcagatgacacttctgtcccttctgaccgcggccatctggacacgggcggaagggttggcgatcatgctgatggcgcggggattgctcaataccgccctcatgtccttgtcgaacagcgcggcaaggtgttccaggattgtaggcatggctttcaatgtttaaaggatttgacttcatcaaaaaactcctttacggcttccgtatccggttctccgagtttcctgttccccttcatccggaataccagcctccgggctgcggccagaataccggttgtgggcggcaggtccgccttgaacatcctttccacggccgtgaagcaggccaggggggatggggcctgcatgagaaggacactttcaggagaggcaattacggcggaaagctgtactttttccgtagtgttggtgaacagccggacaagttccggctttttctgtacggcggcaatctgtactttttctgtcggctctttgatcctttggattgcgtccggattgtccagaactgctgcaagttgtgcatgttccggcaacaggttgttttcatttggcatggtagtttcttttttatgttatatttcggatacaatgataggagaatacactgcaattgtattgcgcttaataaaaattaagaagg

SEQ ID NO: 3957 - DNA, 2610 bp, Unknown
  gut microbiota DNA sequence
ttaaaacttaccaaccagaaatttccgctgagccataattcatcctcacccccggcagacaaccgctgatgttggtaatcatggagagcaacagaatatccctctcgcgcttgttgcggacgtgcgtcaaaccacgcttcaaaaagtcgggcaaacggtcgaacagttcatccggaagacacggaacttcacgacgcaacttgtcagcctcaagtttctctaactcagcctcttcctccccctcattgggctcagaataccgcataggtgagccctgagccttgtgagccctggaagcaggtgtttcgggccccttgttcatgtcggcataccggtatccggagtctatgcgcggaggtatatccccggcggcacaccccatacccgccagcctttccaccgccagcgttttcagccgtgccaactcttcctcgcccactcctttatagcgggcgatacgtcccagcttcaacaaaaactcattctttttgccatccacaaagggattctgctccaggaactcgttgaagaatgtgtgcagcatgcccgaagccgcaacgggaggtttggacgcacttgccggggtcttcactttcagttccgccagaatctcccccaccctgtcgggatgctccgtcacaaagcgccgccagggaaaaacttcggtatccggacgaaaaaaagcctccggatcatacgatgcaaagcaaggacgggtgggattcttgcaactcatgtcacagggaaaggcaagaagctgcgccacgtgccatgccaccaatgcgtatgccatacgatactcgtccacactctccgcttccacacgcaccaccagtttcagcccgtcgtacgaaacgctgcgccatgccgccttcacccaaggagtgtccttcaatacctgcaagaactcagacacacggccgttacatttatccacatccagcatggcgtccccgctccactgcttcagattggtttcggcatggctcccatcgcaacgcccggctatcaccagcgcggccagttttctctttaacttcttggcctctgtctccctgcccgaagccttcaggcgctgatactcttctacttgcaccttccagcgttcgccacgcagaagtttcacaaactctttcaatgtcatatccacggcatgttcatcgaacaccgagaaatagaaagagcataaatcggtataaaccattcatgtatgaatttaaattatcaaaaggagggcatttccctccaccatgaaagcaaaagtatattgcaaacccatacaatcaaaagttaaaattgtacacttacccaacgtaaagcactgatttacaatacccatttatgatacaagtgtacaaataaccgggagacttccttttaatgtcttttcacattttgctccttatttcctttctttcctctttttcttctctttccgttctttcttcttcttttcctcctttttccgcagaaactcgtctatatcagccaacatacttttgcacatgcgcttcagaactctcatttcctcatcagtgtagccttcaccggacaggcgatatccggccatgattttttccaactcttgaaggaagctcaatctgccactatttttcttataaatcttgatttttccacaatgttaatatcatttaaaatataaaaagcacaaaagtataaataaatacgtcattcttgttaattttttcattttttgcgaacaaatagcttgttatcgtaaaaaaatgtctatatttgcatcagaatttaacgacaagcttacctgggaatgacacaggtaacagcgtagcgtgctcaagaggcatcatttctttcattttttagaacatctaacattacttttccttcctccgaatatgaaaaaatggctagtggcgtatgtccgccttcaccacgaaaagaagacggccgaacggctgaccgcaatgaacatagagaacttcctgcccgtacaagaagaaatccgccaatggacttaccggaaaaagaaaatagaacgggtggttatccccatgatgatttttgtccatgtggatgcggcggaacgttcgcaggtgctcacgctgtcggccatcagccgatatatggtgctgcatggcgaacatactccggcggtgattccggatgaacagatggaacggttcaaatttatgctggattattcggacgaggcggtggagatgtgtgccgcgccattggctccgggagaattgatacgggtggtcaaaggtccgctaaagggtctggaaggagaactggtggaaatggatggaaaagcgaaagtggtggtaagactggatttgctgggatgtgcgggggttgatatgccggtggggtttgtggagaagataaaataaggatggcggacgctaggaaatgtggaggagaatttgtagctttgcggtaagaaaggagaataaaggcatgcgtttgcaatctaaagaaatacagaccatcatccaaatagccaaagatatttatggcgaaacagtgcaggtatatctcttcggttcccgtctgaatgacgaaaagcgcggaggagatattgatttattagggctcagcggaaatttctggttggtaagtttt

SEQ ID NO: 3958 - DNA, 11636 bp, Unknown
  gut microbiota DNA sequence
cgttttgattgaagcctccggacttgaagaagttccggaggctttttttttgtatccgcacgcatgaaatgtgacctctaccgttttttcccgtgggtgtgggtacctttcccacggaactgtccggaaggctccgccatgtcttttctccggcaggggcaggtccggaaaccctcaccgggtacttatgccttggaatagggactggaaatagaacaggcaggtctgaaggcctgccctgatagagaaccgggagatgattatagagtctttatgcaagctatcagtttgtcgacatcttcttctgttgtatcgaaagaggtaacaagtctcatttctcctatggtttcgttccaaaagtagaaatgataatattcttgtagcttatcttctttttcacgcggcatgatgaagaataattggttgctctccaccgtttgggtaaattttatatcaggcattgtggaaagtttcttgtacaagcgttgcgccattgcgttggcatgttgtgcgcatgttaaccataggttatcttcaaggaaggctgtgaactggcaagagatataacgcattttgctggccaattggcaggcttgttttctggcataacgtgcttcctttatcaaatcctgattgaaaatcactacacattcggctcccatcagtccgttctttgttcctcccaaagtcaatgtgtcaattccgcatgctcctgatatatcatcaagactcattcccaatgctgccgcggcattagagatacgggcaccatccatatgcacaaacagtccatgccgatgtgcaaattctgtcaatgcgcatatttcttctggtttataaattgttcccaattcactacattgacttaggtaaattgctccgggctgagaatggtgttctatgccaaagttaaccataaatggttttagtaattccggagtcagtttgccatccggagtaggaattgtgcgcatgaaacagccagtggctttactgggggcaccacattcatctacaacaatgtgagctgtgtcggcacagaagataatatggtaaggacgggtcattatttgcagcgccatagtattactgcctgtgccattaaaaacaaacagtgcttcacatggacgtgaaaatagttctttcactttgtgggcggcttcttttgtccacggatcatctccatagccaagtgcatgtccgttattggccttcattaatgcttccatgatacggggatgtacacttgaattattgtcagatgcaaaacttctcatattctttttctattttacaatttatttgtaaaggtaggagctttttcaacaaaatgcaatgaaacgtcattgaaataaatacgcaaaaagagtatcatgcagatgtattatacgtgtaatgcttttatctgatctttgccatcggaaaaataacaaggtaaaagtatgatgaaagctcagatgaaaggcattagccttatgataattctcttgatgttggtattgaccgtacaggcggctgctttgagaggaactgtaacagataaagcgactaaagagccacttattggtgctgctgtacagttaagtggtacaaatacaggaactattactgatgtggatggtaatttcgaacttgcaggattaagaaatggaacgtacaagcttattatatcttatgtgtcttattgtacacagactgttgaggttacaataaacggtatgttcgaaataaaagtagaactagaacaggataatcaacaattaggagaagttgtggttgtagcggatgctaaaaagaatacggagaatgctattattacccaacaacgtactagcttggttatgcaaacgggagtttctgcccagcagattaccaagacgcaagataaagatgcttcggaagtgattcgccgtgtaccgggtatcagtataattgaggagaaattcgttatggtacgtgggctttcacaacggtataataatgtgtggattaataatagtgccgtacctagttctgaagccgatgcgcgtgctttctctttcgatattattccatcgtcgcagttggataatatgttggtagtgaaatcgcctgcaccggaatatcctgctgatttcagtggtggttttattttagtgaataccaaagatgttcctagcagtaatctgtttactatttcggttggaactagtttaaatgatcagactcattttaaaaagtttctgtataataaaggaagtggcacagattttctaggtttcgataatggctttcgtagcttgaaaggtggaatcaatgctgtgcttagtccgatgaacaatggctatgatttattaaataatgggttaaataatgactggaccgttaaagatcgtaggcccttggcagatcttagcctgaatatgaatttcagccgtcgctgggtggatagtagcggacgtactttggctatattaggaacagtgaactatagcaatagctataggacatatctggatatggataacaatttgtttggtgcttatgatatgactcacgattgttctaattatttacgtaaaagtatagatgaccaatataatcatagtgttcgtataggaactatgctgaattttacttatatacctgccagtggtaacagtcgctatgagtttaagaatatttttaatcaattagggaaagaccgctatacttaccgtaagggaacagatgcacaaagtgattatgaagagagtgcggaatattattatcagagtcgtaccacttataatggtcaatttacggggaagcatacattgggtaataccgataagttggattggagtgctggatattcttatgccaatcggaatatgccggaccgccgtcgatatactaccgtactcaatgaggagaccaatcagttggaagtagagaacttgaatgagattaatcgggagttttcccgattggatgaacatattttgtcggctaacatcaattatcagcacgatttctctttcgggatttttactcctagcctgaaggttggagcttacacggagcatcgtgctcgtgaatataatacccgtttttttatctatagttggaaaaatggtttgccgggtgcttataaagtaatgaatgtccctaatgaattattacaagagaagaattatggggagaatggactttatttattggaacaagtggattggcgcaataattacgaaggcaataatctcttgagtgctggttatgtagggggtaatcttccgttgggcaaattgaatgtatacgcaggagttcgttttgaatataatagaatggagttggttagccatacacagaaaaacgaggaaagccccactagtgtgttttacacgtatgatgactttttcccgtctgtaaatgcggcttatcgtttgaatgataagcatcagttccgtttatcttatggacgtactgtgaatcgtccggaatttcgggaggtttcttcttctgtatattatgattttgatcttgccagcaatgtacaaggtaattataatttaaagcctgcttatattgataatttagattttggttatgagttttatcccagcagtggagagctgatttctgtttctcttttctataaaaggtttaagaatcctattgaatggacttatactgtatccggaggtacagaccttatctattcgtatgtcaatgccaaaggagcggataattatggagtagaagtggatatacgcaaaaatctggattttataggtatgcgtaattttagtcttagtctgaacggggctttaattaaaagtaaagtgaaatttgagccgggagccaaagagaaggaccgtccgatgcaaggtcaatctccatatttgattaatgccggtttcttctatcaacatgccgatagcggatggaatgctgcattgctttataaccgtatcggtaaacgtattattggtgtaggccgtagtttgggaaccgcagacaatgaagtcagagtacccgattcttatgaaatgccccgtaatgcagtagatttaagtgtttcgaaaaaaattggtaatctggaaataaaggttgctgtacgcgatttgttggcggagaaagtttctttcaagcaatttgaagaaactagacatggaaaagtggagcaaattactcgtcaatacaaatcagggcgtaatttcaatttgaacattaactatacgttttaaaatagaatgaatctttcattattaaccaataaacaaatggaaatgagaactgacaagtttatgatttacgtattctcagcaataatgctggggggaatggttgcttgtagcagtgatgatccggaaactgatacaggaaacggtaatggcaacggtggaaatgccgaagctccttatgtatggggggctgagggggctattaaaacatgtgaccacttgttatttgatgatgataaaacagagaatgccaaaggtaccgtgataggaaatggagatcaggagtttatttttaagggtacacagactttgtccaaaggaacttacctgatgaaaggatggatttatgtgggaactgggtcggtattgaccatcgaaccggggactgttatcaaaggggataaagatacacaggctgccttgattgtagaaccgggcggcaaactaatagccgagggtactaaagacgctccgattgtttttacctctgaacagcctaaaggccagcgtaaaccgggagattgggggggattgattatttgtggtaatgccaagaataatcagggagtgttgaaccagcagattgaaggaggtccacgtactaaacatggaggaaatgatgatgctgacaattcaggtatattgagatatgtacgtgtggaatttgctggttatccttttcaaaaagataaggaaattaatggtataacttttggatctgtaggtagtggaactaccattgatcatttacaggtttcatattccaatgacgactcttacgaatggtttggaggtaatgtaaattgtaaatatctagtggcttataatggatgggacgatgagtttgatacagataatggcttctccggtaaggtccaatattgtctttcaatccgtgatccgagaatcgcagatacttctcagtctaatggttttgagtcggataattgtggagacgcctcattgatagaaccctatacgacagccgtatttagtaatgtcacttttatcggaccgttggggcgtgatgccaactttgttaataatgagagctatattacgggcggtagcttcaatcctaataatggttcagctttaggcaagtttcagtctgctatgcagatccggcgttccagtcgtttgaattgctttaattcagtagctgtagggtatcctgtcggtttaattattgatggtgagaaaggtaatacagttgagatggcgaaggcaggaaacataaagttggagaatatttggtttgcaggtatgacggtggtcggttctgatgctaacaaagtatatgatgatgtgctttatgatgccgtgaacaagcaaatcattgatgctggacaagagtcttattcttctacttttttcaagactcagaaaggaaataaagtattgactgatgtcaatgagttgaaattcaaggacgggcgtaatatcggtgttaattatatgccggatgcagatagccctgtgttgacagccgcttcatttaatgacgcactgttgagcagcggttttgagacagtagaatatatcggagcgtttggaacagatgataattggttggatggctggactaatttcgatcctaataatacagactactaatacacctttgaatatacacacatagctgttaattttaggggattctatgcggtaaagtcatagaattcccttatttttgtatccaaacctagaaactattaattaatacacctatgtatccatttaaatttaaccccattctgaaatccaccatttggggtggagaaaagattatcccgttcaaacatctgaatattgaacagcctcaggttggcgaaagttgggaaatttctaatgtcccaggcgatgagtctgttgttgctaatggaactgaagccggcaaaaatttgagccagttggtaaaagaatataaaggttctttggtaggagatagtaattatcagcgttttggcgataattttcccttgttgatcaaattcattgatgcttgtgacgatctctctatacaagtgcatccagatgatgaactggcaaagaagcgtcataattcgatgggcaagaccgaaatgtggtatgttattgacaatgccggggggaaagcacatctgcgttcgggattaagtaaaaaaattactcccgatgaatatgctgcaatgattgctgataatactatttgtgatgcattggctgattatgccgtacaaccgggtgatgtgtttttcttgcctgcaggacgtatccatagtattggagccggatgctttattgctgagattcagcagacctcgaatgtgacttatcgaatttatgatttcaatcgtaaggataaaaatggcaatactcgtgagttgcatacagaattgtcaaaagatgccatagattattctgtagaagaggattatcgtactcattatactccgaaacagaatgaatctgtcgagttggttacctgtccgtatttcactacttctgtttatgatttgactgaaaatatgacgatagattatagtgaacttgattcatttgtaatttatatttgcatggaaggtacatgtacggtaactgatggggatggtaactcattggaattgcaagccggtgaatctatccttttccctgccacaacaaaagaggtgaaagtgactgtggaaggtcatgttaagttcttggaaacttatgtataaagattcgttttgtttttgataaaataaactgctgctttcattgtatgtattggaaacagcagtttattttattaaaaacaatgtttcctgtttaaaaggtaaactttaggcatacaggcttattggtttttattgttttgcctgtgtctttcagtagccctgtttgggaatctctttcaaatacttgtatggagttgctgtctctgcaggccaccaacaggtatcgtccgttccggctgataataaaattacgtggatggataccagtaagctgataacctgtctttgttaatgttccttcttcctgatttatggagaaaatagcgataccgtctgcttttaagcggttggatgcatacagaaattttccatcaggtgaaatgtgaatatctccgctacctttggcacccactgtgtcagcttctatatattgtatggcgtttaattttcctttgtcgtaagagaaagctataacttttcctgagatttcattaatcaaataagcgaatttttggttcggatggaaacaaatgtggcgtggtcctgatcctgattctacttttatattaaattcttcggattcattcagcaaggaatgggatacaccatcagttacattctcactaacaggaaatacatgaatctggtctgtacctaaatcactggcaagtagatatttatggtctggagtgaattctatacaatgtaaatgtggctgtgtttgtctctctttgtcaagactatttcctgtaaaggaaataaggcgtgtttcggattttaatttgccgtctttatctagtgggaaaacggtaatactacctcccatataatttgctgtcaagacaaatttttccgacgggctgagagttatataacaaggtgcaccgccgtcagtgggttgagaattaagcaaagttagtctcttttgttctttatcgaatttgatggcattggcggtagaactttttccggaatcctcccctacagcatatattctttctccatcagccgacgggatgaggaaagatgggttggatattccttttattccgctgatatattgtgagttgccattttgttcatcaaagttataaaccttgataccttcttcctccggagttgcataactgcctaccaacatatacatcatattcggattttcttcaactgtaattgcttccgtttgtttcttgggagagggtatacagcctcccagtatcatactgctcatacacaataccattaattttttgttcatattgtctgatctgttaggattagaaaaattattttcaaagatacattgttctcattaaaatgcgctaaataaatgaataaataattggatattaacagaagtgtgtgtatatttgtaatctctttatgagttaccagtacggggttgactggatttgacagcgtggctaagtggtatgtaagcatgcagtgcgtggttgattggcactataatcccagttttcaaaattttatctggcaacgaaaattatgctcttgctgcttaatcgaatcatagtagattagctttatttctgccaaagtggtggaaacgagacatcactcaaaagctcttgttccgaagcgtttgatcaagtggtgcagtaaaatcgggaatagttagagatccgcctcgtgtctcttacgaaaatttagaggataaggtataagttggtggcttcggtcctgcttatactcgaaaatttaggcgaagataagcatgtagaaagcgtatggcttcctcgtttggacgagggttcgactccctccagctccacaaactaagagtaattcgtccttgggtttccataatccaaggacgaattcttttttagaagagtaatgtatgtagcttactcatgtttcttttctgatttgtgtagaatacattttctctctttttctaaagaaattcttgtttttccataaaagacgcttgtttaaagatgaatgctattttattgtttaatgactaattctattacataatctatgtcatcaggtacttgaggcagttttataaatatgccgtctttctcctgtttgaaagaaagtggagttttggaaatgaactgtattgctttctttacttttgccttcagaggtatataaagtgcatcatcctgcaaatctagtatatggatgaataaacggtcacctttgcgagttgataccccccatgtatgaggaactacatcaccaccacgggttccataaatcgtttctccatattgattcatccatttacccacctgttttagatgttctacagctgtagcaggtaattctccgttgggttgaggtccaatattcattaacaaatttgcattttttccagctgccttaaccaaatagtgtatcaattctttaggggatttgtaattttggtcttcaattctgtagccccacattccgttcattgtttcacaagtttctaaagggagttcacttattccttgtcctgctgaaaaaccggctttgttttcaccgggcaaatcacgttcgaacatttggaaatcttctcctgcataaggagttcggtgatgattgttacctattagacaggatggttgcagtttatgaattaatgcgtattgttcttccagttgccaattgaagttggtaggttgatcccaaataccatcaaaccaaatggcaccgacaggaccatagttagtcaaaagttcggtcagctgtttattcataaacttgtagtaacttgcccagtttccatgtcctttgggacgtcctgttccatgtccggtgtttccttccggatagtcgtcacgaaaccagtccaaatgtgaataataaaaatggagtttgatgccttgtttttgacattcttctgccagttcttttagtatgtctcgtttgaaaggggtggcatctacgatattaaaatcggattcttttgtatcaaacattgagaaactgtcatggtgtctactggtaatacagatatatttggctccggaggttttgatggcagaaacccattcggcagcatcgaagcgcgaaggatagaatccggatgccagtttggcgtattcattacggttgatgttgtgagtgttcatataccattctccttgggcggtcatactgtaaatgccccaatgaaggaatataccgaatttattatcttgaaattcctgccgtgcttttatattttcaggagtaggtgtataaatttgattggaggtttgtgcgaaggctgaagttcccgccatcaataacaaggctgcgcctaatttgattttttgtgctaatttgtttctcattgttattataaatttgttttgcgaaatatagttatactcttggaatatttaaagcattttttgaaaaatgttgcactgcgaattgagttttaatggattctagctgggggtatgtaaagagtcttttttgtttataaggtataaaaagatgttttctattgtttggaaattaatcattctatacctttgtgaaagtaatattgaattttatatgagagtaaaagaaattcctatactgcttttgaccggttatctgggcagtggaaaaacgacattagtgaaccatattctttctaataaacgtggtattaagtttgcggttattgtcaatgatatcggtgaggtgaatattgatgccgacctcatacagcggggggggattgtaggaaagaaagacgaaagcttggtagcacttcagaacggttgtatctgttgtactttgaagatggatttggtggagcagatagatgatattatgaagcaggagcgttttgattacattgtgattgaggcaagtggggtttgtgaaccagctcctatcgcacagactatttgttctatttcaagtatggggaatacgtacgggggatgtcgtttggattgtattgtgactgtggtagatgccttgcgtctgcaaagtgagttttcttgtggcaacgatttgacctgtaagggtattgacgaagaggatattgaaaatttgattatccaacagattgaattttgtaatgttgtattgttgaataaggcctcggaagtgaaacgtgacgaattggaacgtatcaaacagattatccgtacattgcaacctgcagctgaaataatagaatgtgattatgctgatgcagatttggataagataatctatactgaagcatttgactttgaacgtactgccacttctgccggttggatacgtggaatagagagtgcccttacggaagagcagaaaaaagaagcggaggagcatgcgcgtcatcatcacgatgaggagcatgcacaccatcatcatcatgaaggtagtgaagtggatgaatatggcatcagtacttttgtgtattatcgtcgtccggcttttgatattcataaatttgatcgttttgtatccacccagtggagtcgtaatattattcgagcaaaaggagtctgttatttcagcaataatcgtgatatgtcttttctttttgaacaggccggtgtgcagaaaaagttgaaggaagccggtttatggtatgctacggcacctgaagaagaactgatagaggtaatgcgtcaggagccgggcttattgcgggattgggatgataaatatggagatcgtatgcagaaaatagtttttatcgggcgacatcttgataaagaagagttgatacgtgaacttgatgagtgcctggaatagaatttcatttagatggaggtgtgtcgtaatg

SEQ ID NO: 3959 - DNA, 55696 bp, Unknown
  gut microbiota DNA sequence
atgtgttcgcaacatctaaatatagctactgtaagctcgtaaaaccgtttaatcagccaatctataccttctttagccatttttgcacacatcttttttatattgaaggcaacggcaaagaaagcaaagtccatgaagaccttatcctttccaaaatggcggaaacgtttgtagttcatattgtatttcatttgttcgaacacggcttccggctctatacagctctgtcctctgtgcttcagtccttcctcggagcagagcagctctttggcattctgcctgtattttctgagcctgtgattcagttctatcgtcctgtttccttttgctttaaaacagcggtatcgcaggggacagccttcacgcctgacaactctgtaccgtgcattttcgctgacatatccggatgcggttttcacatgtccggttcctattctttgaaggtgtgtcaaaatgcaccccttctttcttttacgcacaaagcccctgcttgtgaaagtcggggctttgtgcataattagtatatatccagtgttacacgttttttgtgcttttccggatattccggcaagtttcttccattcacggaagtgtctttaaggcggatattttccgcacactttaagtaataaggataagcagcttttcgtacatggaaatgctctatttcgatatttcttatgggcttttcttcatatccatccataaagattgcatagtggtcggaacaatcagcttttacattactgatgcggaaattctcatattgagaagcatgtctgccacctcgaaaaccgaaataattggtttcaaaacggagaatggctccttttgagcgttctatagtaatattgctgacttgtatattacgaatatatcctcctctgtcacggttggatttaaaataaagggcattctttactgttccgatttgtatattatccatatatacgttttccacgccgcctgacatttcactgccgatacataaaccattgcattcagactggaacagacaattacgtatgacgatgttttttgaagggcgtcctatttcacggccgtcggcgtcacggcctgctttgatagctatggcatcatctcccgtgcggaaaatgcatttttctattaatacattggaagttgattcaggatcacatccatcattattaggatagtgactgtcaatggtgatgcttcgtactattacattgtcacagtatacaggatgaatagtccagaaaggagaattcttaatggtgataccttctactaaaatgcgagaacatcccatgaattgtatgcaagagggacgtagtatagtacctttcccaaagatcctttctgtgacagggattagtttttctcccattttacgcagacgatttctgtctgatacctctatctgagaccatgaagcaaattcccgtcctccttgggcgtctatggtaccttgtcctgtaatggctatattagtggcatgtttggcataaatcatgggagaatgtccatatagttccgtaccttcccaacgtgtccatacttcaggaagaaagtcatcagccttaccgctgaaaagtagataggcgtctttctctaaatgtaaattgacatcacttttcagtactagatttccctttaaataatagattcctttcgaaattataacgtgtcctccgcctgccaaagaacaagagtctattgctcgctgtattaactggcgtgaatgacctttttggttggaagcggaatcagggcagatcacttttattttcttatgcggaaatgaagtacgcgctatattggaaataatctgttcggctgcattgtctattttattttgaggtccgtcatgtttgtatttgaaccattggaatgaagctgctcctgcttcctgttctttgttgtaacaatatagtgcaatgcgggcgcctttccaaaaaccgaatggaataaaaaaggaagttccataaggaataaaacgtatattatctgtactgtagaagtattggaacttctgattggttatgtcgatagatacacgtagataaatttggtttccgtttgggaaagttgtacttatttctgttgtatcattggatgtgtacagatacttttgtcctttctccatcttgatacctagaacattatttatttttcccatgcaagctaatccgcatcgttgcccatcaactatttctgtaaaatccatagctattgtagcttcacttatattccccataatcttttgtgtcagggtgttgcgtgccaatctgaaggttgaagatttcaatgctttcagagtgagtgaacctggatgtgccgataaggaccatgcgtggtctgtcggattatgattaaactgccattgcagtgataggttgggggtagagaaatcatcatctgtttgcggagcgaatatggttttgctttcaatgggtttctggcatacatatacaggttctcctattccatttctatcaaagtctactccgataacgggccaatcgttttcccaatgcatgggctgaagatgaactacacggcctaaggcatgatgatgttggaaatgaaaaaaagcccattgatcatccggagtatcgacaatggctccttgatgagggccgtttatcgtagtacttccttgttccaatactactttcttttcataaggaccatatatattttttgagcggaggatagtctgccatcccgtacctactcctccttccgggatagagagataatagtaaccatcttttttgaaaatttttgttccttcggctacaggtccagtgtatacggtcattccttcatcaagtagacgtgtaccgtctgcactcattttatgaataatgataggcccggctccatgacggctccggcctaggtatgcttgaccatcttcatcccaaaaggggcaagggtcttcccatttttctactttcttaactaaatgtaaagggctccaaggacctgaaggattgacagcatttgacatgaataatccttctttgggagtacagaaaaagacccagaatttgttatcatggtaacgaattgagggtgcccatgaacctcctgcatattgttggttgttatcccagccgggaaaatcaaaatggtgatagatttgggaaatcagtttccaattgatcatatctgaagattccaatacttgcattcctagaaaatgaaagtcggaagctatcatgtaatatttatctctgacccggataacgtccgggtcagagtagtcagcatttaaaatcggatttatgtatgttccattgccctgatctccccatttaccgggagtaccttgagctgacaagactaatacattatttataaagtatagaagaataagtaaaaaatttttcatcagcatgttttttaacttaataaccagggttttgtgtcactttagcttgattcaaatcaatggcagcttgtggaataggacgaagaatcttgtatttaccatcagggcctatcatagcagattcttttatgccgtcttcattatattttgtggcatattccactaaagtgtgagtacgcttcaaatctgtccaacggacatattctccagctaattcacgagcacgttcatcaagaataaaatcaatattaatatcgttgctggtgacagtcatttctgttgtgtatcctttacgaatagttcctggacgttgacgaagtttattgatcatttgtgcagcctcttctgttttacccatttttaaataggcttcggcggcaatcagataggtttctcctaagcgcgctactaccacatcatgcatgctgcaagtagaattacggttagcaatagaagtttctgaataatcatcaaatttcttgatacaagcattgccgtagtcttgtgaacgacggtctttgtatgtggctggggcaccgttggatggagcaataccaccgtctgctattgttttgcttaccagtgtattctttttaattccataaggatcgtctgctttccaggcagcgatatcttcatctgtagcccatgctggagcataataataaatgatagaagaactagtcggtgctgagtaatagtcgaaataactggtatggaattctaacataaaagtttgttccaaccgtgcatcaccccgactatacatttgctgtagacgtagtgaaggagcaaagcaaccgtcaattgccttatttcttggtttttcggaaccacctaaataagctccgaattgggcttgttggtaggaaccgtcttttacgggatcttctacagcagccgaattaaactgtatgctccagaatatttcattgttttcttcattttctacgtcaaaagcttcttctatggagaggaaaggaatttcgccattaattgcttccaaggcatacttagctgcatttgcgaagtctgaattttgagctatattttcttcttgggcttcgtaatcagtgccatctagccatccacgagtcagataggttttggctaagtaaaaggttgctgcgcgtttattggcacgtcctacaccggagttggcacgttccattaaatgggattcggaagaggctagatactcaaactcttcaatgatgaacttataaacatctgcaagactggcacgttcatgactcatttcggcatggtcaaacatttgtttgttcaaagctacaggcccgaactgttgcactagttggaaataataccatgcacggataaaacgtgcttcgtccacatattgcagtcgtacactggaatcttccgttatgtctccataagatataacgctattggctagctgaatacctttaaaacaacttacatagaaattttttataatgccttcatctgcagtgaaggtatattggctcatgactactccctgtgactttccgtctgcatacaggtctgttcccgctacgaataattgcggttgggcattataaagctctcgcagtgtggagtaagcgctgttagttaaactggcgaatcctgccgaagtttgataaaattcagctgatggaacattagatttgttgttttggtcaagaaaatccgaacatcctgagagagttgccaatcctaatgccataatgaaatatatttttttcataatcatttaattttagaattttaaatttataccaacttgataagttcttgaactgacaccaccggtaccgtcacctacttgtgcatcagcccattcgggatcgaatccttcataacttgtgaaagtgaaggggtttaatacattggcgtagattcttaagttggaaatatgaagttttgaaatccatttctgtggaaaagtatagccaagagtaatgtttttgactcggacatatgagttatcaacgaaattttgtgcccggtcctcattggcaccactttgccagtatgcaccgcctcctttaccgtttccaccattggttgggaagggataactaccgtaatgagtggcttcctgataggctatagagccatcagcacctagtatcggagcaccttgcggtatatagtaatccatgttcagacgattcatgccacgctgtccatagtctacgaattcggccatgaagggagagtataccattcctccctgactagtgtaaatactgaaagagaaatcaatatttttgtatgacaggttagaagtgaaactgccggtccaggtcggagcacaatgtccgaggatcattttgtcattggcatcaatagtaccattgccatccttatcatagattttcatctcgccttcatagaatttggttttcattttcgggtcttgggcataagcttgcgcttcttctcgagtacagattccggtgtatttatagccgtagactacgtctatagggtgattgataaaccatttgttacccactaagtcttctttggtaccattcaattctttgatagagttaatgttacgcgcaaaagagaaggttgtctcccagttccaatctttattctttacgttgatggtattcagttggatttccatacccttattgttcaccttacccacattacttacaatagagccggtataggaacctagttcaaatggagtttccatctccatcaagagatctttggaatctttgttgtagatatcgatagatccattgatacgattattcaagaaaccgaagtcaagaccgaggttgatttcggttgtcttctcccaagtcaggtcggcgttcgtcatggtataaccataaccgttggcaacagacgatccgtaattatagtaatatttaatatttgccaaagcttgtgtgtcataaggccctacaccggcattattaccggtaacgccaaagctggcacggagttttaaattgcttaaccatttgctggcaaatcccataaaatcttcatcggaaatgcgccatgccaaggcagctgaggggaacatcccccaacgattgtctttttggaatttggaactgccgtcccaacgtgaagatacagtcagcatgtatttgcctttgtaggcatagttgatacgggctacataagataacatggagatttttttataatagctagactgactttgtacagtgcctgaaccaagattatgccagtctacatcaaatggcatatccactacattgatatagtcgccttgtaatttttgttcatagacactgaataaggccaaggcattcagactatgatctccaaaattcttgatgtaattggcttgcgtatcccaagtatacgagaatatttcatcattatagttttcggccatgtttgtttttccagaacgaagttgggtttctccgttatagaatgtaccacgatgggttttggtatacatgggggagaaagtagttttaagaattatttctttaacggggctgtattgcaaataaatgtttgccatcacatcataagaacgtgtatcgtcttttgagttcaaacggtccaccactggattgatggaggaagtcggaccaccaccattgggatagatggcggcatctttacctggttgtgaaattaattgtcctgccttttccccttcccaataatagcatggcatattaggggtcatacggaacccttccaaaatagagtagttgctaccactctctttggatgctgttgccatatttgtggagaatccggctgagattttatctgaaatcttatgatctactgctccttttatattccagcgttcataaccgtcatacatgattccttcctcattttgataccctagtcctacgcggtaggttatattttttgcatttcccgagatattgatgaaatgattctgttgtgagccgttacgggttacgatatctacccaatcggtataattattattgagatacatatctttcactatttgactgccatttccccagaagttcaggaaattggcatcagtcatttcccagttagtcattcccgaagaggcatccatagatgaaaccagataacgggagaaacggaatttcatgaaatcatctccttccataaagtccggcatattggctttggtttttacaccataatatccatcatagctgattgtagtcttggctacatctttgtctccctttttggtggtaatcatcactacaccatttgtggcccgtgaaccatagatggcggtagatgaagcatctttcaaaatgtccactttttcaatatccatcggatttagaaaatccatattttcacaaactactccatcgattacatataatggattgccgccatttaatgaacttttacctcgaatctgaatattgaatccgtcaccggcacggctagaagactgtgagatattcactccagcaacttgcccttgcagactttcgacaactgatgttgcacctttagcagaaatcgtctcggattttacactacctacagaaccggtaaggtctgatttctttactacaccatagcccactactaccacttcgtctagtagtttattatctgcttcgaccgtgatagacagtttttgttggttccctactttaatttcctgtgttttataacccacgtatgaaataactaaggtagcacctgctgaaatctccagtgtgaagttaccgtccaagtcagttactgttccctgagtagttccttttatcaatacggaaacgccgatcaatgcttctccactttcgtctatgatgttacccgtaatgattcggttttgctgaaccgattttagaattgctgaactttgttggcctgaccagttgtttgcaaaggtggataatggtaaggaaactagtcctaaggaaattccgcaagcaaaccaaaatctttttggagaataccctgtactataacagaacgggattttaaatactcttttttttctcatgtctttcattattaatttagtattagagttgtttttgttttgatgtcaaatatagacggatgttatctttttataagtggaaaaactgataatttagttggaatatctatcaaaggtagctaaacaacatatattgcgatggattaaatgtagaaagtactttgatgaatacccattttctgctaatttcgcaaaggaaacacattactttgatatgaaaacatactgggttgatattcttacctttttctgtgtagtaatactatgcctttttgcagccgatgtgccggtaaaaggagctatacctcaaaaatattcagttacgtacttttccagtcagaatggagtggaggatgggctggtcaacgatattatccaagatcataaaggtctgttatggtttgctacttggaatgggctttatcggtttgatggttataattttaagaattataaatcgaatattgaagatttgggaggactgaccaatgatcgtttattagatatagtcgaggataaattcggatgtatatgggtattgtgttatgattccacttgttatcgttttaatcctgacaaggaagtctttgaacctgtcattcaaaaaacagccaatagctttcggtcaatatctgtccttccgaatggaatagtatggttattacgtgaagatgggagtgcagtacgggtcgttacggctcccgaagatttatctatgacatttcaattctattcatcaagagaaaatacgttgtctactggtaaaatccggtctgtatttatggattcgaaattacgggaatggcttcttacggatgagggggtatatcgactatatgattcagaactttctattatttctttgtctgattgtcgaaaaagtgagaaaatacctttttattttgcaacagagttggaagaatatatatatttaggtgcacatcaaggtaaagtttataaatacttgttgactggagaactttctattcatactcaattgccaacatcggcttctgtgatttctattttgccttctgtggctggactgatatatgttactgattcagacggcttttttattcatgactctctcggtgagataagacatgtgatgcttgactctctttctctgttgaaagacaaaaccatagagtctgctaaaattacttgtggagatttattgtggcttgtacatcctgttccgggagtcactttgtttgatctgaaaacacagcgtttaagctttattgaaggaaaggacgaactgggaagaccgctaaatactgaaagtgatttttttgcttttgaggatcggaacgatattttatgggtacaccctaagggaggaggattttcttattttgattctcaaaataggcggttaataccttttaatactacggagcagcctgtcaagtggaaatcaaatgaccgctgttttgctgcttttgttgataaacaaggaaatttatggatgagtacccagctcaaccgacttaagcgtatcacttttatccctgataaatttcatatctatacgcctactcctcaggatgtagagttacctgataatgagatcagggcactgtatatagacaaaaaacaacgtatttggacgggaagcagagatatgaatgtttctatatatgatgcccggcttcgattattgaaaaggatgaaatggggcaaagtatatgccatcatgcaagattcggctggtgtttattggatttctactaaaggccagggattgataaaagcaacagaaacttcaaaaggcaattttgaattacagcattttaaatataaagctgatgacccctattcattgagtaatgataatatttactttacttttcaggatagtaagcagagactttgggtagctacttacggaggtggattgaatttgattgaaactatgcctgatggtactttaagatttatcaatcatcgcaatttgttaaagagatatccgataagtcatttttataaagtcagacatattactgaagataatcaagggcgtatctgggtgtctacaacagcagggattttacaatttaaggtttcttttcattgtcctgaagaaatagattttcattctatatgccgtgagcaggggaatgtgaatagccttagtaataatgacgtacaaatgattcaatgtatggataatgggaaaatttttgccattacttatggcggagggttaaatgagctttctcccatggggctccattcttatcaatgtaaatccttcacacagaaaaatggacttatttcagatattatttattctatgcacgaggataaacaagggaatttatggttggtgacgggtggtggattagtgaaatttgtagcttcggccgaacagattcagtatcctagtgagcatatcgcatttaatatgcatttcagtgaaggtgtgggggcaacagatggcaagcagattttttttggtactaaccgaggtttgttctattttacccctgagaatatccataaaacagattttataccacaaatatttttctcttctatttgggtaaacaatcaagaactgactcccagaaaaactccttctattttgtctgttaatcctgatgatagcagggatatgcagttacctcctaataatcataccctcagactggtattttctgctctagacatgaccaatacggagtatattcaatatgcttacaagttagacggttttgataaaaactttcgtttgacggataacgggcatgaggccaactatactaatcttcctccgggaaaatatgtatttcgtgtaaagtctaccaataatgaaggtgtatgggttgaaaatgaacgaacactttcttttgaagtgcttcctactttctctgagacaccttatgctactatgctttatatcttcttaattgtattatttattgcagttgtcatttatgtatataccgttttttatcggataaaaaataaggctaaaaatgaagaattgattactcaattaaaactcagcttctttactgacgtgtctcacgaattaagaactccattaacattgattaccggacctttggaatatatactcagagatgatagcctttctgggaaggtgagagatactttgaagattattaaaaagaatagtgaccgtatgcagaggttggtagggcagattttggattttagtaaaatccagaatagcaagatgaaactgagagttcagtatgtggatattatcagtttcacgaaagagataatcaactattttacagctttatctcaagagcggcatattagtctgaattttaatactcaattatctaaagtaaatctttgggtggacaaggataaattggagaaagttattttcaatttgctgtctaatgccttcaaatacactcctgatggcaagaacatttgggttagtatgaaagatgatgggaatgcagtcctttttcaagttcaagatgaaggagtagggataaagagagaaaagcagaaagtgattttcaatcgttacgagaatgtggttccggatagcatttacgctcctttaagttctggtatcggactttcagtagctaaagagcttgtggaaatgcattatggtagtataaatgtggaaagtgagctcggaaaagggagcctatttactgtaaggctattaaaaggtaaaaaacattatccgtctgacacggaatatatattatcagattggaacgaagatataaatttagatttcaattctcaaaacgaactacaagaattgaatgaagcggagaagccgctcatgcttattgttgaagacaattatgaattaagagtatttatcaaacaaatatttcaggaagcatatcggtttgttgaggctgataatggagaggttggattaaaaaaggctttctctgatctacctgatataataattactgatatcatgatgcctgtaaagagtggtctacagatgttgcaggagctaaggaacgatgaacgaacttcacatattcctgccatagtattgactgccaagacggatatggatagcattctgaccggtatccatacaggagctgatgattacataacgaagccatttagtattaattatttgcaagctaaagtagagaatatcctaactcgacgtaaaatgttacaagcatattattgtaaagtaggatatgaagaggggaatgaaaataaagaaaaagataaatcggttcaattgtcggctaaagatgccgcttttcttaataagttagctggaattatggaagagcaacttagtaatccggaattgaatgtagatcaattggtcagttattttagtctgagtcggaccaatttctttcataaactgaagtctttaactggtatggctcctataatgtatataaaagaaatgcgtatgaggaaagctgctgaactgattaaggaaaaccaatatacgatgtcggaaatagcttatatggtaggttttagtgatcctcattattttagtaaaagttttaaatcttattggggaatgacttctacagaatatgcaaaaaatcaggttggacaatgaatataaatgatgttaaagttatattttatcattatatcgggtgaccccattgttcacccgatataatagggggtatcttattttttcgccttatttccattgatatacacttctttcagtactacatccttagctcccgtaattaaatttccctttttctctacattattgaaacggctgtttgttacatggatgtcttcaatattgacacggtcatcatatccggtaatcaagactccgtacttacttttttcactggtaacattatccagatatacatggcgtactacaggtgggaaatttctgtcacatttttcacggttttcatattgcaggttgattttcaaaacggcttcgcgacattcacctacttctacattacgcacataaatattttcaatgacaccaccacggcagttgttggttttgatgcggatgacacgttccaggttcgggctgtccattttgcagttttcaacaaacaggttcttatatcctcccgaaatctcactgcctacaactacaccaccgtgtccgtctttcatttcgcaattgcgtacaatgatattttcacttggtacattccatttccgtccgtcggcattccgtccgcttttaatggcaatgcagtcgtctccagtatcgaatatacagttttcaattaatacgttcttacttgattccggatcgcagccatcgctattgggaccgtgactggaaactttaaccccacgcactgtcagactttcacaaaataaaggatggataacccaaaacggagaatttttcaatgttacattttctattaaaatagtgttgcaacgatatagattgataagttggggacgtaaaccgtcttcaaaagtcatttggcgcttatctatcggggcaaatgtttcggcgtacatcagtaatttgtctctgccgccatttttttgagctgtcataccttccttccagccatagtgtggagcaccacacatactccaccagttatcattactggcctgtccgtctataatacctttaccggtaatgcctatgttgctttcaccataagcataaattaatggatgcaaattgtaacagtctactccttcccagcgagtgagtacggttggagtatatagatatttctctgaagaaaattttagataggcaccttcttccaaatgcagatttacattacttttcagtgtgataggacctgttagaaattctccgggtggaactaatacagttcctccacctgtctggctgcatatgaggatagctagattgattgcttcatggcagagtatttcaccattatttccttctttggcaccgaaatctttaatgttgtacacacgatcgggaaaagaagtctttttgatttgtttttctatttgctcactttctttccaaatctcttgtggtatttgtgcatgagcaagtccaaaatatgcacatatacaaagtacactaactaacttttttaccatatctttgatgtttaataattaataatttcatagttaccaaaaaatatctacgatgcaatattaaagcatataattagaaaataagtggattaattgcccattattgtgtaaattctaataatagaggaataactgctgctacatttttatattatttgtatattcgtaccttaataatctgatattatgaaatacatcacttgtatatattgatatctgttggggaattcttgtcgtgataggaggtagtatttctactaccaaagatagtcttctgaatattataagatatacaagcgcaggattccattaattcttctagtctgaaaaaataatttagtgaactacctgtaaagtatggagtagatcaattgaactatgaaaattaccgtttggaaactaagaacaggagttttttagtaattagactttttatggtacttgtattggtgaaattaccaaaaggggaaatgtttatctccaccaatgaattgcatttgtcgctagtgatagagagcctgtttgataatactaataaatttacagattctggatctgtaactcttaaaataaagttggataaggcacaaagtaagttacgaattgaagtaaccgataccggctgtggcattcctcccgaagaacgggaggaaatatttctgtgtttgtctgtataacttagtgtgtgccttcttcaatgttacgctttcgtttcaatgcttccaggaaataatagtctgcataatttaaaggtacatctatttctgtgccatgaggaatactgcccactgaatgcattaataaaaagttaccattttttccaagagatgccagatagtttggtgaggctagagaggccataatactgtctgcatagttcttataactgtttgcatcaggcacatccattgtactaatttcataaagtgcagaagctatacaagaagcacttgaagcgtctcgtggttcattgggaatattgggagcatccatatcccaataaggaatcaagtctttgggaagccggggatgtgttttcataaattggaaagtcttcaatgcctgattcagatactttttatcatgagtttcccggtaacacacagtgtaaccataaatcgcccatgcttgtccacgactccaagtcgattcgtctgcatatccttgggctgtttgtctatgccgtaccatgccgtctgccaaactataatctattacatgataacaacttccgtttgtacggaaatgctctttcaaagtgcggtctgcatggttcactgctatatgataaaaggtggaatcaccagataatttagttgcttcaaatagtaactctaaattcatcatattatctattatgaccggacattcccaaccgcgttccgattgccagccgcgggtcacatcccatgattggataattcccggcttttcacggaaacgagtagctaatgaacgtgcagcttctatcatgacttctttgtatctgggtactttagttgttcgccatccattgccgaaactacaatttatcatgaaacctacatcatggtgccaagtcagttttttggcttcttctatggccgaagtgtatttatcagctaatgataagagagtagtgtcgccacttaactcatatagataccacactgacccagggaaaaaaccacttcgccagtcggcgtagtcacaataataaatggtactgtcagttttcagtgtcacagggtttataaatttctctgatttttctataatttgtatttcattcccgatttgtgcacgtgcaaatgctacatttttttctataaaggaatctgttctggcggattgtttatttttctctgtgcaagatccccataaagtagagcaagcgagtattgtaatatagaggactttcttcatagtacttatttttttataatttgctacgaagataatgataaatttgttgaagagaaactttaaggtattcttttactttgaaaacagattgattctgcttccaaagtaaaagaatattgatcatagaaatacaataatcatttcagttattattcttctttttgtaactgaacttttatagtattgctgtatcacttaatagttgatataccccacttataattcctaaaacgaatatgccggctacacataccaacagactgatgcgcatcggagttgctgtacgaaaattgccgatagggtcttcattaggtgtgatgaacatggcttttacaatcaataagtaataatacaatgaaatgattgtattgaccaatgcgataaatacaataagataatatccgctatggaatgctgccatgaatacaaagaacttactgaagaatccggcaaatggcgggatacctgccaatgagaaaagagcaagtgtcatgaccatagttagtttagggttggtcttataaagtccgttataatcttcgcgctctattttaccgtgggtatgttgctcaatggtattgatgacaccgaatacggcgagattggcggcaatgtatactactatataatatactagggatgccatgccctgcggagttccagccagtacagccaacattatgtaaccggcttgtgaaatactactgaaggccataaagcgtttcaggttgttttggcggatggcgaacagattggctatagtgatggtggctacaatgataatacatagtatttcactccattgttcagtcattggtccgaatactttcattaaaataatcattaaagcaaaagcagctgcaccttttgaaataacggataggtaggcgcttactgtagtcggtgcaccttgataagtatctgctgtccacagatgaaaaggtaccaagcttaacttgaaggccagtccggagaagaaaaatactagtgcaagaacttgtaatggagttcctgtcaatccggcagggatatcttcaaaatataaagtacctgctgtcccataaatcatagaaataccatagaggaaaataccgctggagaataaagccgaaagaatgaatttagctccggcttcggcactatgtcctttatatttatcgaaagctacgagacaagccataggaacggttgccaattccaatccaaggaagaatagcaggaagtgccctgcgcttaccatgaaatacatacccagcaaggtactgagggtaaggatgtagaattcgccttgtttatgacgggtgtcttcacgttttagccaagtgtctgcttgcagaaacaccagtatggtacctatggtcaggatgcttttcagaacagacgccataggggttgagtgatacatgccgccaaataaagtcacctcttccggccataggtttgctaagagttgaatggtcagcaggatacatgccatggggcgtaaccagtgacgttgtggagccggtaaaaataaatctaacagaaacatcagaataaaaacggctgtcagactcagttcggcatgcatatggagtattgcagttatgtccatcattgctatttttttaatttttaattctcaaattttaatttaataattgacttatgattggttctacactgttactgatcagatcgcttatccagaatggagccattcctaaacctgctacacaggcgatgaggcagataacggctactcgttcatcccaggttgcgtctgtgagtttcagatgttcgggattcaaaactttaccataaagaattttacctactacacgcaggatatagactgcggtaatgacgatacttgttgttgccactagggtacatacgcgatggaatgtatcatcattttggaaagaacctacaaagaccgtcatttcagcaacaaaaccacttagtcccggaagtcccaaattagcaagaccagcaataacataacctacagccaggaaaggcataatcttcatcaaacctcccattaatcggacatcacgagtgtgggtacgtccgtatatcataccaataagggcgaagaacaaagcggtcattaatccgtgactcaacatttggagaatagcacccgtacaactggtgcgtgtcatcatcagcagggcaaagagcactaatccgcagtgggatacggaggaataggcattgatatattttaagtcggtttgtaccacagcactgaatgcaccgtaaactacagaaatagtggtcaatatcaggaatacatctccccacatggctgcaccttcaggcatcaggtacatagcaacacggaagcatccgtaacctcctagtttcatcaatactccagcgtgaagcatagaaacagcagtcggtgcagaagcatgaccatcgggactccatgtatggaaagggaacaaagctcctaagactccgaaccccaagaagataagcgggaagaagatgcgttgcatttcatgaggtatatgcagtttggcgatttccagcaagttcatagtttcaccgcctgcaccataaaaaataccgagaattccgatcagtagaaatgcagaaccacccattaacattaatgtaagtttcatggcggcatattctttacgtccgcttccccatacaccgatgagcagatacattggaattaaggctacttcataaaacatgaacatggtgaacaggtctgttgaaacgaagaatccgaatacccctacactcaatagagtgaaccacatgaaatattcttttgtcaatggttgtaacttccacgatgcaaaagtaccggtgaatacaataatggaactaagtagcaacattgctactgatataccgtctactcctactgagtaacatatatggagtggtgcataccaaactgtgctggctgtgaacagcatctctcctgtagcaccggcttggcgtagttcgatataatcaatggtgaggtaaacggataatgccaataatatggaagatccgacaaccatcactccgcgaacttgattgacgctgcgcgaagcccaaaggctcgcgagcatcaacaagggaactataatgaaaaaacttagtatgttcatctttttaaattaaaaattaaaaaatggccatgcggcggattttttattattcattaaattaatagtatcagcgtcaatatcaatgcacctgcaaggaaccaaatactgtactgctgtacgtttccactttgcatgtcacgtatttcatcggcggtagcatgagtactccacgcagtgaagttaaagaattgatcgataacgtgccggtcccaccaggctatcggagtactgatgcaccggaagatgattttcttggttacgaacaaccatatctcatccatatagaaacggtggtaagctgctgtgtgcaaacgtgggaatgtgcgcgccagatagttggctacgggttgtctcttacctgcatacatccatgtagctaaagcgatggatgctatagcaataatgatacttgtagcagctatctgcatatccagatgaatggtataggcttctccgttactactgatcagattgccgaaaggtatgaatccggcaatacaggtgatagcggctaaaaacatcagcgggaatgtcatggtaagtggagcctcatgcggagtatgtgcatcaggtccggattcgtgggagtgtcctttccattctccattccagaaaatacaataataaaggcggaacatataaaatgctgtcatggcggcaatgcctgtcattatccatcccataacaggattgaattggaagcaggcagtcagaatttcgtctttagagaaaaaacctgagaatggccagatacccgagatagccagacaagcaatcaggaatgtccaatgggtgacgggcatgaatttatgaagtcctcccatggcgctcatctcgttactgtgtacggcatgaatgatacatccggctcctaagaacagcaatgccttgaacatggcatgtgtgaacaggtggaacatggatgccatgtagcctagtcctccttcatgaggattcatagaagtacaaacgcctaatgcgacaatcataaatccaatttgagatatagtggagaaggcgagcacacgtttgatatcgctttgtgcacacgccacactagcggcgtagaatgcagtgaacgcaccgatataagctatccagtgcagcacttcgggcgcatatcctataaacaacgggaacatacgggctaccagatatacaccggctactaccatggtagcagcatggattaatgcactgacaggagtaggaccttccatagcatccggtaaccagatgtgcaatggaaacatcgcacttttaccggcaccaccgataaacattagccccaaggccaatggtatcatacttccggcaactgcaagtacctgaagttggggggtgaacgagaatgtttcggcataatagccgtaaatcaagataccgatcagaaagcctaaatcagcgaaacgggtaacaataaatgcttttttactggcagcaatcgcttctttcttggtgtaataaaagccgataagtagataagaagaaacacctaccagttcccaaaagacatacatctggaaaatattagttgctactacgagccccaacatggacatggtaaacaggctaagaaatgcgtagtaacgttgaaagcctttttcacctttcatatatccgaatgaatagatatgtaccatcagactgacggtggaaataacgactagcatcataactgaaatagggtcaagcatgattcccatgtcaatatgcaggttcgttgtgaaaggtaaccattcaaaattataaggtgtgagagtaggatagacgccttctgccgtacgccctcctgcaaaataattgaaggcagtgaggtaggaaagcaacgtcacccctgccagtgaaacggtgccgatggtccctgccaatccgttcttcatacgcatacctgccagccccagtatcaggaaactgaggaaaggtaggataaggattagtattgtatgttccataattagtttttcatttcatttaagttcttcacttggatattgcgtacattgcggtagatattgataatgatagcaatagctactgctgtttcagccgcactcacgccgatagcgaacagggcgaaaaaaaagccttccagttcttcgggaaagaggtatcggttgaatacggcgaagttgatgtctaccgaattcagtatcagttccacactgatgagcatggccaataaattgcggcgggtgaagaaaccatagattcccgcaaacatcataaaggtggaaaccaccagataatattccatgtgtaccataagttctatctttttctagcgattaggattcctcctacgatgcaagcgagtaataacacgctgattacttcgaaaggaaggatatattgatatttttccatgcccatcagtgcatgaccgatcgtgcgtacatccagttcaccatgaacaaaatgagagggcaagaattcgttcttcagcatgacgaacagacagatagccagtcctgctatagtagaaatagctccggccaccatctttccattttttaatctctctgctttgtctccctgtgaagaggtcaataagatactaaatacataaagcactgttataccaccggcgtaaatcagtaattgtacagctcccaagaatgagtagttgagttggaagtaaatacctgctgtaccaaataaaacgaacagcagataagttgctgcacgcaagatacgtgaggtcgtgactgccaataccgaacagacagcgataaacaacgccagtacaatgaatacaattagttgtagtgtcataatatcgtttgttttttattttttgttcagagtgagaactagtttgctgcggtcgaatacagcattttcgaattctgtatcgaaccgaatggcatcgtgtggacaagcgttcacacaaagctgacagaacatacaggctcccaggtcgtactcatactttaccaatattttctttttcttgcctgtttcttcgttggtcacagattcgctggtaatggtgattgtatcattggggcaagccatctggcaaagtccgcaagcaatacatttgttattaccattctcatcaaccggcatgataagccgtcctcggaaacggggcgatatttttaatgtggcacggttttcgggatattgttcagtgactttaggagtgaagaactctcgtcctgtcactttcatgccggtaagtaatgtaccgatgccatgaagcagcccttttatataggaatgtttttcttctttcatcagaaatgtaatttaaatacaacaataattaccatcaacaacaggttgcacaaacctattggaaccaagtacttccattccagcgttagaatttggtcaatacgcagacggggaaatgtccatttgatccacattagtaaccatactacaaagaatgacttgccaaagaaccaaataaatccgggtatataatccatgatggcattgaatccgtctagcccaggaatatgtagcggcatccatcctcccaggaagatggttgtggctactgcggcgatgataaacaagtttacaaattctgccacatagaacaggccgaagtgcataccggaatattcggtatgatatcccgcagtcagttcactttctgcttcaggcaagtcaaacgggccgcggttgacttctgcatttccggctatcagataaatgataaaagcgatcaatgcaggtatatgtcctttaaaaaggaaccagccgtcagcttggcgttctacaatttcgcttagttgcatggtatctgttaagattacaatggtaaggatgcttaatcctacagataattcataactaatcatttgagcgccacttcgcatggctccgattaatgaatatttgttattggaactccaacctgccagcaaaatacctaccacaccgatactggatgctgccaataagaagaaaatacctacattgaaatcaaggacctccatgcccttgttgatgggtaggcaactgaaagccatgatagaggcgaggataacaatgtaaggtgccaaattgtacaggaacttgtcagcatgccggatggtgataatttccttgatcaacatcttgaatacatcggcaaacacctgtatggtaccttggggacctacacgcattggccccaagcggcattggaaagcggcgcacactttacgttccatgaaaatcataatgatagcaataactgcatatgccaacatgatacatacgccaattactatacattctatgagcactgccagttcttcaggcataaatgacgtgagcagtgagtgtacccattgggtgactatactaaaatcgaacataatttaataatgtgtcaatttgctaatttgccaataggcaaacttgtaattatttaatttgttaattctcagtctgataaatagtgcattctccaaattgtatattgaagaatcggcacattattatcggtcaatatccggtactacataatctaccgttccaccaatagcaattaagtcggcaatttttgcgttgcggcacatagtttccattgctgaaactaaaggcaaaccggtagcgcggaatttcatgcggtaaggaaatttgtctccacgactttccagataaacaccgaactctccgcgagaaccttccactgcggcataataattcccttcgggcacacgtataatcggtttcatcttttcctgatagttcccttcaggaatattgtctatcagttgctcaatgatatccatactttccagtatttcttccatacggaccatataacgtgcaaagcagtcaccttcagtgtggacaatctctttaaaatctaccttgccatacatcgcatagggatgacgcttgcggacatcgcatgcccaaccgctggcgcgtcctgtacctcctgtcgctccgaaagagatggcatcttcccgtgaaagaactcccacacctttcaaacgttcttgggcaatgacatttccggtgaatacttcatggtattcttttagcatcggacgcagataagcaatgaattcttttactttctgtacaaagtccggagcgatatcagcttgtacccctccaatggtgttataattctgtatcaaacgtcctccggtagttgcttcgaagatatccaatatcttctcacgatcacggaatccatagaagaatgcggtcaaggcacccatatccatacagagacaggagaagaaaagcaagtgagaatctatacgttgcaattcgtccataatggtacgaatgtattgtacccgttcgcttacttctacgcccattgcctgttcaatgcacatacagagagcatggcggttttggtgcgcacctaaataatccaaacggtcggtcagggccaaggtttggggataggtaagactttcgcacattttttcgatacctcgatggatgtatccgcagtgcacatccagttttttgataatctcaccttccagtgaaacacgaaaacgaagtacaccgtgggttgccggatgttgaggacctatgttaatgatatattcgtcctcatcaaaaatggtttcgcgtttttctattacactgccatcatgttgtacttctatatattgtgtcgtgtctacaggttcctcattggtcatacggagtgggttgaggctttcatcgtagtccttacgcaatggatagcctacccagtcatcacgcaggaacaaacggcgcatatcaggatgtcctataaagcggataccataatagtcgtacacttcgcgttcattgaattcagcacctttccaaatatcacttacactaggaagttccggcttttctcggttggttgtgcgagtgctgaccactatattttctcttgtattcgtatcttccagatgatagactacacctagtccttcttcgccccagtccattccggtaaggctgcgtagaaaatccatatgtttaccctgccgcaatttcagcatttcttcatgtagcttttcggcaggtatttctattctttcactcatgcttgttcgggattttgtggttcattttctttgcggttcactccgccgaagaatttttccagttttactttacgttgcaattgtatcatgccgtacaacaaggcttcaggtcggggcggacatccgggaatatatacgtcaacgggaagaattttgtctactccgttcaatacgtgatatgattttttaaaaggaccgccgctaatggcgcatccgcctactgcaatgacgtatttaggatccgccatctggtcatacaaacgttttagtaccggagccatcttgtgtgtgatagttcctgctaccatgatcatatctgcctggcgcggactggcacgggctacttcaaacccgaagcgggcgaaatcataccgggcagcacccactgccataaactcgattccacaacaactggttgcaaatgtaagcggccacaacgaattgctgcgtccccagttgataaggtcatccaaacagcccaccagtactttggtaccgccttcattgagctgcttgaccatgttttccaaatactcattgtctttgaagtcttcataaggaatagactttatggttggtttctttacttccattccaacgctcctttcttccaggcatatgccagacctaaaactaatataactaaaaagaaaaggatgctaaacagaccgtacactcctaggtcttgtaccactacagcccaaggaaataaaaatactgtttccacatcgaacatcaggaagaggatagcaaatagataataacctactttgaattgcatccacgaccgtccccgcgtaggaataccacattcgtaagcttctcccttttgtgagttgtatgaacggggagaaatggcacgggcaattcccaatgctacggcaactaatgcgattgccgtcaggataacgacaactaataatgtaaaatacatatctaaactttttttgattagacaaacggatagaaaaattttccttataagacgtttgttataaggatttctactcagcaaaatgctgaaaaaagattaaaaattaaatgatgatccgccggagtgcatagatataataatctactgcatcagtgtaaagcgaatgaaaagtgtggcaaactatatggtttgtttgtagctcctgctttttaagttcgttcaatgctgctaaaatgcggactatacatttgaactttgatgtggaagggttgtcaagtgatatggctatttgtggcatatctgcaaaattgttggtaaacaggaagtccactgttcttttgcaggggtcttgttgttgctggtaacaagaggtctgtgggggtaaatctgttgtctcaaccgtatgataatcctgacctactgttatcgtaaacagtagaaataataggatatatacaatgtatctcaacatattattcatcttgttaccctttaaatgagggtgcaaagatagccaatatttgaagcttcattgagattttttgaattatttatgtataaaaatggttataggacgtaaatgtcaatgctttttccaaaaactcggcatgaagagcagaagtacggtaaataattccaaacgtcctatcagcatcaatattgcacttatccattttgctgcatccggcaacccgttccatgaataggaagggccgcattttccaatacctggtcctacattgcccaaactggaaatgactacgctataagcttcttcaaaccctactccaaacagcataagaaccagccatccaataaaaataatagccatatatagaaaaatgaatgcaagtactgctgacttggttgttgatgaaataacttggcggttgatacgtacaggaagtatagcattgggatgaatgatatgtttgaattcatttttagaaacacggctcataatggctatgcgtatacattttattcctcctgtggtggatccggcacaagctccaaacagcatgatgatgcacattaatgtccaaagtacaggtacccaagtcatataatctgcagaaatgaatccggtagtggtttgtaaggaaacaacctgaaatatggctttacggaaagattcttcaataccgaacggactggtgaaaataagagtgacggtagtgaaaagggtaaaaaatcccacagttcccaaataccagtggagttctgtattttggaataagcgtttgaaatttccttttaagaacagtagatatagtaaggtgaaattgatacctgccaaaaacatgaatagcgtaattatatattctatgtaaggagagttgaaggcggcaatgctattttgtttggttgaatatcctcctgtggcggtagtagtcagagaatgacatacactgtcgaaaaagttcatgcctccagcaaccagcagaataatctctgtaatggtcagccccaaatagatagtccaaatccatttggccgtaactccaatacgcggatgtactttatcatgggtgggaccggtggcttccgctgcaaataattgtacactgcctactccgaaaatcggtaatacggcaatagtaaaaaagacaattcctaatcctccgatccattgtgtcatacttcgccagaacaaaagcccgtgtggcaatgactctatattgtccaaaatacttgctccggtggtggtgaatcctgacatggtttcaaaaaaagcatccgttatagtgggaatatatccgcttagatagaatggaagcataccgaataaagaaaaaaacacccaggcaagggttacaataacgtatccatcgcggcggctgattctcttttctgcatttttccctgctaaagcggctatgctacctgctccggctgttattgcggcagaatataggaaagctgaaatatctgattcattataatagacagcgagaaacgagcatagaataagaaaccccgcttcgatgaagaataacgcccccataatccgggctatcatttttgcatttatcatcaattgaagaatttttctattttcttaatcatcatacctagacagaatactacgacatggtcgttaggttggatgacggtattacctgtcaccagtatcccttcaccgttgcgaatcagtccgccaatggtggcacctttgggaaggccggcatctttgacagcgcatttggttatacgtgaaccgtttttaaccgtaaattcggctacatcagcattggcaaaagtcagacattttacgttggaaacatctgcatccagcatcatttgatagatatggctggcggcaatcatttttttattgataaccgtaccgatatccaggctttctgccatgctgatataatcgatattttctacttctgccacagttttggttactcccatacgtttggcggcaagacaagccagaatgtttgtttcagaattgtccgtcagagcgacaaatgcttccgtgttttttaacccttcttccatgagcagatccatatcccgtccatctccgttgataatcattactttgtcatctaccacttcggtcagccggttacatctgttgatgtcattttcaataatcttgacctgcatgtaatccggtacatattgtgtggtgcgaacagctatgcggctgccgcccataatcatcacattgcgtacatcgggataattttcttttcctgtaatcttgcggatatagggaatgtatttctttgttgttgtgaaataaacaatatcatgcagtttgataacatcatctccccgggggatgattgtttcatttccccgtttgatagctacaatgtggaatggaatattacgtcctcccagttcatgaaggggaacgttcagaatttctgccgtttcgcgcattttggtacctatcaggaccaatgcaccaccgcaaaattcccaccattggcgtatccagctcattttgatggcatctactatatctttggcggccagcatttccggataaatcagtgagtgtactcctagttgggaaaagaattctttatgtttaggaagtaaatattcgtaattgtcaatccgggctacagtcttttttgcccccatattggtagccaacatacaggccgtcatattgcggctttcttccggcatgaccccgataaataaatccgcgcctgccactcctgcattcttaaggccggaaatggaggtgggggatgcattgacagtcattaaatcgaagttggaatcaagtttgctcaacttttcttcgttttcatccatcaaaatgatgtcttgcttttcatccgataataatttcgccagatgggtgcctactgctcctgctcctgcaataatgattttcattgttcgtctctcttagaatgatatcaaaactttgtaaataccttcttcgtccatgccgcaaatatgatatagttcttttactgaaccatgctggacaaattgatccggtagtccgatacgttttatttgcggattatactcattgtctgccataaattccagtatggcactgcccattccaccttttagcacaccgtcttcaacagtgaccacttgcttgaatctcttgcctatttcgtgtaacatactttcatctaacggctttaagaaacgcaaatcatagtgagcaatgctttttcctgtttcctgttcggcatgtgtgacagccttttctgcttgaacgccaatgggccccagcgtaatgaccgctatgtcttttccttctttcaattttcttccttttcctatctcaatctcttgcattggacatttccagtctaccaatgaacctcttccacgtggataacggatgacaaaaggacctttgtcaggtaactgggcggtatacatcaaacaacgcagttcatgttcgttgtaaggggaggccacaatgagattgggtatcggtctcatataagccagatcgaatgctccgtgatgagtaggaccgtcttctcctaccaatccagcgcggtccaggcacaatactacattgagtttttgtatcgctatatcgtgaatcacattgtcataggcacgttgcatgaaagacgaatagatattgcagaaaggcaatagaccatcttttgccattcctcctgaaaaggtaacggcatgtccttcggcaattcccacatcaaaacctctttcgggcatggctttcattaatatgttcatagagcaccctgagggcattgcgggagtgactcctacgattttatcatttgtttgggccagttccaatagggtatttccaaaaacatcctgaaacaaagggggcattcctttggtatcgacaacgatacgctctccggtttccttgtcgaatatgcccggagcatgccagatggtggcagctttttctgccggaccgaaaccttttcctttggtggtatgtatatggagcagtttaggtccttgcatatctttaatctcttttaatacacgtgccaaattgttgacatcgtgtccatcaataggtccgaaataacggatattcatgccttcaaatacgttttgctgttgtaccagcatggatttcaggctgttgttaaatcgtatcaggcttttccggcgttcttcgttcaggatgccccatcgatggaacatttgtgatattttatagcgtatccggttgtatccttcagacatttgcaggttcaacagatattgtttcatgcctcctacactacggtctatagccatgttgttgtcattcaggataatcagaaggttattaggagttgccgaggcattgttcagcccttcgaaagccagccctccactcatggaaccgtcaccaattacagcaacgacatgccggttattctctccgtgctttttggctgctacagccatacctaaagctgcggaaatagaatttgacgcatgcccgcaagtaaatgtgtcatattcactttcggatggagaaggaaaaggacgtatgccattcagtttacggttggtacagaacgcatcccggcgtccggttaaaattttatgcccgtaagcttgatgccctacatcccatacaatgcggtcatagggtgtgttgaatacataatgtaaggcgacggtcagttctattacgcccaaactggaaccgaaatgccccggattacatgagagctcatctataatcttttgccttagctctttacacacttcgggcagtttgtctgcgcttaaatggcgcaaatcatccggagtatctatgctttgcagtaagttatataaattatcctgttccattcctatgatatgataaatatcgtgcaaaaatagcataaatatgtgtattatgattacatttgcccttaaattttaaaagctttccttatcgtatgaatttcagaacgcaagtagaattacctaaaagggaaacagaaatccggcattcggaccgaatcatgctatttggttcttgttttgcagaaaacatcggaaatttgttgttggcaaataagttccgttgtgatgtaaatccttttggaatcctctataatcctttatccatagtggaagctctttggcaaattctatcccatcaaacatatacggaagaggatttgttctatgccggaggctgttggcacagttggatgcatcatagcgttttttcagcctctacggcagcatcttgtttgtcttctataaatacgcggctggaacaggcttcagccggacttcctcagcttgattggctggttattacttgggggactgcatttgcttattggctgaaggaaaggaccatggtggtaggaaattgccacaaacagcccgacagcctttttacccgacaacttcttacggtagaggaaattgtcactgaatgggaatgtgtgttggtggaattgagaaaagtaaatccgttcttgaagatacttttcactgtcagccccatacggcatagcaaagatggtatgcatggtaatcagataagtaagtccactttgcttcttgcggtggatgaattatgccgccgctggtctgattgttactatttcccttcttatgaaatcatgatggatgaacttcgtgattatcgtttttatgcagatgacatgttgcatccttctcctgttgctgtatcttatttatgggaatgttttacagaatgttattttagtaaagaaacggatagaataatgaaagagtgggaggatatccggaaggctttagctcacaaaccgtttaatgcccaatctgaaacatatcgcaaatttttaactcaaatagtgttaaagatagagcgacttaaagaaaagttcccgtattttgaccttcaaaaagaattagaacaatgtcaagctcgattgaaaatatagaaaaagttctgggagcaaagcggtttggtgaccgtagtgcacagattgattggattttaactgatagccgttcattgtgctttccggaagaaacattattttttgctttaaaaaccaaacggaatgacgggcataaatatcttccggaattgtatgaacgtggagtccgtaattttgtagtgggcgaattgccggccgatatgaaatcttttcaagatgcgaatttcctgcagttggccaatcctctgaaaggattacagaaattggcggaaaagcatcgggagcagtttcagattccggttataggaattacaggcagcaatggaaaaaccattgtgaaggaatggttgtatcaattgctgagcccggaccgtgtggtaacccgttcgccacgtagctataattcacagataggtgtgccactttcggtatggttgatgaatgaacgcactgagttggctatttttgaagcgggtatttccgaaatgggggaaatggaggcgttgcagactatcattaaacctactgtggggattttgactaatattggtggtgcgcaccaagagaactttttctctttacaggataaatgtatggagaagcttactttgttcaaagactgtgacgtcatcatttatgatggcgataacgaactgatcagttcgtgtgtggcaaaatctctttttacctcgcgtgagattgcttggtcgaaaaaggacaatgaacgtccgttgtttattgagtccattcaaaaaggagaacatgttaccactattaaataccgttatctggggatgccgaatgaatttagtattccttttatagatgacgcttctattgagaattcgctgcattgtctggctgtggctttgtatatgatggtttcccctgaacaaataaccgagcgcatggcgcgtttggaacagattgctatgcgtctggaggtaaaagagggcaagaatggctgtgtgttgatcaatgatagttataattcggatttggcttctttggatattgctcttgactttatgtcgcgtcgttctgatgataaaggaaaaaaacggacacttatcctctcggatatgcttgaaacaggacagagcggcaaactgctttatcgtcaggtagccgaattggtacatagccggggagtagagaagattatcggggtaggagaggaaattcggactgctgctgcccgttttgagatagaaaagtattttttccgtactacagaagaactgttggagtcggatttgctggctgggctgcgtaatgaggtgattttggtaaaaggttcgcgggcttttcattttgaccggatttcagatcgtttggaactgaaagtgcatgaaaccattttggagatcaatttgaatgctttggttgataacttgaattattatcgcagcaaactgaagccggaaacaaaaatggtatgtatggtgaaggcttctgcatacggtgccggttcatacgagatagctaagacactgcaagatcatcgtgtggattacttggcggtagctgtggctgatgaaggttcggatctgaggaaagcgggaattacctgttccattatgattatgaatcctgagttgacagcattcaagaccatgtttgattataaattggaacccgaggtttacagtttccatttattgaatgaactgattaaagctgccgaaaaagaaggggtaacgaatttccccattcatattaaattggatacgggaatgcaccgtttgggttttgcacccgaagagattccggaactgatagaccgtctgaagaaacagacagctgttattccacgttctgtattctcccatttggtaggcagtgacggggctcagtttgattcgtttacgcgcagacagatagaaatgtttgaagctgcttctgaatgtttgcaggaggcttttcagcataagatattgcgtcatatctgtaatacagccgggatagaacgttatccgggtgcccagttcgatatggtgcgtttgggaatcggtctttatggaattgatccgtttaccaatcagatcatccataatgtaagtacattaaaaaccactattcttcagattcatgtggttcctaaggaggaaacagtggggtatagtcgtaaaggacatttggaaagggattcccgcattgccgctattcctatcggctatgccgacgggctgaaccgacgtttgggaaatggacatgcctactgtttggtgaatgggcagaaagcgccatacgtgggtaatatctgtatggatgtatgcatgattgatgtgacggatattgattgtaaggaaggggataaagctatcattttcggagatgatttaccggtcactgtcctgtcagagattctggaaactattccatacgagatcttgaccagtgtgtctaatagggtaaaacgagtttattaccagaattaacgaaaaaaagaacgaaagaaaaagacttgaaaaggatgaacatacgttacttttgcgtatctttaggaagttactaaaaatagatagctatgaaacgtatattcttccttttgttatgtctttgtttctcggtgttgtcatttgcccagagaacgaatgagaccaagcagttgaccaaacaggactctttgcgtttgcagcaactattgagcggtcaagtagaaattgtgatagatgatgaaacacagaaagagattgacagattgttcaatcccgaaaagtggaaaatgaaatcaactcccttccctaaaaaaaacatgaagtttgaaacggaacttcctcgttattatatctctcaaatggatacaatagatggtagagggtatatcaggttattgccgtacggaccgtttgaaactccggaagaggaacaaatttatgtagagattcctatcaacaaagagttgttggcaggctatgatcctcgtttggaacctgcgccggcaggcaaatttactcctagcgctttgatggtgggggcgggtatcagtgctacgtttgatgccgataagctgctgggaatcattttcagtaagaaaatgcgtgcaaaagcccgtaatgccaaagaggctgatgcctggaagagttattgaactattaagtaaagaaacgaatgccggatatatgtggaatacaccgggatcttgtgaatttcatgttgaaaaaacaggagccacgtttggatagtgccagccgtggctcgtgattagatattgttgaatttgatttattcaactgctgatcttattttatattatttatacttacctttttccaaatgaaattgtcaatcatttctttgtcgcattccccgtttttagctttaatgttcaggttttcgaatgtaaagttagtaagttgatattgatcagacttttctacgctgaagaaattatcgcatttaaaatcaatgtttctcattgtcacatggtttgagtaagaaacgggaatgtcttttctgtctttcaggtcaaagaattgtgtccaaggcttgatatacagaaaatggtctgcatctccggtgatatcctccaccagaatatattcatattgttgaggagtgtccggccgcatctttaaccataacaaacgattggcattggtgatgtgaatgcgtcgcaagataatattgcgattgtggatggattcgcttccacaagtgagggcgccgtggcagaagccgtaggtacaatcttcgatgatgatgttggaatttcctccattgttcgggtcttggtctgcccagggacctttgccgccttttaaggctatggcgtcatcattgacagacatatagcagttcttcaccagtacattgctgcatacatcaatatcaatggcatccgtacttggagcctttaccggtttctccggtgagaaaatatagaggttcagtaattttatgtgattgcatttataaagatgggtagtccaaaagggagagttgatgaggcgtactcctgagagttggacgttattgctatgggagatatgaaccagccggggacgtaattcatccatattggtacattggggattgacttttcgacgaagccagaatgatttccagtatcttaatccgttgccatcaatcgtgccttttccggataacgtaaaaccgtccactttgtcggcattgaccaacgccgcgaaatatttcaagctttgcccttccatgcgggtatctatgatggggaagttgctgatatcatcacttcccttcaacacagctccttcctccagatgcaggtgtgttttgggtttgaagaacagcgctccgcttaaataggttcctttgggaatgacgataactccgccgccattttgtgcggcagcatcaatggcagattggattttctctgtttgtaacagggtgctgtcattgatgacaccgtaatctgtcagaatgtatttcttgcctaatgtgtttatatctactatcttactgtccttaaaccaatcggatacaggcgtgccgtccggaaatttttcttgtgccaaagacggaaggcatagaaaggcggcacatacaaaagttattaatttcatgattctgctattaaattaatcactaactactattcgcttgtttattgtcggaaatcaaacatcaaattcagatgtaacccttcatcccccgatttgatacggatattacccggctggctgttcggtccttgttgctcgatgggtttaaaggagcaaatagccgggatgtccagcaggaaggatatatccccttcggggaatttgggcatggtgtcttttacgcgtcctttcggttcttcgggagtgaacacatggaagaagataccgtcattccgtgaataaatggtgaacggtgtcgtgtcactttccaaagtggcccaatacatattggcatgatatcctttgaattccggataaaccagattttcaaaactttctccggtgatggtattgttgtactctttgtgccatactccataattcgttcccggaatccggtttttccagacacggtacgggccacggcccatccatttcatgccggagcaattcttttcaggataagagaaagtcagaccgagattgaatactttggagtccatgaaagcgtcatcaaatccacctccgccggaagcccgattcagcagaatggcatccatatagagtaatcctttgtccgtaagacgccatacgatggagtcggcggcacctttgtatttggcacagtaaacagccccctcgttgctgttgcggacataactcaatgttggctcgtagcgcattttcatgcccactgccacaggaccgtctttgaatggaacttctgttcctcctgatatgatacggctgatcatgccggtagccgggtcaaaagtgacggttacacggtcgcttttcagttcgatggaggtagcggtttgagtggcggttgccggttgtaccgcttccaaggtcatcggagtctgcgccattttatgatcaaagtattgttttgccagccggataggataagtccagttacagatacttttcccctctttgtcaaatgcctctaactccagtacatcaccttcccggaaagaagcaggaagagtgaagcgggcttttccggtttcacccggtgtgatggcaggcagttgtacatggccttctgcgataactttaccgctttccatggcatttttcaaaggtgtttcgcaagtacgtattttgtaagtcatgcgacatttgtccaggttagtatacgtatattcattagtaaccaggaaactgccgtcaaagtggtcggtaatcagcagcggttttaactggatgggcgaccattgtgtgcggatagcatagtaacttccttctttttctctacgcggaccaactaccccgtcaggagcattggatttatcagaatccaatatgcctcctttatcagaacgtttgggggcttcgtcacagaatacccagataaagcctccggcaaacagagggttcgtgcaccaacgatcccaaaagtcacgtagtccggcaccacctccctgatcgtacatggcatgcatgaattcggtaggcataaatactttatagccgttggtaaaacgtgccactccggtcagataagtgggataatggtgggtgtccagatcattgaaatcggcccaagggtgtaccatgtggcgtttctgtaatttatcgtatttggcgaataaaggatccagattataattccatcctccttcgttgccattactccaaataatgatggacggatggttgacatcgcgttctatcatttctttgactaacttaggacctacttttgaatcgtatccgttttgccatcctgccagttcgtccatatagacaattcctaatgaatcacacatatccaggaaatgttcatcaggcggataatgtgaacggacggcattcatattcatctcttttaccagcaaggcatcctgacggctcatagccgcactggtagcacgacctccatctacagaaaaagaatggcggttgacacctttcaccactagtttggttccattcagataaactccgtcttgtggaaagaactcaatggtgcggaaacctatccgcgtttcacggctttgcaccgttttcccttcggggtctttcagttccagtctggctacgtacaggttagggtcctctgtagaccaaggctggatattcatccagtttccttccatcaactgttccttgttcgaatccttaatctgatgagaaacggtaggtttgtgtccttgagtgtacatttcttttccatcctttaatgaacggacggaaacagacaattcatatcctttggcatccccttccatttctattgccgcttgcaattttccatgctgatcggcgttcagaacaaaatgtcgcatgtggactgccgggacaacttccagccatacgggtctgtaaataccaccatacagccaccagtcggctttacgttcggctgcattgatggatttgttggctgattctttggctatctttacttcaagcaggttctttttgtcgggcttcaataaatcggtgatatcataactgaagcggtagaatcctccctggtgcatttcgcctgcgggttttccattgatgaaaactttcgtgtcggtcatcactccgtcaaagaatatttttatccgctcaccgggagttgttgccggagattcaaatttatatcggtaaatacccgtttcgtcgcttggcctttcaccttttatagtataccaacgaccgtaagtatattctccgaatccttgcagttcccagttgcagggtacttcgatctttttccatttcccactgttttgtcctcccgaacaaaagaactcccaagtcttggtgttgtcaataccggttcccgataaatagatacgttcggggtgcggagcttgtgcctgcacggttggtccactccacagggcagctattgctaaagccgccagtttggtccatttgtttttcataataccattgaatactgttttcatgatacaaaaataaggcgggataacccgccttacaatggaaaatcatacattatgatgaaaaatgatacagttataggggattatagttgcggaagtgggtgtgataagtgtgattatttaggagaaagattggaacgcaaatgacgcgaatgacacaaataaagccccctcactacatagaggcaaaacctaccgaaaggttaaatttgtgtcatttgcgtcatttgcgttccaaatcagaccgatatttagttactttatttctatcctcatgggagattcctttttatactcaaccttttcctgattggcattgatgttcttgaaaacaatgtttccggatctttccccttccacattcaccatgatctctccggcggggagtttgaaatgtatatcctcgaacaggatgtcttttccatccaatatgtgaatgtcattatgctgtgcttctatcgtcagcttccgcatcgtaaatccggcggcatcattcagggcgccgattaatttcttgcatttgatctctccattttccaccactacctggttgaaaggtatttcgggaataccattggcggtaaagaactggtcggctgattctacaatgaaatctttgatcaggatattctttacatcaggcgtcagccggtttacttttcttgccggatagcgtgcggccagttcgcccatataataagcactgcccaacaaatcccaggtaaaggcttttcctacattgatcatgcgcagtctctcatagtacgtgttgtcactgcctcctccacggttgcgtcgtgtcttgaaacggatgccggtacgggttccgtcgaatacacaatcgtgtacatacagattcttgatcactccggctgtttcactaccacaagttatcccgccatgtccatgctgggccagcgagtagcggataactacattttctgtaggtttgcctacacgtaatccgtcttctgctctgccggctttcagggtaaagcaatcatcaccacagttcagcgtgcagtattcaatcagtacgtttttacaagattctatgtcaatgccgtctccgctgggcaccttggtagagttgacggtaatgcctcttataattacattctcgcaataaatgggtaccacattccacaaggtacttcgttccatcgtgatcccttctattaatacattggtacagttgatgggagagattgttttaggacgatagaaagtcctgccttccataccgtcatagatacgttgttctataggcatgtcccacggaacatctttttctaccactgaagcaccgttaggacgttttctgatttcagcatccataggtggtccgtaaatggttccttttcctgtaatggcgatgttgttttccccattggcgtaaataaaggcggccggccccattatttccaccccttcatggcgtgtgaaaaccgccggcagataatcttccgcacgaccggcaaactctatttcggctcctttggctaaatgcaggttgacattacttttcagaacaatacgggccgatttccattttccctcaggaatgacgactgttcctcctccttggttgctgacttcggcaatcgtccggttcactaaatctgtaataggggcatcttctgtcattcctttgtctttcatattgacgatgaaatcgggaaaaacgggacgctttggttgaggcatattgaaatatgcattcttgatcggaacgatattccggggcatggcttgtgcaccgacttcatttaaataggggatagccggtttcagttctgctgtcagtttatccaatacttccggattcgagtttgcttgtattgttctgatgttatgaagacttgtgtcgcttcggacagtatataaagattccccattggtaatttcattgatatgggatggggtatagtttttttgattatcagtttggatatttgtattttctatcttttgagcgacactttgtgtgcttgccatacatatcccgatacacagtccccaaaaagcgtttcttgtcatacttagtcttttaaaagttaaatggccttcattttgcggctcttataggtaatgacgtttatagatcgaatttgtaaccattggatttgttcttatttttataaagcggttcgatgtcttcttgtttgtctgtaaatagaagaaaaaggttatttttataggtgttaaatcaaaatatgatgtatatttgaaggcgaaataatcaaatatctatgaaaaagtatattataactctgctgttttgtacgttattttgtcatttaggcattgcccaaggtttgaaatcggtttctattctgggggattcttattccactttcgaaggctatgttcagcccgatactaattttgtatggtatctgaagacgcctcctaaaggacggaagacagatatggtttctgtacgtaatacctggtggcatcagtttattaaggagaacaactaccgtctttgtgtgaataattcgttttccggtgctactatttgccataccggttaccgttcggaggattatagcgaccgttctttcatcacccggatgaaggcgttgggctgtcctgatattatttttatttttggcgcgactaatgattattgggcgaaatcacctttaggagagtatcagtatgcggattggtctaaaaaagatttgtattctttccgccctgccatggcttatatgctggatacaatgattgattactatcctaatgtggagatctattttttgttgaatgatggtttgggaaacgagataactgaatcagtcagaacaatttgcaaacattatcagatcgattgcatcgaattgaaagggcttgataagatgagcggccatccttcggtgaaagggatgaaacagattagtgaacaggtgaaggcgtatatggctgcgcacggaaagtgacatgatcgtttttaaagcctgtttaaatttttgttttcatttcagaatgacaatgctgatgcaaatttaaacaggctaaaaggaatataattcttttgataaacttagtcaatggttttatgaatcctggcttttgatgggcgactgataacaagtatctttgtggcttgatgaatgtcgcatccagacattagacctcatcattcactatccaacgtcccgatttattgcttccttcgcgtcttatgtaaccggcatcacgcagttccttgattttcttttcaatcgagcgacgggtgacggagagtgcagctgcgatttcatcaagggtgacagccggattacgctggatttgttcaatgatttgttccgaacttatcccgaacttatcccgaattttatcccgaacttccatcacattgtgctgagatataagactgccttgatgtctcttgagggtgtttaaaatctcttgaagcataaattcaatgaaaggtcctgaatcagctgttgcagtgctgtgctgtattgcattataataagcttcttgattggcatagaccatattttctacgggcagatattcaaaaagcggatgcagtctgcctaaaattagtgattgccaaagacggcccatacgcccattaccatcactgaatggatgaataaattcaaattcataatggaacacacaactgcgaatgagtaaatggtctttggcctgtttgagccactcaaataaatcatctatcaaaaaaggaacgcgatcggcagggggagccatgtgtaccaatctttcttctgagaaaacaccgactccaccacggcggaatttgccggcatcgtcggtcagtgccatcatcattgtaccgtgtgcctttaacaagtcatttacatcaaacggatttaatttttcgtaaagctcataggtctttatagcgtttttaacctcttgaatctgccgcaaaggtgccataaccgttttaccatcaataatgtctttcacttcgttttccgacagcatattcccttcaatggccaatgaactatggattgttcttactcgattggcttttcgcaatctcagcccatcgctttgctctaaacgaatggcgtatcgctcaatctgtgcagatatttctgcaatcaagttgatagcgttggttgatatggtaaatggtggtatatacatggtataaacaattatttatcgttgtacttatctgtcactttatgtaagataagtttaggctaaagtacaaaaaagaaacgaataagtggatgcaaactgggcaaaagtgcgattcgaatttctgtattctaaatatagttgcaaggaacggatttaattaatattgataaattatcagacatattcccataacttccggttgattttagagttagatactaaaaatatcttggaaattatgggaagaggggattaaacttacaattattcttccttatattcaaaccattggtatgatgctttatttatcgattgtcaaacggatttcattctttcctttcagtaatgaataatagcctttagctgtacgatacagagccaagcccgcccattcgttcgcccgacgggtggagaaactcattgttgtggtggcagaaaaattatgggaatgtacacggagcagaagcatggagggacataccagactgtctgccatctcaggtcggagagacaaaaacaagttgccatcggcaaaatgatggaaaggttgctcagggatacgcattgtagcccattccggtgataaagcagaattttcaaaatcattctgtttatctgtcttcgacaccggcgtctatggtaaaagtggacgtttcaaccggttccgataacaccaatgccgggattgaagataggtttaccgttttgaaaactcacctcacaaagaaaggtttcgcgtcctaaaggcaccagacctccttccacgatccgtttaccgagaaacacagcataccaatgtccggttggtgtctgtgccaaatcggcatgtccgagagactgcacagggtagtccttgccaagatggcggtgtgtcaatacgggattgacggtacaaggtacatatggtccccagagggatttagcagtgagggcggtaacagcatggttataatccgatcctccttcagccatcaacaatagatagtgatcctctattttgtataaatgaggcccttcggcgtactttgcattagccgcatggccataggccaatgtttttcgttctccgaccagacatcttttttggaggtccagctcctgcatccatacggcacactgggcaggccatgcgctcttaaaatcccagcgattgcctgtataataacagcgtccgtcctcatcaaaaaaaagagaagggtcaatgccgggagcatctttcagccataccggatccgaccagggaccggccggattcttggttgtcatgtagaaattgccaccacagccatgagctgtggtaataagatagaatgttccattatgataacgcaaagtgggtgcccagatgccatcattatccgtcataccgttaattagtcaggtcacggctatgataaatgggaagtccgggaaaccatgtgaatgatgaagtgactaaataataatcttctcctacccggcagatagaaggatctggatggaatcccgtgcaaatgggattagaaatggaatccggaataatcgtttctcccatcattctaacacacaaaaaaaagtaactaacagtaaaagtaatcttcttatttttctgtttagaaatatgaaattgcgcattattataatatttctcatcgttattaatatattagcaattattatatttcaaattttccagtgttacatttcttctgtcttttgcatggttcattctatatctcagcccttttgcataagatatggaatagctcaaaagtgatagacattgtctatcgttacgaaagtgccatcacttccatagattgtttttgttttgtctgtccataccggtcgtacccctgttatctcaacctgtaaggtataatttgccttcggcattttcggtgttataattcgaattgctttttccggatacttgctgtagaaatctaccaatgaagaatatacagtatctttctcggcatttaatacacttactttggcatatccgccatgagggtttgtttctccaacaatagcagcatgagttcctttgaacgctatctccaacacgtttcctttttgattggacttccatgctccgtacaactttttccctttgttcagagcgtccgccggttttagcttcctgatgtcccatgcctgccaatattcagggatggatatttttgttccatccacttgtaaaggcatccatacatatgtggcggctgaggcctgatgcggataagaccaacgatcccccataaacataggtatggtatcattaccgcatttcagcgggaatacaaatgtactttgcgaattgtaggtcagcttgcctttcgggcagaacagtccttgtttcgtccaagggccttctatctggggagccgtgaaatagaagttatcatttttctcccaactggtcaggtttgaggtaagcatgaaatagacaccgttctttttgaacatggtcggtgattcgcccatgcctttaatgtgggccacttcagcctctatcgaacggtaatcatcgcttaaccgataaacaggaccatgatgaatcagtaaatatccttttccatcggtgtcctgaaaagttcccatatcccagcgttttaccggttgtcccttatagagcaacggtccctgcaactgatagtcacctgcaatcgttttgcaggtggctaaaccgatataagggtccttgtatcccatatcatcggcatgcatcagcatgatatactcgcccgtcttagggcatttcatcacttttacacgctcacctacgcgattgggaccgaggatgccttcgggttggactctaaggacaatgttctcgaatttccagtttacaaggtcatccgaagaataacatgagaagccggggaaagcgttacttttgtccgatttccattctccgaaaagataatatcttccgttttcttccacaatacaagcgccatgtgcattgacaatatttcccttgtcatcaaaccatggaataccgttgattactaaattgttttgagctgtagctgttcctgctttcaataagaggaacaacaagaatggtaaatatttcatcatgttcttttatctttttgttgtgcaaatatctgaattataaataatttctaacatggattttagtctcaaatcctgtattatcgtacaaaaaaacgcgtgaagtgttattgttctttgttgaaagtatgggtgtcaagttctcatagtaggctttatcttaaaggttttcacttgattttaatcttgagggggggggaagtattgtgcttctcttatgtcaacatttatattggctaataagaatctcattgttatcagtgaaaatagtttttttagtgttcaacagaattctatttaaaaatggatgtataaaaatgtttgtatatacttttgctaataaaattatttgtagttatatgtagaacgaggactgcattagccctcgttctacatatagacttcagaattgttctcctggttgaggccaattgggggtaggaatatgcattctttgcatttcttcatcgaactcctttactcgtctagggtatttttttgcgagattattcgtctcttctggatcttctttcaagttatacaattctagaggttgattaggatggatggttacacacttccaatctccttttctggctgcacgttgtttccctggaaattcccaatataataagcggttgtctgtatcaacttgctttccatagaaaagcggtaagatgtttataccgttaatttgttttggcaaatgcttcgttcctttagccaatgctgctaatgtgggcatcatatctggaaagtagataagattgtctagtgtttgtataggtaccattcctggttgattgacaatgaaaggtactcggatcccaccttcgtaaagcgttccttttcgacctttgaatccagcattgcaatttaatattttaataggagcttggatagcggccccattgtctgaggcaaaaataattaatgtattctttcgtaaattaagttgttctagttcgtttaataaacgtccgatagcagcatccatgtgagtaatcaatgaagcatagcgtttggtattaggctcccatgtttcttgtccttcataccatgctgtttgatctatattatagggttcatgaggggcgtcaaaagctaaataaagaaaaaaaggattgtctttattcctttttataaaagcgatggcatcgtttgtgctcaagtcgttgttatgaataccatgttttccatttgcattttctgggatgtggatgagtgagtcaccgtggaaacgataatagggataataataaggagagttactgtgtaccgtagagatagtccatccataaaattcgtcaaatccgcgatgattaggagaggctcctttatcgtagccatctaaatgccatttgtttactaagcaagttcggtaacccgctgcgcttaatacggtggcaatggttgtatcttgtggtaatagattagctctcctgacaatggtggaatcaccattgggatttattttgattccggcaatacctccggctgtacacatgttatcccgtatacgggtatttcctgtatttttaccagtcagcaatgcacatctggatggtgaactaataccgcttcctgcataacattgattgaaccgggtaccggtttcggctagttggtcaatattaggtgtttttacatattgattaccgtaacaggataaatctccataccccatatcgtctgctaaaataaagatgatgttcggtctgtctggacttactttgtcattttgaatctctgcaaaggtaatttggggtagaaggataccggcagtatataaactgccggttaagatattatttttcatattttatggataaaggattaatataactcattttgctcccaattgtttgaaagctgaatttggtcgtaagggattccaaacagaacagcagcggatgttcccgtccacttccatgttgtaggtgtgccggtgatgtcggatggactacttacattcattccattattactggactgaaatgtagggttgagtccttgtgtacggtggctaaaatgtttttccattacttctgtaattcttccccgacggattaagtcataccatctatgtccttcaaaacatagttccaacattctttcattttcgatggctatactcatttccttttgtgttgtagcagttgtatttgatagtccggcacgagtccttaccatatttagatagttggcggcagatggggtattgccggtttcgtttaaacattcggcatacattaacaatacatctgcatatcgataaatgatattgtcgttaccacaagcacaagttgtcataccctcattaccaaagtcgaaatattttaatgtgacaggaaggtaagtgtatccttcttctgtgatgtctacctcgttgctggctactgatatgtcatctgtataaattccattgtatattaatttttgaaagcgttggtcattactgttggctttgaatgtattgtaaagttcccatgtcattaacagacaactggtgccttgtgaaacagtgatggtagaactggttccgtctggataaatgtaagcgggctgagtagatggtcgagctgctggtatgcaacgtcccataagtgggttagccactactgttgcaccgttgttgtattgagcagcaaaaatgatttcttttcccattgggttgtctgaagcataaatctgtaagacatcattttctaaatctaatttttccttattttgattggcataatccagaatgttttctaaagattttttagctgaattaaaatcctgcaatgtcataaaaacgtctgcttgcatggtataagctgctatttttgtcgctcgtccttgcatgttattggcggaatagtagtttggcagattggctatggctgttttcaagtcgtcttttatcaagctgtagacttcgttcacactgctccgtccataatcataaagggttgagtaatcatctattggatctgtagtgataggtactgctccaaaaagtcttacaagcgtgaaataggcatacgccctgagaaacttagcttcaccttcatattgtgttctgttcgtttccgaggcattatctagtttttgaagaacattgttgcagcggtttatcatattgaaacaatgttcccatatttcactagtgattcctaaagtcgcatcccatgtactttcgttcagactgatgtgatcaagggagttattttttttatagtcgtatccttcatctgtagccaaactattaacataattcacatttagtgtgatgtcctgtaggtgataataaccattgagaagtatgttttgcagttctgcatcatttttcagataggtttccatttgcatggaatcggtagggtaacggtcaaaaaatccgtcactacaagcggtataggtaaggcttgtcatggaaatgatcgcaaatgaaattaatttattgaaagttttcatattgtatcgttgttaaaagttaaaattaagaccgaaagtaaatgtgcgggagatgggatatccaccaaagtccaccccgttgtttgtggcggagttcccttcataatttgcttcaacggaataacctggatatttgtcaaaagtccataggttttgtacattagcactgatgcgcatattttctatgcctattattttacagaattttttcggtaatgtatatccaagggatacgttacggatacgtagaaagtctgcatcataaagatatcttgtggaggggccaatattgctgcctaggttatttgtcccagctttgtgtgaccttccgtttccgggatcggttgatgacttccagcgtcctaatccggattcagctagtacattgtcatcgtatcggtttaaagaaaaagcacgtgcggctgcataaattacattacctccgcattgtccgtcaatagtgaccgccaaatcgaaatctttataaataaaagtattattccatccaaaggtaaaatccggttgatagttccctaccaattgataatcgttgacgtcaatagtgccgtctttattataatcttcaaatattaaatctccaatatcctgagttccgtttttagcatattgggctaaatctttttctgtattaaatgtgcctataacttttagcatatacatgtcacccatcggacgtcctacatagtttctcattacatttccccatttggttcctgcacttgcattggcaagttgattttgattgttggcaagtgaaagaattttattattgtttttggaccaactaagagtcgtttcccaggaaaaatctcctttaaacggagtggcggaaacttggatttctatacctttattttcaatttgtccggcattcatataaacgctgcctgctataccattgaaattaggaatattggctggcatcacaatgtcactagtcctcttgtagagatctactactatattcaaggcattgaatacgccaatatcaaaccctaagtccatttgtttgtttttctcccatcctaattgtcggtttgaataaccgctaggataataagtaggtatggctgttgtaccaaacaccacattttggtctgaactgatagtagatatccatgcataatcatttcctatctgatcattacctgttattccataactggcacgtaatttagcgatgtcgagccagtgtatatctttcataaagtcttcttcggttatattccatgccaatgaccccgaataaaaccatcctgcgcgtttgtccggtccgaatttgctggaacggtcgcgacggacagaacctgaaaggacatatttataattataatcatacactagacgggcaaacatggcgtcaaatacatagttggagtattcggaagaacctgtccacagtttcgctccatttacgttggtaatagatgtattgttataggcaatgggattatcagaatcagtccgatcgtcttgttgtacttcaaaatcactattgtattcgaagtcatatccgatcatggtgttcaaatgatgtttttcattaaatgtaacatcataagttgctgtagtggaccaataggcattataaccaaatccagacagacggtaaccgtctatgctagtcaaatccggtgtggatttgttacctgtataacttttacctagtaaaaaggcagattggtaataatcttgttttgctgcattagtcgtaaagtttaccgatgtgcgtaatgtcagtcctttaatgggttttacttcaaaataggcattggacattgtgcggatagaccatttgtcatttcgattttctagtaaattcgaaacaggattgcgaagttggttattaagtcctaagtctgcataatgttgagctatttgagtataatctccgttattctggtaaacaggaagtataggtggcatagacaatgcctgggcaattacgcctgttacgtcttcagtatttccaccggttggttgttggaggcgtcttttgctataggttgtactgaaattgactcctagttttattttctttgataaatttgcttcaaatcctcctttgattccgactcttttgtaaaaagagtttaacaggatgccatcctcgttttgatagttggcagagaagttgtattttaaaatttctgtacctcctgtaatggttgctgttcctctataattcagtgcattacggaatatggcatcttgccagttcgtgttttcgtaattcccactctctctcatctgaatcaacttgggaaaattttgaatacttccgttgtttgtacgtgcttcaatgatcatgtccatataatcatcagcttctagtacgtccacataattttgggcttcactccatcctacttgtgtggaaaaactaactttaggttttcctgtttgtccttgtttagtagtgacaataattacaccgtttcctgctttggaaccataaatggcagaggaggctgcatcttttagtatttgaatgtcagcaatgtctgcagggttgatattattaaaaagttctgcgtctgttgtggggtaaccgtcgattacaaataaggggtcatttccgctattgatggagcctgctcctcggacccggattgccggagcggctcccggctctccactgatttgttgtaaggtgatacctgacgacatacccacaaggctttgtgatatatttgatgtcggcatctctgaaatttttcctccctttacagttgagatggcggtggataccgaacgtttttgtatggcaccatagcctaccaccactacttcgtccaatgtttctgtatcttcttctaatgttataataagcttatcatttttattgactttaatttcttgtgtaatataaccgatgtaagaaatgagtattgttccttgactgttcatttgaagactaaagtttccgtcaagatcagaaactgtgccgtttgtacttcctttttccataatcgttgcaccgacgatgggaatacccgcattatctttcacaatacctgtcaccttattttgtccttgctgtattccttgcacaatctcagtagaaagaataattttcttttcaagtaccgaatacttcacattcgtccctgcgaaaatctggtctagtatcttgaatatattattgttgtttgtcgaaactgatacaatacgtttcaaatctacgtgtttattgttgaagaagaaatcaaaccccgattcttttttcagcttttccaacacagtgccaactgtctcattacgcatttcaagactgatcatggtcttttgcgcatacgactctgccgcataagtcatacttagcgaacagattaaaaagagtacacttagtttcataggtaatggagctttatttaagattaacctacacgactttatcatccataataattggacgctaaaataatttttcataattttgtaattgagataaagttaataaaatgttgtctttgcttgtcgccaaacaagcattgaaagatgattttttcatacggggtgatacgccaatatcctcccgtatgttttttgttcagggagcctgttgtctgttcatttttctagtatttaaattaagggttaaacgtatattagtacacttctattttcagcttttccgtctttatatctgcactgtcgatgtaccgccagcgtatgcgggaggaaatccggaaatattccataatacgctccagacgctgatgggtgaatgttcctgtgaacgaacagtctttcagtcccttgttggataatacgaattccacattgaaccgcttcccaagcatgtgcagcacttcatccagcggagtgtcattaaagatgagcttgccgtctttccatgaaatctccgattcgcccgaggtagcgtagcacttgatatctccggtttgtggggaataaaccaacttctgtctgggggagagcatactcttttgaaattttcctttgctattcttataaataaatcctacgctgcctttgataagcgtggtggaaatgggagtttcattaccgtatgcttccacattaaaacttgttccgtacacttccacctgcgaatggtgaggggtggagacgatgaatcgtttccggggatgttgagtcacatcgaaataagcttcaccgtttaattccacttggcgtacatcgccggcgaaaaaggtgggatagcggagggaggattccgaattgaggtgaactaccgtgctgtctggtaacaggacggaggtagtcatgcctgcattggtttttatttccaccatctgagcagtgactactggctgctgtctgcccggatacagggccaatacacctatcaggaggggaacggacaggatggccgcaatgcgttgtgtccatccccaccaggacaggtttctaacttttgttttgctttttaccttatctaacgccttttccgtatctattttctttgtgatatgctgtgtgtctacagccagatagagcgtattcagctgcctggctatatgtaaatgttcctcgtcggcattcagccaggcttctatctgctcattttccggaggagtggtcttcccttcgaaatatttagttaacaaagtttctatatcggtatggttttccataaattatgctttaatatttttcctttatattattaagacaagcgagaatgaaaggtatctaaacgaaaaatgcttttttttcaaaaaaaagttttttccgataaaaaccgctatctttgtgcgcaaggaa

SEQ ID NO: 3960 - DNA, 12339 bp, Unknown
  gut microbiota DNA sequence
tcttattttttagagacatttactgaatatcccaagaatagaagcagatgtggattatttttttagaatataagccttcatgcgggctatatcatttaagtaatcttgcaaatcttgttcatggtcttcttcttctgccataatatgtttggcaatatcacaagtggtgaagtcaattccgtttgtgaattcagcaatttgctgatagcggtagatggcacaacgttcggattctacattttgtttcaacaagatttccgaaccgaaatctacgggcgcatcatatttgcagcgagctaaatcaaaccattgtttagggtcaagtacgggtacgccttccaattcaatgatacggtcggccaataattttgcatggttatattcctcggctgcatgttcttgaaactcgcgttgtacatcaccgcgcatagcgccttctactacgaatgaacctacccagtattggtagaaagccaaccattcttcggacagagctgcattcagctgagccaataagtccacaatgtcaattttatccttcaggatattcacagattctttagccataatgtaaagtttaagttagtgtttattattatttagtccacagcaggtatagtcatgtcgtctaacacacctatgccttcctggtctacatctttttttacgtcagaactggtataaagccagataccgaatcccagcacaaataaaataaggaggatgattccccataatttacctttactcatagtttcttggttttagtttctttaataacagctggtactgaaaaaggttttgtaagtagagaaaaaacaggcgtctgttatggaaaaacggacgcctgtgtgtgaagtatgaattgatattagattttatcctattttgctgattttttttagtttctcttcatcaatgattttaatttttctaccgtcgatggtaatcagtttttcagttgcaaagttagaaagcgtacggattgcgttcgaagtagtcatatttgataagtttgccaaatcttctcgtgaaaggtaaatgcttagtgtagattcatcttcttctactccataagtatctttcaaaaataacagagattccgccaatcgtccacgaatatgtttttgcgtaagatttacggttctttcatcagaaattcccaaatctatagaaagttggcggataaagaacaaagctaattcagagttgtcttttatcagtttcataatggccggcatgggaataaggcagatagtgcaaggctcgaaagcggaagcagctgtcacgaagttcccttcggcaaaaaaagctcggtatgcgaaatattctttcgtctttaatacgcggataatctggctacgtcctcccacaccttctttgtagatttttacttttccactaagaagacacataaggtgcatcggagtttctccttcgcagtatatcgtctcattctttttatacttctgtatcgtaaagttctgagccaagaactctctttgttcctgtgttaaaggttgccataagtctggtatactttcagcaatctcagtttctgataattcttttctaaccataaacgtgctataaaaccgtgttataaagcacaaatataagaagaaaaaataaaaggacgaagtaatcagaagaaaaaagaaagatatattattaatttatcttcaaaaaataacaaaaggataggttcttatctcctatcctttcttttttttgtgaaattttatttggtgaacagtaattcacgatatttaggtaatggccaaatctcatcgtctatttctagttccaaatggtcaatatggtcgcggatttcttccagatatggacgcacttgttcctcgtaactgaaggctttctctacttggcttcccaaatgatttgctacttttcgggcttctgtcatgttgtgcacggcttttttaatagcaagtatgcggttttgaatttcacgtaccaaattcttccggtcttcggtcagctcttcgtattcttcggtggagaatatctctttcagaccacgaagattttctaatagtctgttctgataaattacagctgtgggaacaatatgattgatagctagatcgcctagtacacgactttcaatctggacctttttagtaaacttttccagttccacttctatacgacagaacaattcattttcattgaatattttttcgcctatcagtactgcacgagattgctcatcgttgaacttcaggatggcttcgggtacatggcagatattggtcaatccgcgtcgcgcggcttctgctttccattcttccgagtagccgtcaccttcaaaacggatgttttgtgaagcgatgatggtttcttttaataccttatacagagcttcttcctgttccatccctccgtttactaatttatctatctgggtcttgaactcattcaactggtgtgccatagcggcattgatcacaatcattgatgcggcacagttggcagatgagcctgcagcacggaattcaaaacggtttccggtgaaggcaaaaggagaggtacggttacggtctgtattgtcttgcaatatggcaggtatgcgcccgatacccaattgcaatgctttcttttcatcaggggtcagttcggcgtcattcagacgtgccactacttcgtccaacatatgggaaagatgacgtcctaggaaaatagacagaatagcggggggggcttcatttgctcctaggcgatggctgtttccggcactgacaatagaggcacgtagtaaatcttggtttttatagaccatcatcagtacgttgactatgaaagtcaggaaaagcatatttccttccgcagtcttggcaggagagaacaaattgatacctgtgtctgtacaaagtgaccagttgttgtgtttgcccgatccgtttactcctttgaatggtttttcgtggagcagtacagtaaaattgtgtttggaagcgatacgtttcatcaggtccattaccagctggttatggtcgttggccagatttacatcttcaaaaataggagctagctcaaattggttgggagccacttcgttatgccgtgtttttaccggaatccctagtttgtgacattccagttccaattctttcataaaactggttacacgtggagggatggaaccgaagtagtggtcgtctagctgctggtccttggcagacgagtgtcccatcaaggtgcgtccggtcaggcaaagatccggacgtgcattatatagtgcggtatccactaaaaagtattcttgttcccaacccagattggcgaatacgcgttttacgtttggatcgaacattctgcaaacctcagttgccgctttgtctacagcacctaatgccttcaacaaaggagttttatagtcgagtgcttcgcctgtataagagatgaagatagtaggaatacaaagtgtgctgtctacaatgaaagccggagaagaaacatcccatgccgtatagccacgtgcttcaaatgtgttccggataccgccgttgggaaaactggatgcatccggttcttgttggataagcagtttgcccgagaagcgttctataacattaccgtcgtcaccgaattcaataaagccgtcgtgcttttcggcagttccgtcagtcagaggctggaaccaatgagtgtagtgggtaacattaaaggtctttgcccaattcttcatgccattggctatcatgtcggccatttcacgattgataggggtacctttctcgattgcgtttattactgctttataagcctcactaggcagatattcctgcatttttttacggtcgaatacgtggttgccgtaataatcagctaacttttcagaggggtagtcaactttaacggggcgtctgttggctaactcctgtagagcaaaaaatctcattttggacatgttgtctttcttttactggttgttggctgcaaaaatactgctttttgattaataattcgctatatcgctaatcatttttcatttctgttaaggatgttaattaagtattatcatgcgtcagcctgttggtttttgtttatatttgctcttcaaacaatgaaaagaaagtacattgatgcactatatacggattgtcaggttgattatattttgtcttttgttacctttagctgttcaggctaagagggaaaaggttgatatgcccgacaagccgatggtgtccgattccattcttcagtgtattttccagttttcgccgttctattcccgtatcattgatgagtataaggctgatttatatataaaaggaaaagtaaaggtacataagcgcaatcaccttatccgctatgtaccgtccatgtttcgtttcgaaaaacacatcaatgattaccttatggaatctcttagtgagctgcattatacggcccctgatatatacgaccgtaagataaaagcggtatccactacatttccacgtaacaggggacagataacggatgtgatggattatttgaacatgaatatctattcttcttcattgatgtccgataaacttctttctcctttggataagaaatctagcagatattatcattatttattggattctatagccggtcctcccgattgccagcggtataaaatacttattattcccaaattccgtggtacacagttggtcagtggatatatgtgggttagtgatcagatatggactattcgtgaactttatattgaaggcgtttatgatgtgatccgcttcaaggtccgtgtcaagatgggagaggagggcgatgtggagtttctgccggtgcagtttgatttgaatcttgtttttaagtttataggtaaccatctggaaatggatatgggagcctggttgaaatacaatgaaattaaattttatgaaggagccgcccggcgtaaatctcaaaagaagcatcaccatgacctgacggaatcctataagctgacttgtgattcggaacagctgataacagataaggaaaagttcaatgaactgcgtcccattccgctgtccgctttggaggattctttgtatagaagttatgctttacgtcaggatacgcttttacgcgtaccgaaaaaaaagaagaatgaacatttggagttttggggggagttgggtgacatgcttatcagtagttacaatgtgaatttgtccagtatggggagtgtgcattgttctccacttattaatccggtgctgttggattatagccacagcaggggcttttcgtataagcagaagtttaaatacagtcggctttttcatgatggacgtatacttagaatcagtccgcagataggttataattttacacataaggaactttatgtgaaagcggatgccgattggcaatattggccggaaaagcaggctagttttgaggttagtgtaggtaacggtaaccgcatatatagtagtgtcgtattggatcagctaaagcaattgcccgatagtacctttaattttgaccaattggaattggactatttcaaggatgtgtatctcaatctgttccataatatagaaatagtgaacggcttgtttattaaagcaggtgtttccgtacattggaggtatctgataaataattcgaaagtcattcttgaaaagccgttgcccgataaggattgggctgcattgcgaggtatcagatcagaatacaatagttttgcacctcgtatacgtattgaatggactcccggtatgtattattacatgaacggtcgccggaagatgaatgtaggttccagtatgcctacttttatgctggattatgaacggggcattaaaggtgtattcaagagtacgggtgctcatgaacgttgggagtttgatatacagcaaaacttgaaactgagcggaatccgaagtatcggttatcgcattgggggggggatgtttaccaagcaggaagatatgtatttcgtggattttgctaactttgcccgtcgtaatcttcccgaaggatggaatgatgatattggtggcactttccaattgctggacggacgttggtataactcctcacgtcagtactggcgggggaatttcacctatgagtctccttttattctcttgaaacccttaaaccgttggctgggattagtccagcaggagcgtttgtatggtggtatcctgttcatgccacatcttaatccatatatcgagttgggttatggcatcggcacacatatatttgatgtgggggcttttgtaagcactatcaacgggcaatttgatacctttggttttaaattcactttcgagttatttaataaataatcctgttcaaacaatctgtttggttttctgtttattacaacataacagaaactaaacagtgtatgcattataaaatatttttatgtgttcttttgttcccggtttcattatcagctcaaaacggggaattatctttaacattggaacaatctgccagcctgatgaacaagggcagccgcacgttgcaaatggcggataaggctgtagatatagcacgcagtgagcgacaaaagatgaatgctttttggtatccgtctttgaatgcatcgggtgcatacgtccatttgtccaaccatattgaggtcaaggaacctttaaggcaatttaccgatccggcaaaagactttgtacattccattgtgcccgatgataaatttatttcttctattcttgataatataggtgcgcatacccttacttttcctttattagaacgtaacctgacgaccatagatgctaatgtgatgtggccgctttttacaggcggaaaacgaatttttgcaagccgtatcggcaaccgtatggtagatttggccaaagcaggtagggaagaggcgggagctactttgcaatcggagttggtggaaacttattatgctttgcgtctggcgcaaagagtggtggatgtacgcgagcaaacctttttaggcttgcagaaacattaccgtaatgccatgaagctggaggagaacggtatgataaataaggccgaacgcctctttgctcaggtcactatggacgaggccagacgtgagttggaatctgcccggaaagatttgaatgtggcgcaaaatgccttgaaagtcttgttgaatgtggaagacgccatatccatcaaccccagttctcctttgtttatgaaccatgatctgcccgatgaactttatttcaagaatctggtaagtaccggcagctatatagtaagtaaattgcgaatacaggaggcgatggctgataatcaattgaaaatcagtaaaagtgcatatattcctaccattgcattgtttggaaagcagacactttatgcagagaatcttccgaaaaacctgatgccccgtactttggtaggagtgggttttacttggaatatattcgacggactgaaccgtgaagccaatatccgtcagacacgtcttactaaacaaactttgcaactgggaagggaaaaggctcagaatgaattgggcgttttggtagacaagttatatagcgaaattcagaatgcaaaggatgatgtcgccgcactcaacaccacgattgagatgagtcgtgaattggtacgtatccgtaaaaaatcctttcaggaaggaatggctacctctactgatgtgattgatgcggaaacgatgttatccaaggtgcagattgcttttttgctggcttattataaatatgatgtggcactggcatctctgctctctacttgcggaatgcccgaaagtttttggcagtatagccgtaccggacaaaccgagaactttatattcgggaaataataaaaaaagaaaacaatatggaaaaagagaagaaacagttaggagtcgcttttatcgttgttcttgtggccattgttatggtgtctgccattgggattatagctatgagcaataaaccggttgtattgcaggggcagatagaagctactgaaatacggatttccggaaaacttcccggtagaattgatacctttttggtccgggagggacagtatgtaaagatgggtgacaccttggttgtgattaacagtcctgaggcttgggcgaagttccagcaggtaaatgccttggaagatattgcgaaatttcagaataagaaaatagatgacggtacacgtcggcagatagtccgttcggtagaagaattgtggaacaagtcaaagagtgacttgcaactggccacggtgacgtatgaccgtattcaggcgctttacaaagatagcgtggtcaccagccagcggaaagatgaagtggaagccatgtataaagctgctgttgccgccgaacgggcggcgcatcaacaattcctgttagtgaaggacggagcgcagaaagaggataaagagagtgcccgctccttggtggatgcggctcggggcactgtgaatgaggttcaggccttgttgatggatgcccgcctcacagctcccgaagacggacagatatcaaccatctaccccaagcgtggagaactggtaggagcggggactcccattatgagtctggtagtattggatgactgtcatgtagtgcttaatgtccgtgaggactatatgccttatttccgtatgaacgagaattttatgggagatattccggctcttgatgtaaaaaacaaggcatttaaaatcaattacatcagcccgttggggagttttgccacttggcgttctaccaagcagacggggacatacgatatgaaaacttttgaaattcatgcgctgcctgtagagccgatggagggattaagaccgggtatgtccgtcttggtaaatctggatgaattgaaatgatagaaggatagctatgttattctgattgcagtgaatggtaaatataaatgaactacttgaatgaaagaatctccttttatagcggtattgaaacgtgaactggaccgtatggtttcccggcgcatttattttgcatcgtgtatcgtcttgcctttgttttctatcttctttatggctacaatttttggtaacggacagatggagaatctgcctgtgggtgttgtggatggtgataatacagccacttctcgtgagataattcgtatgaccgaggctgttcccactttccgcatcactcggcattatgccgatgaagcggaggccagggcagatgtgcagcggaaaagtatttatggatacctcagtattccgtctggttttgaagcaaaggtgatggatggtaaggaaacagctctgacttattattaccattatgcattgatgagtgtgggaagtgagattcacggagcatttcaaagtttgttgaaaagcatctcggtagttcccattgtcactcatgctgtggcattgggtataaatcaggaagagatagaatcttttctgttaccggtcaccacacagaatcatccgttatttaatcctgatatggattattcggtctatcttacacagccattcttctttgtttttctgcaagttatcttgttgttggtcactacatactccattggcagtgaagggaaattccatacttcagccaattggctggcagtggcagatgggaatatctgggtggcggtcactgccaagttacttccatacagttttatcttcatcgttatgagtattctggcaaactatgtcttttttggtgccatgcatataccgatggattgtggtttttgggcgttgaatcttacttcggcactattggtcattgctacgcaggcgctggcggtttttctgttctctctttttcctgcgttgagtattattatcagtatcgtttccatggtaggatcgttaggtgctacccttggcggggttacctttccggtgcttcacatgtttgcaccggtgtactatgcctcttatcttttccccgtccgtcactttgtcgagattggacagaatctgctttatggcaactatggttatgcgtatatgtggggcaatgtagcctgtctgctgttgttccttattcctcctttattgttgttacctcatttgaaacgctctttaatcagtcggaaatatgacgatattgaataatatattagctgtatcttggcacgagtttcgtgtgatgtgtacccgctattccattttattggtactcagcggtggcatctttgtgtatggattactttataactatatgtatgctcccaatgtggtacgcgatgctccggtggcagtagtggatatgagtcccactccgttaagccgcagttacatccgtttgctggatgccactccgcaggcacgggtattgacaaacaatgctgatttgcctgctgctaaggaattgatgaaatatgatgaagtggtgggtattgtttacattcccgcggattttgacgctcgtgtggggcgtggtgaagaagcgatatatattatgtacagcaccactacggctttcctttattttgcttccatgcaggaagcgtctgctggagccatgcttgctgtgaatgatgatgtccgacccgagcaagtggtttttctacctcaggatgatatacaatctgtggttcaaacaaggtctgtcgatgtggtaggtactgccctgtataattataccgatggttatggtacttatttgatacctgccgttttgatggttgttatttttcagacgttgatatttgttatcagcatgttgagtgggaaagagcgtgaaactggagatatactgatgtttgcaggccctgaaggaagggatctttcttttttacgtatggcatccgtagtgataggaaaatcatttacttatttagtcttttatgctttattctctgtctttttgttggggcttcttcctttagttttccaattgcctcatttagcatatccgtggaaaattgtggcacttatgataccttatattcttgctaccagtttctttggattggcctgttcgttatttttcagtgatagtgatgctccattgttgttggtagctttcttctctgtaggattgattttcctgtccggagtttcttatccgctggagttaatgccttggtattggcaatggattcattatatggttcctgcggctcccggaactttggcctttgttaagataaattctatgggagctagtatgtctgaaatcagtcagcaatatattatcctatggatacaatgtgcgatatactttgttttggcttgtcgagcctatcgccacaatataaagaaagcaaagtgtgaaagacaataattttatgtgtgattgttttttatgtaattcgttttgctgattctctattttttataaggtctgtttggagctggagcgaggggcctgaaagttgttgatattttaattcttggtgattattctcttgttgtttcttttgttttttcagctccttttatgagatgatgcaagggggaaacttgcaaacttgcacaacttgcagtctttccacacacacacacacacacgagcgcgcgcgattgcgcgtatgcgtacattataatggcgatggattattatatcctggtaaagtaatgacatacaatccgatgagagtgtgaagggtagagtggaggaagaggtggagtggtgtgttggcttccatcttttttcctagttctaggtagtgaatggtctggttctatcctgtttttttgtaatggggggatgaagaaaatctttctggaggttatggtaaccgatgagcggtaggtgaacagcagccggcagcttttctgacggagtatctgggtattggacgggatgctatgtgcttttgtatagtttgtgtgttccgaagggttagtaacgtgtgttccgtaaggttagtaatgtgtgaccttgtacgttactaacatagaggcctgtatgttagtaacgtaccttgtttaaagtagctaggaggtttttcgcatgcaggatacgtgtcttccgcagaattatgtgaattgtattggtaaggttaaagtgtgtggttgccgcagattcagggagtcggtcctttacggtcagtgtctgttttgttctagtccttgtcttccgctttcttattttctccttgtcaggctttcctgctcttttccaccggaagtcttgtcacgtatctccctttccgccttttgcattctgttatcctttcctccgttgtagttctctccggtatcgtccgtctgtcttccgctctcttttttatgctttattattttttcatattataatgtacgcgcacgtgtgtgggtgtggaagtgctgcaagtttgcaagtttgcaagtttgccttccgttttttctctttccttgttttccgtctgctatcttcgtatgggtcccttcctttttccgtccctatacgcgcgtgcg

SEQ ID NO: 3961 - DNA, 446 bp, Unknown
  gut microbiota DNA sequence
gaataaggatcggctaactccgtgccagcagccgcggtaatacggaggatccgagcgttatccggatttattgggtttaaagggagcgtagatggatgtttaagtcagttgtgaaagtttgcggctcaaccgtaaaattgcagttgatactggatatcttgagtgcagttgaggcaggcggaattcgtggtgtagcggtgaaatgcttagatatcacgaagaactccgattgcgaaggcagcctgctaagctgcaactgacattgaggctcgaaagtgtgggtatcaaacaggattagataccctggtagtccacacggtaaacgatgaatactcgctgtttgcgatatacggcaagcggccaagcgaaagcgttaagtattccacctggggagtacgccggcaacggtgaaactcaaaggaattgacgggggcccgcacaagcgg

SEQ ID NO: 3962 - DNA, 3267 bp, Unknown
  gut microbiota DNA sequence
tgccatcttattttttagagacatttactgaatatccctacactaggtgtttctgcacaatcaaatctgaaatggaatgtgaatgcgggtattggtatgtcaaattggtatggtgatgatacggatggtacagatgctaaatttgcttataaggtgggtataggtttggaagtaccttttgctaatactaatatatggtctttccagacaggtttgaactttatttctaaaggtgtgaaaggtgatggagtaactgatgcttgggacgtggttgatgtgacgatcaaccagctttatctggaactgcctttgatggttggtgctcggatacatacggccagcaattttgatcttcttttcaaaggtggtccgtatttggcttatggagttggcggaaaaactaaaatagatggtgtatccgagaaggctgatactttcggtgatgatggtttaaaaaggttcgatgccggtttggggttaggagttgcttttgaatttggcaacatagttgtaggtgttgaaactggcacaagttttactaaagtagctagcggtgttagtgctcataacctttctgcattggccactatcggttataaattctgaccacagatataatcttacctttaaatatataaagaacggctgtttctcttttagaaagaagcagccatttttttagatgaagcgtggtttatgaaataaaagctatatttgcagattatgattaaagacacaattttttagggatatggcattaatagataaggtaagagtgataaaactacttctttttgcactgtttatgatggtaagcatggtgactccggctcagagtcaggtggattggagtataaaggccggtataggcatggcaaatattataggtgataatatgggatctcctaaagtaaagctggcgtataaattaggcattggcttggagtgcccttttgataagatctggtctttacaaacaggcgtttcgtttgtttccaaaggcactaatcatacgattgttgaaacagatggaatttcggctcaggctaaagtaaatgcatcctatttggagttgcctgtaatggtggcagcccggtttgcaatggatcggaatacttatatacttgttgcggcaggtccctatggtgcatgggggattggtggcaaaaccaaggctttagggtatagctggtcatcatcgtctacaccggattggaatactggaaatgtggttgaaataaatacttttggcaaagatggacttgatctgcgtcgtttcgattatggagtggcgataggtttatcggtggaataccggcattatgtgataggagtggaaggacgattagggctgtgcaaacttcaaaaagaacttcaagggaagaatattaccggctttgtaacagcgggatataaattttaagacgattttttatatggattgtaaacacggatcttacaggctaagtatggtttgctttatatctgtaaatccgtgttgcaatttgcactgagaataattaatgatggaataaacgaacaccagtgaatgccatggtgatgccgtatttgtcacaagtgtcaattacatggtcatcacgtacagagcctccggcttgtgctatgtattccactccgctcttatgcgcacgttctatattgtcaccaaatgggaagaaagcatccgaacccaatgatacccccttcatggtatccagccatgcgcgcttttcttcgcgagtcagcacttccggtttttttgtgaagaattgttgccagatgccgtcagccagaacatcttcatgatcgtcactgatatagacatcaattgtattatcacgatctgcacggcggattttttctacccacggcagattcattactttaggatgttggcgcaaataccatatatccgctttattaccggcaagacgtgtacagtggatgcggctttgctggccggcaccgatgccgatagcctgcccgtcttttacataacaaacagaattactttgtgtatattttaaggtgataagggcaataatcaaatcgcgttttgcttcgtctggaaaatgctggcttttagttggaatatgagtcagcaggctttcgtccagtctgatttcgttgcggccctgttcaaaagtaatgccgaatacatctttgtgttcaataggtgcagggcggtaagctgggtctattttaattacattgtatgttcccttgcgtttgtttttcaggatttccagcgcttccggtgtgtaatcgggagctatgacgccgtctgaaacttcacggttgatgaggcgcgcggtagcttcgtcgcaagtatcgctcaatgcgataaagtctccgtaagaagacatgcggtcagcgccacgagcacgggcatatgcggtagccaatggggtaagtggcaagtcattcacaaaataaattttcttcaaggtgtcattcaactcgattcctactgcggctcctgccggactgacatgcttgaaggaggctgctgcgggtagtccggtagcttctttcaattctttgaccagttgccagctgttgaaagcgtccagaaaattgatgtatccgggacgtccgtttaatacttcgataggcaattccccttcttgcatgaagatgcgtgacggtttttggttgggattgcagccgtactttaattctaattcctttgccatagttttataatatttcggtttatagattttcaatgtgtggcaaaggtacaaaataaatggggaagacaggttataagaactgtttttggttgtaggcaacatgctcgggtgttattgggggaaagttggagtgtgagataggaattgctttgcaatatgaaaatctatttaaattttctttaaaaaaactttcaaaagaatacggaacaacagttaaacaggaactaagtttcatttctttattcggaattttgggtttgtcggactttggtggggaagtatgatccgagcttgatgcgactgtttttctattttttctcctacagtttttcccctgtgtttgcggagtcagcacttttgagagctctgtagtttgtgtttcgtaacctgtccggttgtccttcggatttgcttcttttccgtctttccttgtttttccgtctgctgttttcgtatgggtcccttcctttttccgtccttatacgcgcgtgcgaatattataatgtgtctgtctttttccttccgtgtcctccgttataaaaacatgctttgtaacacatctgttattcag

SEQ ID NO: 3963 - DNA, 3934 bp, Unknown
  gut microbiota DNA sequence
ataaaagtaatggaacaaggtgtttggcaagaaatagaactgttgtaccagaagtttcaaaaacttggtatcagtgaagcggtggactatgacaagtactacctttattctctcattacccattccacagccatagaaggctcaacgttgaccgaacttgatacgcagcttctctttgacgagggagtaacagcgaaagggaaaccgcttgtgcatcatctgatgaatgaagatttgaagcaagcgtatgaacttgccaaaactgaatcaggcagtcttgtacctataactcctgcttttctgaaaaggttgaatgcaatgttgatgcgtactactggcagcgttcacagtgtgttgggcggctcttttgattcttctaaaggagagttccgtctatgtggtgttacggctggtgttggtggacattcttatatgaactatttgaaagttcctgctaaggtggatgaactttgtgcgattcttcaagagaagcaaaaaaaaatgggaacacttcgagaacaatacaaattgagctttaatgcccaccttaatttagtaactattcatccgtgggtggatggcaacggaagaacggctcgattactgatgaactacatccaattttgctatcacctttttccgaccaaaatatttaaagaagatagagaagaatatattctttccctgcgccaatgtcagaatgaagaaactaatcagccgtttttagactttatggcaaggcagttgaagaaatcactttctatagaaattgaacgattcaatgtatcacgaaagaaagggtttagttttatgttctgatactatataaaacaaggattgctatttatgagtttatggtaaacttgcatgtgggaaagtttgaacatccatagaaagtgccgtacttgcctttcctcaaaatgagatatcctccgcattgaggacaaacaccttgatttattaggcgtgaacttctgtattgccgagcctttgcgttatgcttatgctgttttagtttctctttatcagcgattatgcgattttggttaattgtctgtattatccaatttatggtctcctgattaagaacagcagttctgtattgtaatatagcacgttttagattatatctgtttacaactatgttattgtcagcatgcacttttaattccgcactgttattgaaaacgacaattggaataaaaagtatatccgttgaacatttgagcaaatgatgcaaaaatcttacatgtccagcgttttgttttatcggattgtaaaattgatgtttacttttatagatggtttgcgtccagtattcactgttttctccgcctaaaatccaacctttatatccctttgtttcaattacaaatacaccataaggtgaaactacaatatggtcaatttgcgttgaatatccgctactctcgaatagtaaatcattaaaaacaacatactcttctggtaactcttgaatcttgttattcacaagcttttctgaatacttgcctttccacattggcatcttcaatttaataaagattgccactgcaaaaaagataacgatgatgacaatatgcatattactgatttaatagattctttttatccatcttttacttgattcaaatccccattgaacatgccatcttcttcctgttactttatctaacaaaagaaattgatatatattttttgtaggatataattcaaatgttccacatccggtatcataagataaatcttcgccattaagtgttacggaaaattcctcctcgtcatctaaagaccattgtacaacgtctattttcccagttttagtatccagttgtagaaaattatacatattttctgttggatatagtttatatctgtcaagtccatgcatacgaaaatcaatatcttccaaaagtgcatgaatttttatcaaagtagaatcattagccgttttggcttgcggagtggtactttcgttttgtgcaaaggtacataacggaatcaagaatagataaaaaataattacaagtttcttcataggtaaattatttaagcgattaaaattaagtataacagtatagctaatattgtattcatttttttctatttacatcccatttaaaagtgtaaatataatctccgataggaatgtttacaatcaaaatcttaccttttttccttttaatattcatatagccaataatagcttcatcgggataaatagttgtggtttttaaatatccttgttcacgtatagttcggtcattatccatcatttgtcctaatgtaagcatttgattggtagatgcaacatttgcttggtatgctgcattagcgtcataatgattggttatggtagtgtaagcataaccattagaagaataagacgtagaataggatgttgaatatcctgctgttcctgcattaatgccggcagagattccatataatgccatagcccatgcttgtgagcgttttatttttttttgatattcttcatttgtatatacttcaagttttaaagtatcatctttttttgttagtagattagagtgtacgctatcaggttggaatacaattggggtttcacttaaattcttgataaaaatatccaagtgatagtattttccataatcatctttttcctcaaagcatgaaaggcctacaacaaaatcatttttgtttaaataagcccaaaattttccatcattatattctgtcaggatagaatcgttttgggggtatatgaatgtttgggctttacatatggttgaaagcaataaaaatattaccacacatatattctgtttcatatcaactaactgttttaattatacacctccagctgccacaaggactttataatatcacgaagcgtggaactgtaatgccacctctttgaatgaaggtcctgagaaaacctttgtgtacagatgtaacaatagcagcccacgctatagcgtgagaaccactatgctattcttgtacacgtttgaaagtttctcaggttttcattcgcaagaaataagcataacgcttcttctaaattctaatatgtcttggaaagagtagcctcaatccgcttacaaagatatgcaattttattgaggtacaatcaaatactatcaagattacattctgaatcctctactttttcttggttcttctgctgattgtcgcaaaccgtgccttaatttttcccattgctctttgaaccattcacctatcggctgtctgtttatagttagcactaatttgttttcatcaaccgaactcttctctatcttgaaaatatcgttcttgatttcaaatcttcgtttatgttcttcggaatagatttttccattgcatctgatagcttctttttttgccaaaaggctgtttaccatatctttggtaaatccgatggcatagcatagtttttccattctcaacatttctttgagtaatggaaaccagttgaacgctttttcaagaatggtgttcaatcgtgatatttccttgtctttggtttcaagctcttgattatgtattccttgcaggttacgaatctgcttgccgtgctgttcctgcatttgttgcatcttggctcttaattcatcaatgcccttgtcacgtttggcaatttcatgccgtaaactttcattggtttgttccaaatcttttaatttaccacttccgaaaagagaacctacactgctggttatggcagtggctacatcggtagctgcacttttgagtttgtccgtgcgtatctctgcttttacctgtttgagttcctgctcggcaaggcttacttgttgttccttgtgtcgcttggtttcctctatacgttgcagttcagctttctgcttctcaatgatgaagtcgtttcgttccagatgctctttacctgtaacaacttttgcctgcccacgttccatcaggagcatat

SEQ ID NO: 3964 - DNA, 230 bp, Unknown
  gut microbiota DNA sequence
tagccacctgaataaggttgacatattgttgagctgttatcgtaatttcattctgtagtaaaaactaaaggtatacaccatccgacatataaagaaagtggacgggcaattagtaatgctcggctttggtatctctacctttacacctgcatcctatcaacgtcgtagtctacaacgaccctgagaaatctaatcttgtggccggcttcgtacttagatgctttcagcac

SEQ ID NO: 3965 - DNA, 522 bp, Unknown
  gut microbiota DNA sequence
ctttacacctgcatcctatcaacgtcgtagtctacaacgaccctgagaaatctaatcttgtggccggcttcgtacttagatgctttcagcacttatccgatccagacttagatacccggcaatgcacctggcggcacaaccggcaaaccagaggtctgtccaacacggtcctctcgtactagtgtcagagccacgcaaatttcatgcgcccacgatagatagagaccgaactgtctcacgacgttctgaacccagctcgcgtgccactttaatgggcgaacagcccaacccttgggaccttctccagccccaggatgtgacgagccgacatcgaggtgccaaaccactccgtcgatatgagctcttgggagggatcagcctgttatccccggagtaccttttatcctttgagcgatgtcccttccatacggaaacaccggatcactatgctctagtttcctacctgatcgacttgtaagtctcccagtcaagcgcccttatgccattacactctaccgccgg

SEQ ID NO: 3966 - DNA, 19708 bp, Unknown
  gut microbiota DNA sequence
ttttcaaaaaagaagacgacctttttaaaaaagaacaggaacttttttaaaaacgtcttggtcttttttattgttaccaatgcatcgtaaaccgtcattctgtggaggtacagacctttcatgcgtactttttgcggggaaaaagcctaaaacaccctactttatatcaagtcgaaacgatctataagaaaatggtatgtggctgaaaacaagtaatttatgtggaaatatacttcaaaacattgtgagagtatgagagcatgaatgagagcaatttttttatccttactacataaatcgttaataataaacctgttatatatgcagtgagggcatgagggtatacatggctcgaacttttctttgaaatatgcaaaacggctatattccatgatataggaatatatgccgttttgatagaggggaaattttttatggtatataattccaataatccatatttgtaatgatttgaactataattttacgatctccttctcgtatttcgttgggagcattctgagatgcatacgatatttttgcgcccactccttttgcttttaacattttattgggaactccttgctttataagtgcattgactacagcgtctgcacgtttttgggatagatccatattgtattgtgatgatccttttgcatcagtacatcctgtgatgagatattttttgcttgtgtctgtcagcataatttgagctatttcatcaatgatagtagctgctttaggagttatttctgttttatcaaactcaaaatagatattgttgaataaatcacataaaacattgggctggcttggagtttctacaatttgtttcatgattataggtttttctataactttttctatgattttttccacatattgaatttccggtttgacttttagggatttaccaccaatgcgccacatcaatcgaatgcttccttgccatgaattggctatatgtttgtatggcatgatgaggtagtctccttggagtcctatgccaatgttgtcattaagccacatattcacgcctattcccaatgaaatagggataagattttgtttatctttcccttctttagtataatcatttgatagattccatcccatctcctcactgttgaattcttccatccccttatagttgatcttaaaattcttgtatatatagttggctcccatccgtaagaaaggatcaatataatttgaatggagatattcacctagacgccactgtaaaccgattcctgccatacctagccatcttgattctttaccgttacggacaggatcggaactgtagtctaatgttccttgtaaatctagataaaaatgagagttaagttcacgagcaaaatatagatttcctccaaaaataaaatcttttttattagtacctacagtgtaaccgcctttattattagtatggaaattaatgacattaaaacgtgtcatttgaagtccggttgcgcctatacctatttcccatgcttttttattattatcggctgctccattctttgcgttttgttgtgcatttataggtaaaccgaaacataatactgaggtaaagtatagtatgagatgaattttatgtatatatatattcttcatatttttattcttcatagataacttgtacttcgggcaactcataagagctgctatagttttcaataataaatgttttttcatcctttccttttcggagataaccttgataatatctatagaaatatgaactgtagtcactggcaatgtatatggatgaatttaaaaatggtgcgaatactttgaacgttggaacttctgcagaagatctgttattagaacttgatgcttcttgtgagccggctgttgaggtatatctgaatgtgatatatgccattttaagtttgctggcttcttcttcagtatatgctatcggttctacatagtccattccattttctttaacgacacgtgtggtcgatgacttgtaaattcttgtaaagtctatttttgaaaaatccagttcaccttcagcagatgagaaactgggtgcttctccattggatattatttttaattttaatgtttttagcgtaggtcccatttgataaggagctaataaacaaacaccattccattggaaagtttctccataataaggttctctagcttttacagtgtaataaacatcacttccatcccaatattcagattgattgtttttgaattttccgggattttcttgaatgaaccgataggtataaatatagtaataatatcctccattatttgaactataactttggtttgaatatagttttttgtctggcaaaatactgttgggattatttttgtcagagactctatatgcgtctaaattccttgaaccactattaggtaaataagaagggatattttgccattggtcttccggattaacttttcgttgtatatagaaatatagatactgataatcgtataatggatttgaattatcgcggaggatcattctcatgcgtactctattaggaacatatgtgtttttagcggattcttgcggcaactttccggctagggttacttcttttaccgttccccagcgtaagtttatgtcttgtatttcgggtaaatcttctttaggtacaataaactctccgttttcattggtaatgtaagttttttttgcattgatacccggcatgccttttacttgagcttttggtgcgatttgtccagtttcatcatatactttatagagtacacctccatcagttgtgcgtacatattcaccatattctgattgagaatattgtgcaataacattaggtatacccttaatgatggtaacttctgttcccggttttcctggttctccgggtttgccgtctttgccatcttctccgtctttgccatctttcccgtgtagatagtcataaaaatcctttaacgtatttttttcacagtcccatactccaccatttttgtggtcaataagtgcgtctgttgtaccgcaaaatttagctaagtcatttttccacagttcatgtgctgacaaaccattgcttccgtttattccgtctttaccagctaaataattgaaaaaatcatattctgaaactttgtcagaaggccatttttgtcctggatttttaggatcattcatattgcctgtttctacagtttctttccatagttcataagcggattttccattgttaccatttgttccactgaggtaagtgtaaaaatctgccattgtaattttatctttggaccatgctgaattatttttgtctttgattttatcatttttgacgtcatttacccataattcgtatgcagatgctccgttaactcctttttctccttgagcttttattcttgtatcagtagtacctatccaccaatttccgttattacctatatggggagatacgccatcatctcctttttctccttgagcttttattcctgtatcggtggtgcctatccaccagttcccattttttatcaccggggtaagtccgtccgctcctttatcaccttgttctcctttgggaccttgcactgcaatcccagtattggatgtgcctatccaccagtatccgtctttaatgaaaggggttaatccatcgcttcctttttctccttgagcttttatttttgtatcggatgtattgatccaccagtttccattaggaccaatataaggggatgctccgtctttaccattttctcctttttgaccttgagccggaaaatttgtatcacgattgccaatataccaattaccattttcaccaacatgtggagtaataccattttcaccatctttcccttttaaatataaaaagaaatgttccattgttgtttggtctttgggccaatttatattgccgccagcaacagattgtttccataattcataggcggaaaatccgtctttgccattaattccatcctttccatctttgccgatagctttgatttttgtatctttattgccgatataccaattcccattttcgccaatatgaggtgattctccgtctcttccgctaagaaaatcccaaaaatcggcttctgtattttttgaagaaggccaaatgagcgaagggtcatgagggttggtgacattaccttgggtgatcaggattttccattgatcgtatgcagacattccatcttttcctttgtctcctttttctcctttaatataaactaaaaagtctgctaaatcaacttgggtggaaggccagtttatatgaccggtttcaacttcttctttccatatctcgtaagcggatttgccattggttccctgaggaccttggggtaattcaaaatcaatactgctgcacgagaaaaaaaatgtgcaaagtagcactgataatacataaattttgcatttcttctttgtatacatgactgtaaattattaaaaatgaattgttctttgttgttacatattggataaactccgttctgctttattgaatattgtatcgttggggggcatgcaattttatattttaggttattctgctgtgtgcgatttacattataataatattcacattttatttgggtgcaaagttctatatttggtactaaaaagaagttgcgtatttaaaagatttgtttgcatataatcagttctttcttttatatctgcataaaaaggtttcctatttttctaaatgttcgttttgggatagttttaaatggtagatgctttatatgattttacagagggggatatgtgataagttttccatatattgatggtggattatgattaggttttatgatatttgttattatagatgtatagaaattcttaaaatagatccatataccgagatcaggaaacaaacttattattagctttagtgtgtatgatggagacaagtatattcataattttcaggatgcgggatgtttgtttaatcgtttgcagaaacagaatatgtttcaagaggaggtgtatctcttgattcttctccttttttacgtatttcgttaggagtagctccgatatttcttttacagtaggttgtaaaatgggagaaagtcttgaaatgatagtccagcattatttgtttgatgggtaaagtactttttttaatttgaattcaatttcataagatgtttgtttttgtaaccattgatatggtgtatctccatggaagttttttttgaataactgtgtgaaaacagtatcattatatccacataaaacagctagttctttggctgttctgcaagctttgtaatgtgtcatgacggatacgaagaattgaaggtcgttagatagcgcatcacggaaaatggaggcaatttcattcttcttatagcaaattttaaataatgagaacaattcatattctttggctcgatgtaagtcgggaatttctgttccatttttcatgtaatcgaccagcaaatctaagtaggaacgcattaacggataaatgggaaggacttctaccggttttacttcttcgatggatatatcttgcagatactctattgttctgctatgtagataaggagccacaatattacatgcatgaatgacaagttgtacttcatccattgccttgattttacattgatgcaggctgctgatgaagaaaaattcattctgcattgccatcagaggcatggattctatatgatctctgaataggcataatgatccttttagaacaaaacaaacttgaaattcatgggtttcgttcaagttttggataatctctcctttacttatatgaagacacctgaattggctgaatctggatagcgcaagaggatcacggtataaattctttagtaaaaatagcatttccatacattataaacattttaagataaaaaaagttttgatacatctatcccggacaaatataacttgatatttaaaatgttttaaagctataggaggaatatgcaacaaaatcattgctaatatgaaattgaatcttctgtttaagaaagagtttatcaacatatgaaattataaggtatttaaggccggatgctttggatggtagcttataaagtggaagatgtttactgattttttttatgagtgaatgtaaataagtgatttggaatggagataaatctaaggatctttttcttattgcaatgaacaataaggaaattacaaataaaaatccgaatataaggccgctcatgtgatactgattactaagtatcgattatataagtattccccatcttcgggagtatggttcaaagtacaaagcaaccattggcataatggattatttgtgtcgtgggaacaatagaagtaaataaggaatgacggactacctataagtagggtaagtactgtcagaatctctattgttctatgatgaagtgtcttgttcacaggcatttcatgatgtgtcaatttaatcatgcttgcttttttttacaaaattggttatagaaatacatactgataatacctattaatggtgataattttcggctttatacctaaaaataagtactcgtgtattttatgatgtatatgattatcagtaataaaaccccaatttttaggtattgtgtactcttggtggcaagggtaactttgcaacaaatttgaaaacataaaataataactattaatcaataaaactaaagtattatgaaattgaaaaactttttagcgatgatggctattgcattgtgtgcagtagcatgtagtgacaatgatgataaaaaggaagataccgtgattccggctcaggaggttgctggtatttacaatggaacattatcactctcagtatcaggaaatgatcaaggaacgtcagacagtcaggtgaaaattactgcggaagaagggggaactgttcaagttcttctagttggcggtgctggtgaaggaatgatgtcattgccggatattgctatacctggaattaaagtgcatacctccgataatgtcacttatattttgccggaaagtgctgttgatgtaactgttggttctgtaaaatatacaggaagtttacaaggaacgattaaggatgaaaaggctgatctgatctttacactaaagccgggagccatgcctatggctattactgcgacttttgtaggcactaaatagcatgaaaagatatctctctattataaccatactgggaatgatgcttttgccattctcggcatgtgatggtattttggaaggaatatatgatagtcctgctgcttcggatagtaatgaattgggttttataagaacagacccttctacccattcgggtactatttatattgatgctactgattatagacgttggacttttatcgatttccatacacaaaaagtagattctgtaaatgtgacggattctgaacagaaagaaccggaggaatgggatattgctgttcatcgttatgatgttaaaaccaatgctggagcagtattggaaaccggtttcacaggtttttccgctttacggaatgcggatgcgatgcccgaaggagcctatgtggaggatgtttggactaccgctaagatagccattgatatgtcaggtatgatggatggtaatattgtttatatggaatcctattataatgaagaactatccaaatggttgaatgttgataaaagtaatatgccacctacctatactctttcaaacaaggtttatatggtaaagctgaaagatggaacttatgcggctgttcgtctcacaaattatatgaatgctagtggtgtaaaaggcttcatgactattgattatatttatccgtttgaattgtaaaccgacatacgatatgcatagactactcagaaacgtgtgcttgatactgtgttggctgatggcggtatcagtatcagcacaacgaattatttcgggaactgtatttgatgaaaataaagaacctctgacgggagcaacagtttccgtaaaagaaaaagtaactttgggaaccactacggatacacagggaaaatacatgttgaaattacccgataatagagaatatactctacaggtttcatacatggggtatatctcgcagactcataaagtgtctgtcagtaaaacaggtaaagttgattttatactgaaagaagatgctgtaaatatggaaactgtagttgtaacgggaacccgtactccgaaactcctgaaagatgttcccattgtaactcgtgtcattactgccgatgaaataaaaaaagtagatgctacccatattggagatttacttcaggcagaactgccgggaattgaattctcttattccatggaccagcaagtttctctcaatatgcaaggatttggtggaaatgctgtactttttctggttgatggtgagcgtctggcaggtgagactttggataatatagactacaaccgattgaatatgagcaatgtggagcgtattgaaattgtaaaaggtgcggcttcttcactctatggttcgaatgcggtaggaggagtggtaaacatcataagtaaagtgcctgcggagccttggactgtgaatctcaatggacgttacggggcttataatgagcagcgttatggaggaacaataggtttcaatgttggaaaattcaatagtgtgactaatgtacagcatacccaagtagatgaaaaagatttggcagatggaaaaacaaatgaggaaacggaggattgggcatttaaaaaggtgtatggtgataaaacttggaatttcaaagaacgtttggtctatactgctaatgaccatctgaaactgacggcacgtgccggatatttttttcgtgaacgtgagaagtcacagactagtaaagaccgttatcgcgacttcagtggtggggtgaaaggaaattatgtattggataaagataaggatctggaaatagcttattctttcgaccagtatgataagagcgactacttgccgcaagacgctaatgatgtacgtgattatagtaatgtacaacattcggttcatactttttataatcatacttttgtcggtaagcatattctcaccgtgggtggtgattatatgcgtgattatttaatgtcctatcagtttgccaataatggaagtaaacatcagtatacagtggacggctttgcacagtttgactggaacccgacgaaatatttcaatgtcatcacaggattacgttttgattattattcagattccgatattaatcatttctctcccaaattaggactgatgtataaaataggaaactgttcattgagaggttcctatgccggtggtttccgagctcctactttgaaagaaatgtatatgaattttgatatggcaagtatttttatgatttatggtaatcctgacttgaagcctgaaaccagccataatttttctctttcggcagaatatatgaaaggtcgttataatttgacggtgacaggtttctataatgtagttgataatcgtatcactacggcgtggagtgaggcgttgaaagggcaggtatataccaatatatcaaatatcgggatatccggtgccgaggcaaatgcttccgtcaaatatccttgtggactgtcggcacgtttatcttacgcctatacacacgagaatataaagaaagggcaacctgtcatttcaagtactcgcccgcatacggctactgtccgtcttgagtatgacaagcattggaagaactatgcgtttaatgttgctttgaacggacgctttctgtccaaggtgaatacggaggaatatacttcgaacacttcttatgaagaaactgagaaagtgacttatccggcgtatacaatgtggaagcttacgttgtctcagaaagtatggaaaggtgttgatatgactttggcggtagacaacctgtttaattatgtccctttccgttattataataattcgcctgctactaaaggaacaactttttcagccggtttgtcattggatatagaacaattgttcaaatgaaatttggctgctaatactaaataaactatgtgatttaaataaagatatgaagaagaaacaattattgattggcggagggatagcagtcatcttgctgcttttgtttggtgtatggaatctttggttcagtgcaactaaagtggctttcatcaactatcaggtaatcagtttagggcagatatctaaagctaatgacaattcatttattaaaatcagtgaactgagcacagatgatctgaaccgattggccggttatgatatggtatttatcaatgccatgggattaaggattactgaagagcaacgtgcgcaaatacaaaaggcagccgatggtggtctgccggtattgactactgccgctaccaatcctgcaaacaagattatttcattggattccatccaagcggatacattgaaacattatctgtctaatggaggacgtcgtaactatcgcagtatgctgaattatgtgcgtgtgcatattgataaaaaactattctctgtgtctgaaccggaagccgtaatgaaacgtgccgatgatgtgctttatcacatggatccaaagaaacccgaagacgaagagttgggtttcaatacggtagccggatacaatacttttctgcaacataacggcttgtggaaagagaatgctccgcgtattattgtgaccggtccgatgggtgaaccttccgggcttattgctaaattggaggaaactggcaatatggtttatcctatacgttccatgcgttcttttattcagaaccatggaattgattctgtccgtccgtctgctattatcaatatggcgcatggacgtatgggtgaacctattgtagattatctggcgaaacagaatataccgcttttctctccattgaatgtaaatcgcttggtagaggagtgggagagggacaagatggggatgaatggcggctttatgtcacaaagtattgttactcccgagatagatggagctatccgtccgttcgctctttttggacattataaggatgaggagggtttgcaacacgcttatgctattccagaacgcttggaaacttttgtagaaacagttaataactatattgctctgcagcgtaaacccaatagtgagaaacgcgttgctatttattattataaaggtcctggtcagaatgcactgactgcgggtggtatggaagtggttccttcactttataacttgttgcagcgtatgaaacgcgagggctacaaggtggacggtttgcctacctcttcgaaagaattggaacagatgatacaatctcaaggagccgtatttggttcgtatgccgaaggagcttttgatcggtttatggaaaccggcaagcccgaactcataacaaaagaacaatatgagggttggataaagaaatccattcgtcctgaaatgtatgccgaagtaatagctgccaatggtgaatttcccggagcatatatgactacttccgacggccgtttaggagtagctcgtttgcaatttggaaatgtggtgctcttgccacagaatgcggccggtagtggggataatgcatttaaagtagtacatggaaccaatgcagctcctccacatacttatattgcttcttatctgtggacacaattcggatttaaagctgatgcgttgattcatttcggtactcatggcagtttagagttcactccgcgcaaacaagttgctttgtgcagcaatgactggtccgaccgtctggtaggtgcattacctcatttttatatttattccatcggcaatgtaggtgaagggatgattgctaagcgtcgttcgtatgcgggattgcaatcttatcttactccaccttttatggaaagtagtgtccgcaccatttatcgtgaactgactgagactgtcaaaacatacaataatttacttccggccgatgggcaggctgtactgtctaccggaaataaagaggctttgaaccgtgcttcattggcggtaaagaaactcacggtgaaactgggcatccatcgtgaattggaattggatagtcttcttactgttccttatgccgaggaagatattcagcgtatagaaaattttgcagaggaactggcaaatgagaagattacaggtcagctgtatacgatggggattccttatgaacccattcgtattacttccagtgtgtatgctatggctaccgagccgatagcctatagtctgttggcattagataaactacgtaatcgtgcggacggacaggtagagaaacatcgcactctttttactcagcgttatttagaacctgcacgtgatttggtcactcgtctgttggctgatccatcgttggcttctgatgaattgatttgccgtattactggcattacttccgatgaacttgctaaagcacatgaaatcaataaatcccgtaatactcctcaaggcatgatggccatgatgatggcattagctgaagaagctccggctgaggctaaaacacatgctgatatgagcagtggaataatgcaggctgaccaaagcggatgttcgaaaaggaatagcatatccgggtctatgaaagagaaaatgaaggaaatagcgaaaggtatgaatcctgagaaagctatggaacttgcaaaaaaaatgggtgcaagccctgaagctttaaagaaaatggaaacaggaatgtacaagagccgtgctgtaggtatgaatacactggccaaagatacggttacaatgaaaacaacttctcgaggaaaacgtgaaaaagcggatagtgataaattcggaggcatggaagcgatgatgaaagctatgatgtccaagaaaaaagaatattctaaagaggagatgaattttgctttggctgtcgtggaagtagaacgtaccttgaagaatgtgggcaattataagagtgctcttttggaaagtccggaaagagaattgacctctatggtgaatgcgttgaacggaggatatacgcagccttcaccgggtggtgatcccatcgccaatcctaatacattacctacaggacgaaatcttttcgctatcaatgctgaagaaactccgtcggaatctgcatgggaaaaaggaaaacaattggctgataacactatcgaaatgtatcgccgtcgtcataatgactctgttcctcgtaaagtaagttatacattatggagtggagaatttatagaaaccggcggtgctactattgcacaggtgctttatatgctgggtgtagagcctgttcgtgatacgtttgggcgtgtgacggatcttcgtctgattccttctgctgaattaggccgtcctcgtattgatgtggtagtgcagactagcgggcagctgcgagacattgccgcttcacgtctgtttcttattaatcgtgccgtagagatggctgccaatgctagagaagatcaatttgaaaatcaagtagcagcaggtgttgtggaagctgaacgtgtattaatagaaaaaggtctgactccaaaagaggcccgtgaaatgtctactttccgtgtgttcggaggagtgaatggtaattatggtacgggtatacaaagtatggtgcaatctggtgaccgttgggaaagtgaaaaggaaatcgccgatgtttatttgaataatatgggtgctttttatggtagtgaaaagaattgggaaactgttcgccaatttgctttggaagctgctttgacacgtacggatgcggttattcagccacgtcaaagcaatacatggggtgcattaagtctggatcatgtgtatgagtttatgggaggtatgaatcttgctgtccgtaatgtgaccggtaaagatcctgatgcgtatctgagcgactatcgtaaccgtaacaatgcccgtatgcaagaggtgaaagaagctattggtatagagagccgtaccacaatattcaatcctgcttatattaaggaaaaaatgaaaggggaggccggcgcagctaatacttttgctgagattgtgcaaaatacgtatggttggaatgtcatgaaacctcaggctgttgataaggaaatgtggaatgagatatatgatgtgtatgtaaaggataaatttaacttgggagtgcaggattattttgaaaagcagaaccctgccgctttggaagaaatgactgcggtaatgatggaaactatccgtaaaggaatgtggcaggctagcgggcaacagatagcggatattgccaaactacataccgatttggtgaataaatataaaccgtcttgttctggttttgtttgtgataatgctaaattacgtcagttcatagcttctaaaacggatgcacagactgcatcccgatataaggaaaacatcagtcagatacgtgaagttgctgcttcaaaagagcaaaagggtatggtgatgaaaaaagaagagatgaatacagtcggtacggaacaacagacgaatacggtaagcaatactgttgtttgcgttgtagtggtggctgcagttcttgttttaattgtattggtgcgttgtcgccgtaaaaaaatgcaggaataacaggctatggaaacagttgtagttgttcttatgatattggtctgtttcaattttatgatgaaacagacattccgtaaacgaggatcggttgcagcaatagctgttgtagccaccctctttgtgggactgatgtggccatatgctattcagcagtctaagacacagattgctgattggctggcaaatgtccaattgatgcttgacacttcggtggtgcttacagtggaagttgccttacagatggctttttgtatgttggctgttcatgtgcttactacagggcctgttaagaaacgtactcttttggcttaccgtgctttacgttggtttccggggattttgatatttcctgtcttgtttagcggattagtatatcttatcttctcttttccgggtgtttccttttctcttgtcgcatggagtatggcggcaggtgtattgatattgatttctgcaggcacattgtttcttcgttatcttttgccggaaaaggaattacggttggagctattgttcctcactaatgcattgaccgccatattgggaattattgctactgtaaatggtcgtaccgccgtaacaggtgtaagcgaggtggattggggggcattgaccggcttgataattatgctggcaggtggaggactcattggattggttatatataaatatagacgaataaaaacaaacatttaaaacttactgacattatgaatcttatatcagacattctgttttggatttcgaacggacttttagtccctgttgttgtattgcttattattcttttcatccgttcgctattattgataggcagttttttcgggcagtatctggctattcggcgtacggatgcgttgttgcgtcaacagcttgatacattgactatagatactttgtccgaattggaaggcaaacttcctgtgaaatcgaactcgttggtcattgcgtatatccgtcgggtgttggagtcaaaagaccgtccggcacatgtgcagcgcctgttggctgattttgaaattactgctgataaggatttggctatttcaaaaacattgaccaagatgggaccgatgcttggattgatgggtacattgattccaatgggacctgctttggtgggactttctactggtgatatcgcttctatggcgtataatatgcaggtcgcttttgctacgactgtagttggtctgttttctagtgctatcggtttcataacccagcaggtgaagcaacgctggtatttacaggatatgaccaatctggaattcctttctgaattgctcactgaaaaacgtacagcttgagatgaaacgtaatttattaagaaaagaggaggatagtgacccgatgagcgtggtcagcaatctgtttgatgtggcgatggtgtttgctgtagcgttaatggtggccttggttacccgttataatatgactgaaatgtttagtcaggaagattttacgatggtgaagaatccgggtaaggaaaacatggaaatcataaccaaggaagggcagaagattaaccgttataccccttctgaggatcaggatgtcaaaagcggcaagaaaggaaaaaaggtgggtattgcctatgaattggataatggagaaatcatttatgtacccgaagaataaacttgtataaaggaaagggaggataaagttaaaactagaacttgccattttatatagccgaacagaatttatttgagaaatatagggcaaataaagtaacttgacttcgtgagccaagtaagttaagtgaaagtgtcaagtaagttaagttacttgcccaatgcacttaagttacttttgaagctatcggggattcatccatcctatttcccacaagttaattctgttcggcttttagtttgaagtacctttattacatacatatgtgtggtccgatatatatatgtatgtaataaaggtattttccctttttctagtatcggttgataactttttttgctttgtttacggcagtggtaggagaaatcttatccatgcttgattcatcaaacattttcaaggttttgtctatattcttaatagctcctttattgcctttttcttcaaattcttctttcagaatgcgtactttctcaaaaaattgtattccttctgtcaggcgttccaaccggatggatgaacgggcgcccggataaatcatatacgtgtctccggcagcccaagctgtgaaacggctgtcttgtaggggatttttcacccagctgtttaaagcccaacgaagatatccgtccagattttctttcgcactatgccatgccagccattcagcttcggcaggttcgctgaaagtgaaagtgttggggcggggctctgtgcagcaggtataataagtagttactttgcctgccttccggcgcgcttcaatctcttcgggagtaaatttctcggcaatggtgatacaataatcattcagatcatccaatagttctttgtgataagttcctgccaaagaaactttaaagtctttatcagccttacggatcactttcagtgtttcctgcatgtccttcatcgggcgttcgtccatcgcaatgtgagtgatatcaaaccagccttttgctttcagatgctttgagaaatcttgcagcatattcatccaaaattcttcataagcaacttcacccggtttggcgtccagaaatttaaaagagttgctggcctgatcaaaatattggaaagaaagacgccagggaaccatagaatagcaactgatttgttttttgacaccaagatccatcataaattccacccacttgtcgaatacggtatagtcaaaataccaggttccatccgcttttttcaaccaagtgaccatgctttcaaaagcgtcataggtctgtccgttccaaggcttgtgcataatggaggctgtgattaccttaccacctgcatcggcatacagtttcatcaatgggcgcatcaaatcgaaatgttttttgctgaacggttccacattgtagtaacgggatactgcataagggttctgccataaatccagatggaaagcccattcggaaggaggaggcagagtacggttcttcacttggaggttcagttttaattcagacaaggtggtaccgtcggctttcactgtgacggttcctgtgtatttcccggctttagtgccctgagggatgtttacgctgatccatcccccttgggtggagttggcgggaagggttagagtaggagtgatatggtctattacatctgctactaaagttgagtcaaaatcagcactgtttcgatagccacatgcgcccaaaccgtctttgttcagttcatcggttataacgtaacggacaaagcctgttcggatattctctttactgatggttgcactgcctgaggttaaatcgctgaccatgaaagtcaagtcatttagcgctttgggagtccatactaccagttgggctgaaattttctcacctttccatgcagtaagattcatacttttctgcgcactatggatgggagccggttcctctttcttatagcggatgtctgtgcttccccagctgatttgtggagctgtaactttcgcccataaagcggggttggtggcaataggattggctgcttcctgataatattcggaagtttgggcgttcatacatactgttgacaacaggagagcgcctagaaataggagttttttcataggttatataatagttagttgaagttacaaaggtaactcagggagagttaatttccaaataggaacggtggagtttgcataattgcataggaatatttatttttgacgagttataataataaggaagatagagatgaaaagaatggtaaatgtgctttttgctggtgtactggctatgactgtactgtcctgtggcgaagagaaaaaaggatatactctgaatggagaaatatcggatgttaaagatggaatggtgtatctgaaaaaatatcaggataaatcgttcatagctgtggattcggctgtgattactgacggtactttcaaatttgaaggtgtttgtactgagccattggcttatgggctgactacgttcagggatagcaaacgtccgttggtattctttttagataacgaaaagatgcagttgaagatgaatgaatcagaaaagatattgactgtgacaggttctgccattaatgatctgtatgcacaaaatgctcctttgactcgtcaggatggatatagcatagatagtctggttgctgttcatccggcatctgctgttaccccttatttcatagtgaaggacttcgcttataagttgaatttggaagaaatgaaggcattgcgtgccaagttggattcctcgctggatggaaccatgtacgtcaatcaaatagatgactttatcaagcggatggaaaatattcaggtgggagctgtggctccggatttcacattgcccgatgtagacggtaatcctgtcacattatccggtttgagaggaaaatatgtactgattgatttttgggcttcctggtgtcctgattgtcgcaaggaaaatccgaatattgttgctgcttggaataaatacaaggataagaattttactattttaggagtttctttggatcgtaagaaagaaccttggttggccgctattgagaaagatcaattggcatggactcatgtttcagacttgaaggactggaaatcggatgcagccgtgcagtatgctattcgttggattcctatgaatttcttgttggaccccaatggggtgatcttggctgtaggattggaaggggaggctttgcaacaaaagctggatgaggttttgaaataacaagtttgctgtaagattatgaaaataaatgtaccaaaagccaggggttactgttggttctccattggcttttgatacattttgttgtctttgttcacatcattgttctttctctttagtcattatcacgtccgaaggaacagaaaatcctatcagttctgtatattcatccggttcctttagggctaatcctaatttttcatccagatgccaacgaatcttatcgggagatagtagaagtatttcaccgcctgctattccttcgccgccgaagtgctttttccgttggtcgtaaaataaaactccgactcgattaggatcaatgtagtccaaactggtagcattgtttgaagcccaaaaatagaacttgatgtgttcgtccctt

SEQ ID NO: 3967 - DNA, 1226 bp, Unknown
  gut microbiota DNA sequence
ccgggacgacgcaacaagtcgctgaacatcttcggtatactgcgcagagtcattgaatacatccataaggaatggcctcacacaataatagaactccgcggggacagtcatttctgcagccatgagtttatggactgggtcaagacacatctttatgtgagatttatcacagggctgtcgggcaatcctgcgcttatgaagaaaatcgacaagcaattgcgccgtgccaagggggatttcgaacttcaccatgaggatgtacgccgttactacagctttgagtacaaagccaaatcatggaaatacagacagagggtgattgcaaaaatcgaagtctccgacaagggtgtaaacgtccgcttcatagtcacaagcaaccgtaacaacaagcccgagacagtatatcgacgttactgtaagcgcggcacaatggagctatggataaaagacctgaagtattttcgagccgacaggatgtcgtgcagttctttcagagccaatatgttccggctgtttctatatggcgcggcatatgtgaccgcataccgtctcaggtcgaaggctttctccaatacagaggtcggcgccttcacgatggacagcttcatgaagcggattatgctgagtgccgtcttcatagtcgaaaaaaagacttttataaggttcagcttttccccacaccatcgacaccttgaagctttgtcgcaagccttgacgagactctctgcctgacaagtggaataatctgaaatcaacctgagtccgattctgtaatcggacttataagtcatatccgctccataaaaatggacgtgataatcagacctgagcatgccgaaatcaaggcttcggacaggattataactctacatcaagcggtcattcgatgatagacattagttggaggcttcagattgtccccatatctgttttgataacctgaaatgaatccactatgaataatgtaggttaaaaaattacttatctcactgacaaatgtatagaataataatggaaaataatagaatatgacaaataaaaaaagcatccatttcgtaagaaaggatgcttttatcagatttagtcgattatttgttactttttgtagaacgccaaatcttctttgtcgaagttttcgatgaaatttgtatgcttttctacttccgcttctgcatagttcaaatatacgtgtgcagatttggagaacagttcagaagacttgctgg

SEQ ID NO: 3968 - DNA, 952 bp, Unknown
  gut microbiota DNA sequence
cggtctgggatctgtccatgcgggagacgataatatgcacatgcagctgcagtcccggcttcctttcaccggcttttgccttgccggctttcacctcgggatcatcgcctttatagtggcgttctgtttccacacgcccataccataccagatcgtcaccggacctgatcttctcccggtaaaaattacgggcatattcatccatgcactcacgggtgagccgtttcatttcagccaggacttctttctgctgctccggggagagctccgggaattcaccggtcttttccccggtcactttttcaatgaggtgctgctgctcctcaccgctgggattgatggtgagcatatagaacttgtcgtcgttccgtttcagtgtcctgtggttgttgtccatatgatgcatgacggtcagaggggtcacatagtcctctttctgtgaaaaaaaattatcataataaggacgttcctccttcagctccttgctgagatattccaccagctgcacgcattttcccttgttgtccgacacgcccggagtatttacaggccggtggactttacagtacatattcctcgttgatcttcttgatgagcagctgcagggtgctgacgggaaccttgacatcatcattgaatttcaccttcgggaacttgtccggattgagctggaattttatcagttctgccagcctgcggagcttctcccgttctttttccacatccgccggggagccctccccgtactccgccagctgttgctggagcttcctgttcctttcctgcagatcatgcatctcattcatcagccttgcatagtccggggattcatggaggccgcctcccatgccgaccagtttatcaagaatgggcttgaagatgtcacgttcctgggactttatgatcttaataagatcctcaattcttttctccaccaaggctgtcggatttt

SEQ ID NO: 3969 - DNA, 413 bp, Unknown
  gut microbiota DNA sequence
agaactaccacctgccggcccgtctgctcataggcacgctttatcaggtctgccaactggacgttaacctccgcatcattgtttttcgtcaggccatatttcccattatattcccgcaactgccagaccagatactcattcagtttctccttgtccagatgtttggccaggctcatatcaaagtgtagcaccggatattccgtccactcggtttccagcttttcgataacaagtcctttgaaaaggtctttcttcccggcaaaatagctgtgcagcgtggaggtaagcaacgacttgccgaaccgtcgggggcggctcaggaaacaatatttggagacaccgttcgccatccggtaaatatactccgtcttgtctatatagaggtaatccttcttgatgatttcctcaaaact

SEQ ID NO: 3970 - DNA, 2832 bp, Unknown
  gut microbiota DNA sequence
cttttcttttcagaagattgattatccctctaccgcagcctgcgccgcagccagtctggcaataggcacgcggaacggagaacaagacacatagttcaaaccaactttgtgacagaatttcactgatgaaggctcaccaccatgctcaccgcagataccgcatttcaaatcaggacgaactgaacggcctttatctacagccatttcaatcagctggcccacaccattttggtcgagtacttggaacgggtctacttttagaatcttcttttccagatataccggcaagaaagaagcaatatcgtcacgggaataaccgaaggtcatctgggtcaagtcattggtaccgaatgagaagtattctgcacggctggcaatgcggttggctgtcagcgcagcacgcggaatttcaatcatggtacctaccttgaacggaatttccataccttctttttcaaataatgctgctgctgcatcacggatcaccttttcctgagcttcgaattcatacaggataccggtcaagggaaccataatttcgggatgcggatcatatccttctttcttcagttcaattgcagcacctagaatcgcttgagtctgcatctctgtgatttcgggataggtgttacccaaacgacagccgcggtgacctaacatcggattgtgttcacacaggctttccacacgttttttgatttcctgtacggttacgcccattgccttagccatttcttcctgaccttttgcatcatggggaacgaactcatgcaaaggaggatcgagcagacgaacatttaccggacatccgtccatagccttgaagatacctttgaagtcggctttttggaaggggagcaatttagccaatgcttttctacgtccttctacatccggtgacaggatcatctcacgcatagcgacaatcttttcagcatcaaagaacatgtgttccgtacggcaaagaccgatacctgaagcaccaaaagcgcgggccacttccgcatcatgcggagtatcagcgttagtgcggacattcagcttggtgtatttgttgcaaagatccatcaatgcagcgaaatcgcctgaaacttcggctgctttggtttccactttacctttatatacttcaccggtagtaccgttcagagagatgaagtcaccttcttttaaagtaataccttcaatttctacggtacgtgtcttataatctacattgatagcaccagcacccgatacgcagcacttacccataccacgggccacaaccgcagcgtgagatgtcataccgccacgtgcagtcaggataccttcggcaacggccatacctgccaggtcttccggcgaagtttcgatacgtaccatgaccacctttttgccatcggcagcccatttagcagcatcatcggcgaagaacacaatctgaccggtagcggcacccggagaagcgggcaaaccacgagtcaaaactttcgcttctttcaacgctttcttgtcgaacacagggtgaagcagttcgtctaatttattaggttcgcaacgctccaatgcggttttttcatcaatcatgccctggcgcaacaagtccatggcgatttttaccatggcagctccggtacgtttaccgttacgggtctgcaagaaccataatttaccttcctgtacggtaaattccatatcctgcatgtcgcgatagtggttttccagtttggtctgcagggcatccagttctttgtagatttccggcatagcttcttccatagagggatatttggctacgcgttcttcttcagaaatacctgcacgttctgcccaacgctgagaaccgatttttgtgatttgttgcggggtacggataccggctacaacatcttcaccttgtgcgttgatcaaatattcgccattaaacaaatcctcaccgttacctgcgtcacgagagaagcaaacaccagtagccgaagtatcacccatgttaccgaataccatggcttgtacgcttacagcagtaccccattcggcaggaataccttccattttgcggtaaagaatggcgcgttcgttcatccagctgcggaatacagcacaaatggcaccccaaagttgttcgtatgcacaggtcggaaaatcttgtccggtttgttcttttacagcaactttaaagcgtttaaccagttctttaaggtcttccacttccaattcgttgtcaagcttcacacctttttcttcctttactttttcgataatttcctcgaaaggatcgatatcttccttgttcaccggtttcatacccaataccacgtcaccatacatttgtacgaaacgacggtaagaatcccatgcgaaacgggggcgtccggtcttgcggctcaagccttccaccacttcgtcatttaaacctaaattaaggatggtatccatcatacccggcatggaagcgcgggcacccgaacgtacagaaaccagtaacgggttctctacatctccaaacttggaattcatcagattttcgatgttggcgatagctttctcaacatccgctttcagcagttctactactttatctttacctaactcataatattcgctacaaacttctgtggtgattgtaaatcccggaggtacgggaacaccgattagattcatttcagccaggttagcgccttttccaccaagcagatttctcatgtctgcttttccttcagcttgtccattaccgaaggtgtaaactctttttttatccataataaatgtatttaaagttaactcgctcaaaaaatgtaatcgcaaaactatacatattttagttatctccaaaccttttactgaaaaaaa

SEQ ID NO: 3971 - DNA, 2768 bp, Unknown
  gut microbiota DNA sequence
ccaaattaacttattcagaaaagtggctagaaagaagaaagaacttccattattagagaagataaccataacagatgtagctgccgaaggaaaagctttggcgaaagtgaatgacctggtagtatttgtgccttatgtagtgcccggtgatgtggtggatttacaagtgaagcgtaagaaaaatcattatgcagaagctgtggctgtgaaattccatgagtattctcctgtgcgtgcagtacccttctgccagcattatggtatatgtggtggttgtaagtggcagtgtctgccatatacagaacaaataaagtataagcaaaagcaggtgacggataatctgacccgtatcggcaagatcgaattgccggaaatttcacctatcatggggtcggaaaaaacggagttttaccgcaataagttggaatttacgttttctaacaaacgttggctgacagaggaagaggtaaaggaagatgtgaagtacgatcagatgaacgccgtaggtttccacattcccggtgcatttgacaaggtactggctatagaaaagtgctggttacaggatgatatcagcaaccagatacgcaatgcgattcgtgactatgcatacgaacacaattattctttctttaatctgcgttctcaagaaggaatgcttcgcaacttgatgatccgtacttcgagtacgggtgagcttatggtgttgctgcaatgcaagattgtggaagagagcgaaatggatctgatgaagcaactgctggctttcgtggcagaacgttttccgcagattacttccttattatatgtagtcaataacaaatgcaatgataccattaacgatctggaggtaatggtgttcaaaggcaacgatcatattttcgaggaaatggaagggttgcgcttcaagataggagcaaaatcattttatcagactaattccggacaggcgtataatctttataaggtggcccgtaattttgccggattgaccggtaaagaattggtgtatgatctttatacagggactggaaccatagccaactttgtttcacgccaggcaaagaaagtgataggtatcgaatatgtgcctgaagcaatagaagatgctaaagtgaattcggcaatcaatggcattgacaataccttattttatgccggtgacatgaaggatatcctcactcaggagtttatcaaccagcatggtcgtcctgatgttattatcactgatcctccgcgtgccggaatgcacgatgatgtgattaatacaattctttttgctgaacctcagcggattgtgtatgttagctgtaatcctgccacccaagcacgtgatttgtctttgttggatgccaaatacaaggtgatggccgtgcaacccgtagatatgttccctcatacgcatcatgtggaaaatgtggtgttgctggaaaaaagaggataatccggatcgttcaattataaattgtttaaacagtaaatagaattatgtcaagaggtaagaatagtgattccggcaggccaaaggcgagaagtgttgcccgatatactatatataatgtgacggagcccgctgagctgatggattttctgatgcggaaaatggcgggaatcagtcgtagcaaggtaaaggcgttgcttgccaaccgcgtgattttggtagataatgtgattactacccaatataatttcgcattgaaaccaggtatgaaagtgcagatatccaaggtgaagaataaccgtgagtttaaacatccgatgctgaaactggtatacgaggatgcttatatcttggtggtggaaaagaaggagggactgctttctgtcagcacagaacatcagaaggagcgtactgcacaacatattttgaatgagtatgtaaaacgttcacatcgtttcaaccgcgtatttgtagtacatcgtctggaccgtgaaacttcggggttgatgatgtatgccaaagatgaaaaaaaccagaatactttacgtgataattggcatgatattgtgacggaccgccgttatgtgtctatcgtttctggtgatatggagaaagattacggtactgtagagtcttggttgaccgaccggaaattgtatgtcagctccagtcctgtagataatggggaaggtaagtttgcggtcactcattataaaacaataaagcgggccaatggatattcgttggtggagttggatttggaaacgggacgtaagaatcagattcgtgtgcatatgtcggatttaggtcatcctgttgttggtgaccggcgctatggcagtgagtgtgatcctttaggacgattggcgttacatgccttcaagttatgtttctatcatccggtaacaaaagagttgatggagtttgaaactccttatcctacggcatttaaaggattaatgcagaaaaaatagaaaatttcttctgttaaaattaaatataaggcttctttgcttttattttgggcagagattaagaataaaaagcaatatccatccacttaccaaactgtagacggatggatattgttgttttagagatttggcagtttcattattaaattgcctttcttaatgcaagaatggtcatgtagcccgatttcccaatgttgtattgatgaataaaaaggctgaaattcaagataaatttgattcagcctctttattattgtatcggtgaagtgatattgaataaaagagttttttcaatagatgtgatcatataaaatctctaaccctatcacagagtaggaagattgatttacttg

SEQ ID NO: 3972 - DNA, 11081 bp, Unknown
  gut microbiota DNA sequence
ttgacggttgattccgcaaaatttttggcgattgcttccgttaccgctgccggaaggtctttcacttcaataggggtgaagtcatttactgccatgactgtttcaacacctgaggtcaaattttcggcaaatgccactgttgttcctaatcccattaccaatgctactgcaacaaaagattttttcataatcttatatttttaatggttattgttttacgataatgataggacaatttttatgccaaaagaataactaatctgattatcagttggttaatattttactaattatatgtgaaatggaaaaaatcctcatatagtgtgggatgatgtggaaatgttccacattgatacccttcttccattaatcttttcgcacctttgcggaaaaatggataaaatcagataccgtcttgtatataaccgccagaacacacttaacaggcagggcacggctcttgtacaggttgaagcctatttgaaccaaaggaaaatctacctgaagaccaatgtttacctcaaaccggagtgctggagccgtgagggggcacaagtcattaaccaccaccaatctaacgaactcaacgcaatgctctatgaatacatcctgtatctgcaaggcatagaattggggtattggaagcgcggaatacctgccacactctcactgctgaaggatgctgtcaagaagaaaagtgccgtgaatatcagcttctccactttcgccaaatcagccattgacaattcggacaagaagcagtccaccaaggacaacctgcactctacactggcggtcttgaatgacttccgttccggattggacttcaaggatattacctatacattccttcgtgattttgagcaatacttaagggaaaagggcaatgcggacaatacgatagccaagcacatgaaacagctccgtatcttggtcaatgaggtaatcaaccagggatatatgcacgcggatgcttatccgttcagaaattagagatggttttaccgtttagatccaatataagttccttcccttttgccacctcaaccggtttctccagaataatgtcatcagacaatataaagctacctccgttctgggcggcttcatcaagagcacccgcaccaaagaatttcacgatacgggaaactgaaatttcctgcccgttgttatctataagagtcactttcagaacggccttttctccacttattcctttcttgttgattttgactgtcgttccggtacatttcccatccgtaaatacaggttccttaatttccacatccttattttcagcacggggcacaatctctatatctgtagtaccgtcctcgcttctcaattccgcaaccaaagccttataattttctgttgtcaaaccaataaattcaatatcaattgtattactaacggaagttaccgagaaaatatcgcaaccatccttgaacttgacagataatattttggtacgtggtacggtcagcttggtctttccgtcagccagagtgaatatgacattatcaggatcacttgtgtagtccactccgttttccgcaaataccgcatcacctctgtcgcctttctccccggtcgccttaatccctgtcgatttccagtttttgccgccatccgttgagatttcccattcatttgtcgtggcgttgatttgaacttggggggcaatggcatcgtcccctttggctccttgcgcctttatttttgtatcagtcatacctatccaccaattaccgttctcgccgatatgaggtgtgatgccgtcagatttactttatgatgtaagaaaaatcatactatcccttctcatttggagaatccatatatcccgatttacaagacgaacataacgctttttaaactaatgttatcagatatttattaaataattggtgcaaaattaactaaaaaatgatgctggcctgtaatataattttttacattccagaccgattcaatatatttatattcttctttggtaaatcgttttttattcttattttgcagagtcttttttattgacatatcgtgacaatggattttagtgttttggcagcgatggtgcaagcggataggatttttaagtgtgtattttataatcaatcagataaacaataggcagaatggaattaaatgactggttggctataactggggctttaagggattggaagctgtccgctgggattcatattctgtgtaaaccgcaaaacgcacggaaggagaatgcgtctgccgattcggtggagaatgagaacgagcggaagcaggttgactggttggaaaagcgtatagtccagtgtactgccaagagtgtagaaaggacagcactcgtaagtcggtcaacatcgtatatggctctatcatctctttgaatgaactgattgcaaccaatggcaactacgtgattaattttcggatttatggtacaagaaaaccgtctgacagcccgaccaggaaagttttgttactggctgacggtcacgtagaaggtgatttcagcaagaatagaaagaaggaaactacaaccaaagactgtacggaggtgaaagccgacaaggaaaccacttccgatatccatgaggaaaaacggtcagaatcataaaggataaaaaagaatccactttgcttaaacaaaaaggctttacctgtgtttgtgtaactgttttgtttgtcgttgtgctgatagtaaaacattggcgcaacagacaatcttcatcataagactttaaatttataaattggactgccccggctcgtgatgagtcggggtatttgtttaaatacaatttcccaattggattacacaatcaactgaagaaaatagaattttatgtatttttgccttgtattgtggggtagaagccaatctcataacaaaaattactccttgttttggggatctattgtaatacgcaataatgtgacaaaaaatatttttagaaataggcaaatccttttgaacaaattcgtcattgttttgttcttgaagaataaagtagattgtcaaaacgtaactaatctgaaccgttccggcttgtgataagtgggagcggttttatttcaacaatatttttgttaaaagatagcgcgtgaattatatgttcttttatttttgtacacagttgacatgaatttatgtatcatggtgaaaaagaaatcttattccgaagagaaattaaatgaaatgatcgtatggctcaataatcatgccaatgaacttcctaaggaaatgcagataaataaattcgctttcacaccaaatttgaaacttactgttgaaagttgcatcatgcaggctaaacaatgtttgggtaactataagatggctggagcttttagactgctccaacaaatcggagagaaccttgaaaacaataaatgatattcttctattatttagtaagtaaatcaagatgtttctttcatcgacaaaaatatgaaagtatgcaatgtgtgtgcaacttaaaaagccaatatgtataaatgattagtttttcagtgcttttttatttttcttcactttccaattcttttatctctttattgaggaatacggataggatggttcttaaaacaacaatacctcccaatagggccaattcattcaaagtgggctccaatactgttttcaaaatatccgaagctatcagaaattctaagccaagaagcagataagttccgaatgtagctcttaattttcgtatattggtaatggaataccctccggtaaaacgtcgtatttcattcttcaaaaaagagatgatacctatcaacgctccgtatgtgacaatcaaaaggcttgtcacacttataacagctgctaataaatccaagaaatgagtaagcatatttatttgtctttatgaatagaacaaataaataagcgatatgttcttacatcatgataactctatcttgacaattcctccataaggagtgagtgcgccaaacgcctcttcgggtttaatgatacctgcataaatctgtgcgttcagtaaaatgccgccatgagcaaagatcgcgacttgttcatacggtttttggcgaagttcgtctagaaaatcggcaacacgccggtattgatcttcaaaggactctccattggtcgcttttacatgcagataatctgcataccatctttccagattagcgtcggcaatttcatcgaaccgatgcatttcccaatctccgaaatttagttcctttaggcggtcgtcccgttctgcatccgggtagccgcaaaaggtagccaggcgtacacaacgggttaacgggctggtataaaccttatcaaaagataagccttgtaaatgggctgccgtttgagttgcctccatttcaaaagtcggctttaagggtacatccgtctgtccgtaacaaacgccttgcggaacatcaacagcagtatgacgcatgaagtatattaccatagatttgtatagattaagtttatagtcagataaaaagaaaactcacataataggaaagtcgctccgcaacaatcaccggtatatccttgcaggcgtctgcgcatgagtgacattaaaaggatgaacatcatagcaggagcgatggctgcccaccagtatcctttatccagtaataaaagcataggtagggctccggccataaaagcggataataaaacacctgggctcatacggtcatatatgacttttgctttcgattcttcttctttacgggcgtatggaagcgtgttgatgatttgtgcggcacaaaacttgctccaggcatctccgcttaatatggccgcacatgccaagggtacagaaagtgtggtgagtatattccacatcaatccataatagaataataatccgagcactccgtatgtgccgatatgtgaatccttcatgatggacagaatcttgtcacgtgatgtaccgcccccgaagccatcgcagaagtctgccaatccatcttcgtgtaaagcacctgttactaataaccgggcagccaacgccatgagcacagctatttgtacaggcagaaattctgctgtgatccatagagtgcctgccatgatacctcctgtcagccatccaacaaagggccagtagtccactactcgtttaaagtaaacaggtggtacgtcagctattttccaaaacggaaggcgtgtgaaaaaaatgagggaggcaagcagtttcatggttaaaaatatttagtgatggaggcatgggcgaaattgtccatctcattcatcatgtttacagaggaaacaacgatgggataagcgcatatcgctcctgttccttctcccaagcgcagacctaaatttaataaagggcgtactttcatggcgtccaatactagtttatgaccggtttcatctccctgatgtccgaatatggcatacgacaaaacttccggatgaagttttgaggcggccagtatgcagttggtcatgatgaagccgtctaccagaataatcattcttaattctgccgcccggagcatgccgcctattgccataaccatttcatatcctccgaaccaagcgatgatatcttttgcagaaccgtcaccggcataatggtcaaccgattgtttcaatacattgtatttatggcggatgccttctgaatccagtccgcttcccgcacctacacattgctctaatgaaatacctgtcagcaaatgcatccagacagaggaaggggaggtgttgccaatacccatttcgccaaaactgaccacattgcagccgtcagcatgaatcatatccgttatctttgctccacgttccaggcataattccatttcttccatactcattgcaggaccttttagaaaactgtgcgtgccacgtcctacgctacagttgataatgcctttctcgtaaggaagatcgtaatcgactcctgagtctactaatacaagcttaaaaccatgttggcggcataaaaaattaactccggcacctccatgtaaaaaattacttagttgttgccaagtgatttctttgggagacttgcttaccccttcttctactataccatgatcggctgcaaaaagtacgttgtgcggatggcttaatgtaggggagagggtttgttggattaatccgatttgcaatgcaaggtcttccagaacgcccaatgaacctttgggctttgtcaaattgttgattttgtctatcaatgcctcccgaagaccttcatcgggatactcaatatgaaagtttttcattgtttttattattttataggaacaggaattcccgataccatcaaatatacttggtctgcttttgaagctatatattgattcatccagccctgtaaatctgtaaagcggcgttggatggcgttttcggatactgctccggaacctatttcattggttacgaaaataaaagtggcatcttgccggataaaattatcaaactcctgtttgacagcctgcaatgcagcctctacatccgcatccaaatcaaagaaaaagttggtacaccataaggtgacacagtcaatcaatactacattatcctttacttgatggcggctcagttctttttcttcttctatattcgtccattccggtccgcgcctttcttgatgtttgataacgcgttggcggaattcttcatcccaaatacgggaagtagctatataaacgggagtgggtgataagcttaatgccaatttctccgcgtatgaactttttcccgaacgttggcctcctgtgattaagataatacgtctcattgtcttacttctcggtggcacgcagaatcaacgtagtcgcacctaatgtgatgatagcgccttcctcgatccgtatccggtccttgttccccaaaatctcgttcatcagaaatgttcctgtaatgctgtcattatcacgcagggtataaatgacttccccttgtttgttgcgtttcacattaatgatacaatgccttctgtccatgctcggatctgatgtttcgatgggaatgtccacttcagtgcctttgcttctgcgtcctatcaggttgtcaccttccatcaggggtaatacttgtttgtatccgaatacattttctactaccacgatacttccaaaatcctctttattggcttgttcgtccaatatttcttctttacgggttgctttcagtttggattttccgatacggatactgaattgttttttacaatggtcgcatacaaagaccaacgactggccttctgtatatttggtttcatcaaaagttatatagttgtcacatttgggacacaaaactcttttcataaaaaataatcttgtttatttggaactcaatatccatgcattcttgaatgcatcattttgtttcagttcatttaattttttataagcagcggctttatctgcaaagttgcacaaagacaggcgataacgtccgttaccttctatgattgttacatccttgtatcctttttgcttgtactcattaagtacttgctgtgcgtcattggctgtcggtaaactggatacgatgatataatacttattttttttactgctcgaaggtgttgctgtttctttcttctcaagggcaggtttacttacagtaacaggcttggcaactggctgttctgtgctgttcaattctgctgcaacagtattcttgggcactgcttcttgtgcttttcctaccttttctacttttacagttacaggtttcaacgtgttttgattatttttgatattcgtcttcttgggttgctgcggtctggaaggaacggttaccaaggtcgttgccaaagattgggaacgaatggcgtcaaacagaccatccgtacctaaagaagcataattacctttgtccacatatgtgttctctaccggaacagacaagaagaaaaataagactacagctatagccacagctactgcatttcctatccactgacgtttgaaacgtacagttctcttccttttttcttgtcggggaagtaattctctggttgctgcagatgttgttgaagtaagatattctaatctgttgatggaaaacgaactaagcccgtatagggtaggtgataatgcaccgtcctcattgggatggaactcgtatgtgctatgaatattataatgtaagacccctatgccatgcatttctgcacatccattttggtatagttgttctttcaatccggctacctcttcttctatcatgcgtgtggcatcaggaaaatcggtgtgatgggcttgcatatacgattgaactaataaaccatcgtttatagtcaattggggattgaaaccaatagtacgtacagggggaagataaagattttcttccttgatataccgtgccggttgatagtgcgctataaaaccgccaaagtctggaataatcacacagtcattttccagtaacagaatttctatatgtctagccaattcaatcatatcgcaaaattagcatttttattccgtttcagcgcaacttttatggaagaaaataacaactcactcataatttattgtaattttgcagcgaaaaagttagactaacgaattaaataaaatgaatatagcgattgtaggaaccgggtatgtaggacttgttaccggaacatgttttgccgaaactggcgtagacgtaacttgtgtagatgtaaatgcggataagattgctaatctgcaacagggtattattcctatttatgaaccgggattggaagatatggtcttgcgtaatgtaaaggctggacgtcttcatttcaccacctctttagagagttgtctggacaatgtggatattgtgttcagtgctgtgggcactcctcccgatgaagacggaagtgccgatttgcgttatgtgcttgaagttgccaagacgattggtgctaatatgaagaaatacaccttggtcgtgaccaagagtacggtgcccgtgggtacggcccggaaagtaaaagcggctatccgggaggaattggagaaaagaggggagtcgatagatttcgatgtggcttctaatccggaattcttgaaagaaggtaatgctatcgatgactttatgagtccggaccgtgtggtagtgggcgtagagtcggaaagggctaaaaaactgatgaccaagctttataaacctttcatgctggttaacttccgcgttatcttcatggatattccttctgccgagatgaccaagtatgcggcaaactccatgttggccacccgtatcagctttatgaacgatattgccaacttgtgcgaactggtgggagctgatgtaaatatggtacgtgacggaataggttccgacagtcgtatcgggcgtaagttcttgtatccgggatgcggttatggtggatcttgtttcccgaaagatgtgaaggcgttgattaagactgccgagcagaatggttattccatgcaggtgttgaaagcggtggaagatgtgaacgagaatcagaaaggcattttgttcgagaaactggtaaaagtattcaatggagatttgaaaggcaaaacagtggctttgtggggacttgcattcaagcccggtacggacgatatgcgtgaggctccggctttggtacttattgagaaattgaaacagtcgggttgcaatgtccgcgcatacgatcctgctgctatggatgagtcccgccgccggataggagagtcggtttattatgcgcacgatatgtatgatgcggctcttgatgcggatgcgttgattctggtaaccgagtggaaagagttccgtcttcctacctggggagtaatcaagaaggcgatgaagcagcctgtagtgcttgacggacgaaatatttatgatggtgacgaactacaggaaatggggtttgtttatcattgcatcggtcgataaataaaaaaatagagagaataaccatgtacaaacgtttttcgataataatgttggctgttgcgctgtcttcttgtggaactccgcaacaaaaagcatccgctctggaagaaaacaaggaggcaaaatctttgttggaaggtatatggttggacgataatacggaaacggcattactgagggtgaaaggcgataccctgttttatgcagatgccgctacggctcccgttgcttttaaaattataggcgattcgttgattacgtatggtgcacggactaatggttataagattgagaagcagggggagcatattttttggtttcattcggctgtgggagatgtgatacgcctgcataagtctgatgcggagaatgattttctggcatttatccatactcgggaaatccctgtttataacgaagttattaagaaagattcggtggtgacatacgataatgtccgttatcgcggatatgtgtacattaacccgtcaaagattaaagtaatgcgtccgggagtttcggaggaaggacttggggtggataatgtatattatgacaatatcatacacatttgcgtgtatgaaggcaggaagagtctttatgccaaagatatcaccaagcagatgttcaagggggtggttccggatgatttcttgcaatgggctatattgtcggatatggattttatgggtgtcgattcgaaagggtatcattatcaggccacggtgtgcatacctgacggcgcgtcttgttatatggtcaatatcactgccggcaaggatggaggacttgcattcgagttggtaaggtagtcgtggctatgtcatttttttatttcgcgattactatttggtcgctatcatgctctatagagaataccctgaaaaatccttcaaaagcttcagcctgctcgcaaatgccctgcccatcggtattccggctgaaggattgggcttgggaattcttcagccggagattggaatccttcagccggattggtattcttccgattcttggggaattggttttcctgaaggatatttttcggctgaaacatttcacaatgcatatccttcagccggaatgccgatgggcagggcgtttgtggagtggctgaaagatctgaaggaaaaataaggcgtttcggcatgtagatgccgttatggaaaaaacaacaggtcaaattttaaaaagggacattcattaaatattacaaaatcag

SEQ ID NO: 3973 - DNA, 4420 bp, Unknown
  gut microbiota DNA sequence
gacgctctctatataagagtgcgtctgtttttagtcggattattccactatgagtattgtaaataacaagggcaaagacatgccacaacaaattttgggaacgacggttcaaaagaccgacgacgccgtaggcatattccgaaatgatcaggaaaaaaagcattggtatgtggctgttgtaaataacagaagtgaaaaagcctgtcaggatagattacgaaaacgtttgaaaaacgaaactgatagtgagaaagcttatgaagtttatgtccctatccaacaggagatgagtattcgtcatgatggtaaacgtaaaaaagtggaccgtattgttttccctgctcttgtgttcattcgctgcacagattcagtaagacggaaagaaatagtctgccttccttatataaaacgtttcatggttaacatagccggttcttcccgaaatacttgccgtcccgtagctattattccagatcatcagatgtacagcttgatgcgtatggtcaatgatgccgaagaacacgtcactattgagtcatgccctctgcatttgggcgatcgtgtccgtgtaaacggtggcaaactagtagggttggaagggaatatatgtcgtgaaatagatggttctactagtctggttgtaaaaattgatatccttggatgtgctaaagttaccattgctagagaattgctggaacctatagcggaaaaaaactcagttaacatataattatatattgacatacaatgaccatagcagtagactttgacggtactattgttgagcacaagtatccggcaatcggcagggagttgccgtttgccattgagacattgaaaaaattgcgtgacgaacatcacaggttgattctatggacagtgcgtgaagggcgtctgcttgacgaagctcttgccttttgccgtgatcgcggtcttgaattttatgccgtgaaccgcgactatccggaggaggagaaagggcgtaacaatcattactcacgcaagctcaaagccgatctttttatagatgaccgcaacttgggaggccttcccgattggggtactatttatggaatgattcatgacggaaccactttttcggatttgatacgtaatgccggtgaatctcctgtttcggagaatcacggcagaggtcttttttcgcgcctgtttggcagatgattgaataataaatgaaaaaactgatatgaagactttaaagaaactattattgtttgttgtggcatccgccttgttggcaggctgcacctcctataaaaatgtaccttacatgcagaatcccgaggtagtgaacagttacagggaagatcttcccctttatgatgcaaagattatgccgaaagatttgctgagtataactgtgaacacgagtgatcctcaggctgccgctccttttaacctgacggtacagactcctctgaatgcagccctgaccaatattaacactaccacacaacccactctccagcaatacctggtaaataacaagggtgagatagatttccccgttatcggtcgtctgaaggtaggcggccttacgaaaaacgaggcggaagatttgatccgtgagcaattgcagccctatctgaaagagagtcctatcgttacagtccgtatggcaaattacaaaatttcggtattgggagaggtgaaccgtccgggtacttttacagtaggaaatgaaaaggtaaatatccttgaagcccttgccatggcgggagatatgactgtttatggcgtccgtgacaatgtgaaactgattcgtgaagatgcaaaaggcaagcgtgagattatcaatttgaatcttaataatgcagagctggttgtatctccctattactacctgcgtcagaacgatatcatctatgtaacgcccaataagacaaaagccaagaactcggacattggcagcagcaccagcatatggatcagtgctacatccattttggtatctcttgcaagccttctggcaaccatcctgaaataaaactcataaatataattgttgattacaaactgttgatatgactgacgaacagaagaacaccccttcgggtaccgagcaacgtgaggagaacgttgatctttatgccttgttttttaaatactttgcctattggccgtggtttgtagccagtgtgctggtttgtattatatctgctttcatctatctccgttatcaagctcctgtctataatgttgatgcggccgtactcatcaaagaaggtgacaagaaaggtggaagcagtaataatcctatgggagcccttcaggatctgggtatgttctccatgactaacaattttgacaatgaggtggaaatcctgaagtcaagaaccttgattaaaaaggtggtgaatcatttgaatttgtatatttcagtggccgaggaacgtatgttcggctataacactcctttatataagtccactccggtaaaagtttatatgactcctgaagaggcagacaatctggaagaaggagccaagcttcatctaaaatacaccatgaatggaaaattggatgtaaaagtggaatatatgtttgacgaggagaagcaggagactgaggtaagttttgacagtattccggctgttttccccactccagtaggagttttcagttttacaaagaacgactcggtcccacctttggaagaagatatgaatctggtggcatacgttaattctcctacagatgtgacggaaagttatgtagagaatttgtcagtggaacccacttcgaagactaccacaattgctgccatcagcttgcagaatacggtaaagcagcgcggtatcgattttatcaattgtttggttgacttttataatctggacgcgaatgacgagaagaatgaagtggctcaaaaatccgcagagtttatagacgagcgtattggcattatcaatcgggagttaggtactgccgaaacggaacttgccgatttcaagcaacgctccggattgaccgatttgaccagcgatgcccgtctggctttggaagagagttcgaaatatgaacagcaactgaccgagaatgccacccagttgagactggtggagtccttgcgtaactatgtgaacaatccgaagaatgcaaacgaggtgattcccgctaatgtagggttgcaggaccagaatttgggttctattatcaaccaatataacacgatgctgatcgaacgcaagcgtttgctccgtacctcttccgaaaacaatcctgcggtaatcaatatcaatacgggcatcgagtccatgcggcacaatgtgcagactaccgtgaacagtgtactgagagggttgcagatagcgcagtccaaccttgaacgtcaggcacggaagtttgaaggcaggatcagcagtgcgccgcagcaggagaaagaatttcttactatctcccgccagcaggaaatcaaggcgaccctttacattatgttgcttcagaagcgtgaggaaaacgcaataaccctggcatccactgctaataacggacgtatcatcaaagctgctcttcctagtaaaaagccggtttctcctaagaagatgcttgttatgctgactgctcttgtattgggtatgggtattcctgtaggtcttatttatttgaaggatttattaaaatataagatagagaatgccgaggatgtggagaagataacggatgttcctattttgggtgagcttcctttaagtaagaagcccgaaaaaggtgccattgtggttcaggagaatcagaatggtatgatggaggaggcttttcgtggtctgcgtaccaatatgttgttcatgcttggtgccagtcagaaagtggtgctttttacatccacacagccgggtgaaggtaagtcttttattgctggaaatacggcagtcagtctggcctatatgggtaagaaagttgttattgtgggtttggatatccgcaagccggggctgaataaggtctttaatctgtcccatcgcacggaaggtattaccaattatctggctgaccccgagcataccaatctttttgatatgatacaacattcggatgtaagtcctaatcttgatattcttccgggtggtcctattcctcccaatcctacagagttgatggcgcgtacggtactggaagatgcaatagagaaattgaaagagcgttacgattacattattcttgatacggctcctattgctattgtgaccgatactgctattgccagtcgtgtggctgatatgtgcgtgtatgtgtgtcgtgcagatgtaactccgaagttggggtatcagtatattaatgtgctgcggaatcagaagaaattcgataaattggctacggttattaatagcattgatttaagctctagaaaagcaggctacggttatggttatggacataaatacggctatggatatgg

SEQ ID NO: 3974 - DNA, 2588 bp, Unknown
  gut microbiota DNA sequence
atagcagtcatagccgtattcggtataattgggccataccttgaaaggatagtcgtccggattcgggttgagtataatctggtccgtcttgccataccggctccagtactccacatcgatgtccacctgctccatgttgaccggggagttgtagtttcccgtcattttcagtgtataggtgtatttcattcccgcctcccattcatggtccctgtggaactcatagggatattcctttccgtcaatggtaaaacagactgtcgctttctggtcataaccgtagacagggggaagaattgtctccactaccaccggatctgcatcgttcagatgatagttgccgccagcttgcaggctccccctgcttgagaaatcgaatatcaggggggagttggtttcccgcctgatgtcaagcgtcatccttgtgatcacattgtcaaaccttatatttgaaacaatgccttctcccatatattcatttttcagaattttgatgcgcaccaggctcatggcatgtttcatctcaatatccgctgtcggaatgtccctggtgaccgttgtccttccatacaggatgtcgtgctggtccgccagttcaaaagggatgagcctgtcccctgatgcctgtccgttgtacggcagataagcggccacctccgaatcaccctctaccggagcgtccccgccggcattccattttttaccgtcaaaggcataaggcacattatatacatatggagagccggtgtcagtagtacagataaacacccccatctcatgtcccggcaggaatgcctctatgattccttttgtctgcatcgcctgcaacgatgcggttattccgagccgtatcttttcttcctcctcctttcccggatcatcccccggggtgacaaccggcggttcaggttccggcaggatctcatccttttcacatgcggataatgcacatgtgagtgaggccaacaatatataccttaaaattttcattgtattacttctttcagtttataagtatcttactttgaaatattatttacttcaaaagtaatataaaactttacttctttacgtattctttccagaactgctccaacctgtcgcggtccaatgtcccgtcctccctgagaaagcagcctatcatcgcttctatgacagtctttacccctctgtaacggtggtccgcggcaaatgtcctcagttcccataccagatcctcggtcaggacaatggtctggttatacgcctttcccggtgtcctcgccatttttttttctttcatggggtctgctcccaccatattttccaaggaaatccctttcgacttgaattctttcatattccttctcctttattattgttcattttcctgatccttttaaggaattcctcagtcagactccggtaatcccttgccccgtttgacgagggtgcataatcgaaaatgctccgtgcattgtactgcgcctctcccagcgccacgttgttccgtatggttgtctcgaacacgctctcccccaatgtttctatcagactctccctgatgtccacgtccagctttcttcccgcattgtattttgtcatgaagtaaccgagaatcctgacctccgcgccgagtttccttctgagcaggccgatgatataatgtatcttctcgattcctttcatggcgaaatagttcccgtccgtgggtatgatcacaaaatcactcgccataagcgcgttctgtgtgatgatgcccaatgagggaggacagtctatcagaatatggtcatatttcttttccaggcctcttattatttccctgaaaagaaattccctcccgggggtggtattcatgatcacttccgtggccgccaggtccaaggacgccggcagcacatccaccctgtccaaccacgtgagaggcttcagctccaggggtctgtcctgcatgatttcctgcagcacactctcgagcatgacatcctggggaagacttgccatttcctccccgaacgccgccatcgtcgtgttcgcctgcgggtccgcatctatgatacataccttctttccgtgcagccgtgcgattccggccgccagattcagcagcgaagtggtctttgccacaccgcccttgtggtttacacatgctgtcgtaattgttttcatgatttgtctatctccttgattattacgatgtaaagatacgcatttttgaaatgtttaccaaatatttttctacatatttactttattagtattatactttaaatatatttcacattacatacttaaatatgaaaatatacataatcatgtatattacttatttactttaatatataaataagtatactttccatagaaacaaacgtgtttttctgaaaataaaagtcatgctgcaacgaaattgcagccttgtagtatatcttgcagccttaaagacgcaaagcctgtcacatatacgcataataaaaaaagatctgcggggatttttatatgggaagtaaagtaaaaaagcccccggcctgttaaaaagtaacgccaatcacttattaactacacgagcgaagccacgcgaccgggggcaaataccctctgtcgtg

SEQ ID NO: 3975 - DNA, 588 bp, Unknown
  gut microbiota DNA sequence
atttccttccgcttccacaaagttgcgcctgacgtgtgcccagcagcacagatgcaactttccgggtagcgtgtcgaacttgtcatatactgcaaagccgtcactctgtaccacccggacctgtcctgccagcagtgtgtctattccgctgctgccacggcccttgtgatattcaaagaagggggtatggaaccggggcagatagaagttccacatatacccgcggtgaagagcaccgggccggtcgctttcaagtacgggatggggtgtctcatcggccatgacgtaatagctgtccttgaccagttcacgaagttcattatagattggttccagacgctgtgcggcagccatcatccagttacttacggtggaaggactcagatggattccttcacgctcaaagatatccagctgtctgtgcagaggcaggtggtcgtaatatttggcggtagcaatgtgggccagtacactttccgaggcattgctgtggggatgtgccattacgggcatgggagcggttatgatacgaccgtcggcgagccggtatttaggacggatgatgcgtttcacatagaatcgggcggg

SEQ ID NO: 3976 - DNA, 2446 bp, Unknown
  gut microbiota DNA sequence
gaccgagttcttggagaagttgttgctgatggcaaaaagtttcggattttccggatcgatcaggttgaaatcgaaatcgtcccctgaaaggacataggcgatctcctcgttctgtgaaacggtggccagattgttacacagcgtggagagataggatgcctgggtcttctcggaaccttccgccttcagataggcgccggccagcatttccgacacgaggttctgctgcaggaacagggagagctgccttgccgaggcggtcatgatgaaggccagtatatgcggcagcgtgcaatgctcggggaactcgtcccagaaccggaacgccacgccgcggaggatgcccagacctccggcgacccattcgttctgctgttccttcttgggaagcagcgcgagcagcacgtcctccatcagctggatcagttccgtgcggtccctcaccaccttgagcgggttgaaccggtacgaccgttcaggcctgtcgaaactgacatagtagaacttgtgcggatacctgtgccttttaatgaggttgtaggcggtacgggtatagtccgtatccttgaagtcatagatgaatccggcgaatcccagccgcatgtattcgctcagaagccattttccgatacttttcgtctttccggaaccggcccctccgtaaaccaggaagttggagtaatggtaatagaattcgagccgggactcccggattcctgacctgaccggcagccggatgggatcagccccgttcccctttgccggggttctggacaggtcccatatccgggaaaggaagaggattatgaacgaggcggccgccggacacagcatgtatccggggaagaacaggtgggccagaaaggtctcgcccgagaggcatgcaagaaatgcgaccaggttgacataccatctccggctcagcatgcagcaggccgttatcagtgacagcactgccagaagcgacagcttgcaatagaaaatgtaatgttccattgtacttttttagtttttacagctatttactttattaatatcatactttataagtaatccggtccaattactgcatttccgcctggaaggagtgtcccttttccccggccggaaacagacacctgaccgtatatccggaagggacccgtaccatgaccagggggctttcacatcccggcagcacggtaggccgtcccctcaacagggagatccatctggccggggatatcctttccggcctcgcgccggctccacggatagtctccagcatcatggtcatgtcatgggggacaccgttcacatacagggtggccccttctccggaaatccggatttcccgccttccccatgaaaggcttatagtgtttttttcaccgcactcgtccatatcttatttttccgtatcctgttttacatttccattcccgactctcttgcactccccggtgacacaccggatatcctcatcccgtatccggccggttcccttacggccatgagcttcctgccgtcgggaaggatgatgccgccgttaaagacggctttccagtcctcctgcccgagagaggcggggctgatccccgcttttctcatccgttccagaagggaggtcgcatccgtttcgaccccttgccgcctgagaaccgcccgcccgtatccgcaggagagttcaaggtctcctcttgccgtctgtattacggccggttccgcaattccggtgagatttttccggctggcggcgagtatgcccctcagttcccttgtgccgatttccaggcagaagcccagctttcggaggagattccggaaggcggtgacaatcctgtcccataaggattggtccgtaccggcctcggccatccgggccagatactcttccgttgcgacacgtatgtccgtcttgtctgcagccgccatccggagaatctcatcccgtactttttctccgcatccgttgaagatgtcatccagaaaagcatccatatgcttgggacctgcaagctttctgaggccgtaatgtgccacaccctcatgcagcagggtacgctcgacgtccgctttcccccgggcatgtggaagatacaggcagatacgttgcgaggggatgtcataccagccccggatgtctttcccgcaggagagcaggtcgcgtatgtcgggagagcctgcctcgtcggcatgacggatcacttccaccggaatatgcagtttcccggccagaaaagacacatgacgtgcgagctcgtccatccggacgtcccttgaaaggaatatctgcccgtcccgggcgatatcctcggtggaaacggcaagcgtgttccgtctttgggcggaagtaaaatccagcctgctttccacattgcgcgcttccacctccccggcagtggaacggtattcctgtatgccgcttttaaaccggccgatgtcattcaccaggtcaaagatgttc

SEQ ID NO: 3977 - DNA, 189 bp, Unknown
  gut microbiota DNA sequence
ctgaagctgtagaccagttaagaatacgctatcggtggaaagtacttgatgcggaaaatcaggctatcagggagcaccgtcaaaagaagaaagaaataaagagtaaggcggaaagggagagaatagggaaatgggagcctgaaagaatggagaacggagaaaccctgccacagatagtaagcagaagca

SEQ ID NO: 3978 - DNA, 892 bp, Unknown
  gut microbiota DNA sequence
ctgacagcatactgttcgctcacttcctctcccagcttcgtcgctccctccaacgaaaggccttccggcatgggaatgataatctcctcacggggaagggacgggtcgatgggcttacgggcgtggggagtgatctttttcgtgaagcttttacggaaacgattgtagccattctccgatgtgacggatttcccagcggttttctgttcttccgctaccgggtcattgacatcggacggagactcgaaacagatgctcagctggccggcatcttcgggaagatgacgtttttcactggatttaccccataaacggcgtgtcaagtcagccaatttccatctcagatcggcaatgacggctgtacaggccgagatttcttcgacctggcgggaatactcctgcaaagaggcttcgtattttctctgaagttccgcatgctccttttcaaggcattcatgttccttgcgcaactcttcgtactcttccaaagtaagggtaataaccggttctttcactgtacatccactttttattatgtggcaaagttatcaaaataaaactgcacggcttatagaatggggaattacttttcaactgttttccgatactttttaacagtaagcagctcattcaggcgattccaggaaatttgaagaaaatccttcttccgttcctcctttttcaagaggaaagaaccgcgattcagacgacggcattccagacggtattcgtcgtcgcaccgataaaggatatgcaacctgctacgggagcggtcgggaaaaatatgacagctctgctctgacacgcaggaacccgtgtgtcggatgacctcgccacaaagaccgtcaatacctttatggaaattacaaccttggggataaaggtaataaga

SEQ ID NO: 3979 - DNA, 13342 bp, Unknown
  gut microbiota DNA sequence
aaaagtaattccccattctataagccgtgcagttttatttcgctaattctggaagatttttataaccactttattagcaagcagttctgaggataaggtaaaaatgaggtaatgatttggcaaccctgtctatttctacgttctgctgtgagttgctgtcaatgtctctcgtcttggtacaaaagtagcaataaaaatcggatacacatcaaaatgtcccatgatttttatcacaggacgttttttatcctcgctgaataatccggtttaaccgttacttctattttcggcaagttgcgggctatgattgctgaaatttatactttaatccatactcttccaacttgctatacagcgttgtacgtccgattccgagcaattcggcggcaaccttgcggtttccgtttgcctgcttcaacgcgcgtaagatgcgttccttgtcctccgcatcgtttcgcaaggcgaagctgacaggtgaggtcggtttcgttacggcaagttccagatgctctttcatgacaactcccgtctgtgcctgcaacaccgcgcccattatcttctgccgaagctcacggacattacccggccacggatgggtcagcaatgtcttacgggcttccgcatcgaacccagtcacgctacattccaattcattgttggcaatctcacggaagaactccgccaacggcatgatgtcctcctgacagtcacgcaagggcggaacagttatctcgaagtcgtgcaaacggtacagcaaatcctgtcggaaacgtttttcaatgaccgctttctccagatcctcgttggtggcggcgatgatgcggacattgaagctcttgtccgtcttgtcacctatagggcggtatctccgttcctgtatggcacggagtaacatctgctgggtttccaatgcgagattgcctacctcatccaagaacaatgtgccaccctctgcctcattgaagtatcctttctttgtgctgtccgcacccgtaaacgcgcctttgacatgtccgaagaatgccgagggcgcaaggtctttggagagtgaaccgcagtccacaggcacaaacggtttccctgcccttttgctcttatcatgcagatggtgggcgatatgctccttgcccgtgccgttctctccgaatatcagcacgctcatatcagtaggggcaactaatcttatctgttgcatgattttctgaaaggcggaactgtcacgggcaaaaacgggcatacgatttcgtccgatactccgttctttcaggatggtatgaagcagaggcataagtttatcctccacaagctgcttggggatatagtccagcgagccgagtttcatactttcgactgccgtatgcacttcggcatagttggtcatgatgattaacggttgtgtcatgccttccttgcgcatccatcgtaataggtcgatgccgtcaccgtcgggtagtcgtaggtcagaaaccacgatgtccccgtctgaggcttgttgcagaagtttcttcgcggtcgagaggtggtaagcctgcacggtacggaatccttcccgtgccagcaggttgcagacaaactcgcaatacacgatattgtcctccaccacgatgattcttgttttatccattttcgtatttttcctttcttcttttgcctgccggataatttcagcacctttatccagcacagccggtcaccgctttgcatatcgcttcgtcatctggagtggcacttccatgaagttgggcgtaaagttccctcaatggctggtcggcacggagaatctgccatgaacttcgcagatggtgtgtaagtgtgtccagttcttggaggtctttacgctgttctgcatccttgaccgcctgcatttccttttcggtttccgctatcagtttgtccagcatgacggattcattgccataagatagcagagtggaaaaatccggcttttcatccaatatgctgcttaatgcgcatttatccgtaatctccatcagttcggatatggagaacggcttgaacaggcatccggcaaatccacgccctataagttcctccttgctgcaactgcccgaagcggttgtcacgactatgggaatactcttcgagttgcctacattggatgagcgcaacagttccagcagttcaaaaccgcttatctcaggcatattcagatccgtcagaagcaggctgtattccttttttcgtatcagctccatcagtaccgaaacattggtacaggtatcgcagtgcatcccttcatgggcatacatttctttcaacataaggagaagtacctcgtcattgtcgatggcaatcacatcatggcagatatgattatggcgcatttgcgcttgaattgtctgttccggcagttcctcggctgtctgcatgggaatttccaccgtgaagcggctccctttgcctttctcgctttccaagcgtatagttccaccgagcatcgccacaatacgctgcacgatggacaatcctaatccgaagccgtcttttgcggcggcatttgaaagacgttcaaatgcaccgaatactcgttgttgctcatcttcggtcatgcccgtaccggtatcttcaacgataagtttcagcaaaccgttatcataatccgctgccaatgatacactaccgttatccgtgaacttgatggcgtttgacaacaagttgttgccgatttgcaggatacgttccttgtcggtcaaaaccaccgcatcggtgtggctctccactatcaaagtcagccccttgttcatggcaatgggcatgaactccgtttcaagaatatgcgtgattgcggaaatcctgcaaggggaaaggttgggttgctccttgccgttgtccagacggaagaaatccagcagcgtgttgagcatctcccgcatacgctcggaagattgccggatattatccacatacatggtgcttttatccgcgctacaacttttctgcatcagtccggcatagcctcattttgtcaatcgtattttttcgtggtagaagtagtttacgatgacaggtttgcctttttccgagcgtccgtatggcagatcgtttatacgatacgggaagccctgctccttggcgtaatttgaaatgtcctgctccaatgcctgccagtattcaagcctttttttattgtaaatttcctcgtaaagcggtatgaggtcaggatacttctcacggatatacgtcattatcccgcctttgaactgcccgcgtaaattcaggttttcaagccagattaaatcagcataatcttttacctcctctattattgcctttacgtctgttattctggggaatatgggcgagacgaagcatacggtgcggatacctgcctcgtatgtctgacgcatcgctttcagacggcgttcaatgcttacggcgttgtccatatctgcgcagaactgctcgtcgagcgtattgacagaccatgacacagtcactttgggaaaactcttcaacaggtcgagatcgcgaaggacaagatcggactttgtgcatatcataatctcggcatcgcttcctcgcagctcttcgagcagccttcgggtacggtggaattcttcctcatacggattgtaaccgtccgtcacagaccctattacaacacgttcaccgtcgtatttatgaggattcgttatcggcttccagttttttacatctaaaaacgtaccccacggctcggtgtgcccggtgaaccgtttcatgaacgatgcgtagcaatacctgcaggcgtggggacaccctacataagggttgaccgaatatcctcccaccggcagagaggatttggtcattacactctttacatctatttcctttattgtatccatattcattgtattcgtctggtaaattgttccggcaattcctgaatcattctttcgtcgcccataatcggcagcaaatcctctttcatgaacaccggtatgccatgagcctttgcctgttctgcaatgctaagcacccattcggggcgcgaatatgactttccttttcggtttccggtctctgtgcctatgacaatccagtcaattccctcgaaatcaatctcgccgatatcatcgaagagaggttcaaacgtgacatggtagtgtcgtgctttgatattctttttcaaatcatcaatcctccttttctcggaactgcgcgtaacggtcacgcccatccatacgttctcgtcgtcagaggagaaactgattttgtcagggcgcttcgtcagaaagatataggcgtgctggggattgctgctgatccgctcgaaaatttctgcgttccattcaggcttccaatcggagaaatcgctcattcctgtcatgagccacacatgaggacgggacgtatcgatgatgcgcagttttcgttccatgtattcaggcacggaaaagtcgtcggtaatgtggaaacggcggcagttgttacgggcatagcagtaagggcatcctatagtgcaccctaccactatgttcatgttttttatcagggatttaatgcagacactcataacacaactgtttctccgtcctccgggataatcagccggctcatgtcggcttcgtgatgcgttgcctcattgcgcagaattgcacgggtggtctggcaatggtcgatggcatccatgtgtacggctatcagcttgatatgcgaaggcaattcgtcaagtatctgcatcacttcgttctcgtcggggatgataggaccgtccgttttggaaaattcgggaaagattgcacctccggagtttaccacgatatagtcaggattgaaccgttccacggtgtctcggatacatgcttcccatcggcagtcacccattatataaacggtcgggaagccctcggcttttagcacataacctgatacaggtcccatcatctgcccgatctgcccgaaaccatgatgtccggtcgtgcggtaaatggatatgccgtctattgtttttatttcttcgatgggtatcacatttgtaaatccgtcgtttctgatggcgtccgcgtcctggggctgaacgtagaaaggaatttctttgggcaaatgtgtggggacactcggctcgtaatggtcgatgtgattgtgggtcaggagcaccatgtccacgcctccgataatatcctgaataggaatggtgaggtgtaccctcggtgttttattcacaccgagggccgatatcaaagtgcctttgtcggctaaaacggggtcaattagcatggtgtgtcccgcatacctgattttcaaggtggcattgcgcaccaattgtactgtagatgtctttttcatgactatatgtcttgttattgattacgggtgcaaagttcggaagaatccggcgaaacatctatgcctgaaaaaacggtaattatgccattttgataaatgaaattattatctttgcaaaaacgacaaggatatggacgagataatcaaccctgatcgactggtcagcgtaccgttcaacaagacacgctgcggcgtggatttttacatcaatactgccataaacaaggacatcggacttgtgctgacagaaaacaagcggtttaagacagacttcttcagcttctactttttccgtaaggcaaacggatatttgctactgaacttccgcaagattgaactgcgcgacggcatggttctcctgctttcaccccatcagcaacaagagtggcatgtagatgagacggcgttggattacacgttccttatattccgcgaagatttcatgcgtacttttatcgccgacaagttcttcgtttttcgccttttgtattgttaccagacagatacgccgccttacatcaatgccacacatgacgaaatgaaggaatatatgcggctgctcggaaagattaagtatgagctgatgaatccagtgtccgatacgtacaatatcattgtttccttactatattatcttttgctgattatcaatcgtacatacgctgccgcctattgcttgcccgctgaaattgctaaaaacaatttcgcttttcggttcaaggacttgttggaacagaatatccgcacccaccagcgggtgcaggaatatgcagacatgcttcatgtcagtcgcatcacactcaataactcagtaaaagcccaattcggagtatcagctacccatttgataaaacaacgtctgcttgaggaactgaagaacgaattgctattctccaaccgcactgtcagtgaaatggcggatgatttcaatttctctgatccgagccatctcatgcgcttcttcaaacagcaaacaggcaaaacatttactcagtacatgacggattacaataaaggcatatacgaataacttcttaatatagtcgatagcggctatcgaaatatggttgttgatgttcaggcgtttttgtactgcatgaaccattttacgatttctggatcttcgtgcgagccgagtaagaaaggcttgtcggtatccagcgtctttatccgtgccatgtcgtcggccgacagggtgaagtctaatatgtcgagattctgcttcatgcgttccggtttcacagacttaggaataattatgcacactgatatttatcgcgcccggacaggtgttcggtgcggaagatgacggcatgcagttccaaccagatggctacctgcttatgttccatcccgacctgctgcggaatacacctctcgggcggataatgagtgaatattcgttcttttcctacgagacaaacgaggcattgcaccttagtgtggaagaacggcaaatcatcatggattgcttccacaagattcaatatgaattgaaccatccgatacaccgtcacagcaagaacctcatcacagacagcatcaagacgttccttgattactgcacacgtttctatgaccgtcagttcatcacacgcgacaaccaaaaccgagacatcctcgcaagatttgagcggttgcttgacgaatacttccatgatggggctgctaaacggataggcttgcccactgtacagtattgtgcagacaagctctgcctctcgcccaactatttcagtgatttattgaaaaaagaaacaggttcaaccgccctgcatttcattcatgacaagtctattgaaatagccaagacggaacttgcatctacagacgacaccgttaatgaaatcgcctataatctcggttttcagtacccgcaacattttacccgactgttcaagaaagaggtaggttacactccgaatgaatatagagcgcaagtgtcgtgagaattggattagtacagaatattagaacccaacacctctcttgcgcttaactttcttccttctgcgaagtatatccaccatttcctgattggcttccgcatcagcagcgttataagatgagccactgctttttagcaatccccaagagccgttgaacaactcgctttgtgccgtgccggacggtgcgcttggtgtagccgtttcatatattccggctgttattcccatacgttccctgcatctgttgtgctgcaaagccgcgtcaatcttggaataactgaaacgcctgtccactttggagccgttgaaatggtagccattcatggagaatacaacaccctgcacctcgctggtctgccccttatgcttgaaatgtacttccactccctgccgtttcaggttggcgataagcacgttccagttgccgcatctgccgacttccattttgatgatgtcgtaaagcgcatatttcgtcctgtctggctctttcaggcggttgcgtttgacattgtcctttccgccagccatatgcaagccgtatttcaaggtcaattccttgcagatgcgggtactgcgcagacgctcgtgcctgtccgatatggtattgccgttgttgtctatgcggttgaaagcaatatgcacgtgcggatgctccttgtcgaaatgctgggcgatgaagaactgcgtattcttgattcccatccgtttcatatattcaagcgcgatgcctgccatgatacggttcgtcagccgtaactcatcctctttggaaaaactcaacgcgatatgtccgacaggttttgtcaccttatcgttcatccgtgactgggcattgaaactcatggcgatagtttccagattttccataaacaagccttcgcttgctactatctgcgtatccttcttcttgtcgatgatgtaatccaccgcacccttgaagtcgcttccttttacgattttcgccatcatatccctatcttggttataagttcatgaatccttgccactgccaccttgcagtcccaccgttcatcgtggaagcctccggcgtttgccttacgcgcaagctggttgagattgttagccatgccgcagagttggcggatgtatccggcatgttcctccgacagccgttctttcacatgaccgttacggaaacattccctcatgtactcgcttggtgatacgcccgcctcatgcgatcgtgtcagcaggcggaagtagtcggctgccgtcattttcactgcgatacggtatttcagtttctcggttgcttccttcttggggcgacctcccttgttgcgttccttgtgttcctttgtctgttccatattttattccttttaattcggttactgattcaactgtatagaccgacgggatgccacctcctgcaatttggatggtgggtggcaagcggtttcggtacacccgaaacacaaacttgctacctcccaatccttaaggaatgagtttcgggcatctcccgtttttctcattcgggatgtcataatcccaaccctttcttcttgggttttacgatagttcttggcggtggactaacggctaatttctgccggattccacgcaggtaatcgttcaggtctttatgccctttgtagttgtcggagaagtcgcggatgcgtccggcgaacttcctttccaattcccgatacgcctttcttcccgcctcgtcattgtcgagcatgcagtggatacgtccatacccgtgcagcacatctatagctttggaaacattggcggtcgaattgaggatgacgtaatcctgcctgtcaaggtcgggcaagttcgagcagttcctcttccgcaacgtgaggaatgaaagatagtccatcatgccctcgaatacaaggcatttctctctcgcttctccctgttgccgaatatggctgatgtctttgggtgcgacacagcctttgaaaaaacggttacgcacttcaaatcctcccgccacattcggaaaaccgatggcgaaatagggcttgccgttatgggtgaagtggagctctttacattgcgcctttgccaaagcgatgtttatgccccgttcctgcaagtatcggagcaatgccggatgggtgagttcgcccacctccaaatgttggaaactcggttcggatgcctgctggcgaaaagagaaagatatgggacggatgtgtggtgcctgttccgctatcttgccaagcagataaggcacatggtcggatgcgtacagtacccctgcaagtgcgatgatgttaccacctcttcccagtccataatcgaaccacaggttgcggtcggtgttcaccttgaacgaggcttccgtttcctgacggaacggggatttataccacaggcagtttccctgttgctttacgggcgaataacccaaactttgcagatagtccgcaattttgatttgttttgcttcttggatgttcatgatataatttctatggatttgatgatgactgtaaaaacgttgatttgatgaatgagatatgtattgtcctatacgttaatgctttatattctcaacatcttctcaacaaaccactcacaaatagagaatccaacaaactgatgctgtttccctctcaacttttcttttcgattgttgagaatttgttgagagtgtatgctgtttattatcagtatggttatatcattattcatcaattcaacaaaaaaagaatagtattacagggattcaagttgttcccttgtgacggtgtagaaacgaccgactctttttatcggctcatatcggcactcccgattgtaattgaattggtaagtggtatatgtaagcccgttagaggcaggagtaagtttccaacattcctgcaatacctttctgacttggtgcttctccacctttacctgcgaatgtaccagcaaaagaagaatgtcgttgtggcagaacgagaatgtgtccgtgccgacactttccataatgtcaaggataagttcgcacatctctatctccaatcggttgcggttgctgcggataatcttctgcaaggcttcggtatgcagcaaagagggcgcaaaccacatacggctttccttttcggtggaaagttgtctgtattgcaggtaatacagaaaggcaggtatctcagctttcagcttttgcaggaagtctgtgtcatcggattgcagacggtctatcttgcgcacccaatagcgtgtttcacctgcatcaatgataacaggcagatactcgttgttggagcatagcacgaacttggcaaagaacgctatctcgtcacggtctttgcctttggcttccaccttgtaggaaagtgtggtgctgaggttcttcaaccgctcgctgtcctccctgcggttgagcaatacctcgtccaccacgatgagcagttttcctgcccagtcggaattgaactggctgcggaagtcctcgttggtattgaaagtgacattgttttgaaacacagctttcaggaagttcaggaatgtactcttgcccgtgttgcgttcttctgataccaacagcaggataggcagtttctgcacgggttgcaggtagagcaattgaagatagtccatgcccaattcatactgttcaccgaagatatggcgcaccaatgaccggatacagggaaactcgccttgttgcggacggtgtcctatcggctcgtagaggttcaggaacttgtccaccacgggacggtagtccacatggtcggggacggtgcagaagccgtcgtacttcggcacggtggcgagatagtccttgccgtagtcctgccgcagtgtttcgttgttccacacgatgcgcttcttcacatagcctccgttcagacggggctggttcactaacttgtagagggtagtacccacacggataaactcctcattttcaaagttgccttgtttcattagcacttcatttttttgtttaatcagtgcaaaactcggcaattagcgcagaacggattaacaactcacgcatacctcacgtaagattttcttggatttggctttatgacatacaacaaaagcccgaagaaatgccattctaatggatttttcttcgggtttgtcgtaatcgtacgtatgaatggcaatacacctattcacatactcgtataaatacattgttggcaatgggaatacgcataggtctcactacttcatgtcgtcatatcattagaacttatgcctgataattagacatatcccaaccatttatacccagcgaaaagaagatatttgttttctcttttcgcaagtacagccttttaaatatggcattgcgcacctgttccgcaccgaagctgtcaatgcggaaagcaagtgcgactatcatcggaaagctgaacacatcggcatgatacccgttctcctgccgaacatacttctgtacctcgtattcttttaatgctccactgttatagatgtttctgatggcagaacgaagtgtcggagcaattactccgaacagttccaccaattccggctcgctcatccaaatgtttgagacattctccggcatgatgatattgccggattcattcactgttatgctgtttcttctcatactcatgacatcgttattccgttaaacgtcttactcagtttgtcgccgaacatggtcaggtcgttgtcgagcttctgcgtggttatctttgcgtagagttgggtcgtgactatattcgtatgtcccaacacacggcttacgctttcaatgggcatccccttgctcaaagctaatgttgcgaagccatgacgactgcaatgaaatgatattgacttggttatgccacattcccttatcatccgtttcaacggtttgcagatagaccaatagttcaagccggggaatatacgattgtctttctgcatcggtcggtagcgttcgactatctgcaagggtatatccagcagcttcacttggaaggcgacttttgtcttgtggcgtttggacaatatccacttctcgccgttcacctccacgatgttgtcattcgtcagttcctgaatgtccacgaatgacaaggcggtgaaactggcaaagatgaaaatgtcacggatgtatgcgagcttgctgtctgcaaactcatgtgtcatgaccgctttcagttcatcctccgtcagatattcccgttctttcacattggggctgatatgaaactggatgaaaggattgcgcggtatcaacccgttataatgcgctttcatgaccacgcctttcagccacatacagtttgcccatatcgaaccgttccgcaatccggcttcagtcgagaggtatgcggcgaactccttgatgaaatcgggagtaagttccaacatggacatatcgctgcgtctgtaaaacgacttgataaaggcggctacatggtttcttgcccgtacacgtgcccgataggtagccattaccctgtctttgcctacccgtttcttgaacacttcgttctcacggtcgaatgcttttagcagcgtctcatactcgctgccgattccctgataggcgttgcgcaccatctcagccgtaacaaatgcctcgcggtctgaaatgcgctggtaatgtttgatgatttgcgccttgatgttgtcaagggcaaggttgatgtctcgtgcctcgcggctcttgcctttcgccttgtttcctttcacgtcccaaagcgttttcgggatgttctgcttacaactgaactgcgccacagtcccgttgattgtcactcgtcccatgatggggacaataccgtttttctccttgctgccgttcacgtagaacagaaccttgaatgtgcttcttgccatactcgttttttgtttgcaaagttattactcaacgagttagaccttgatatgccaacctgtgccacaagctgccaaatacaacacggtgtgttaaaaatcaccattcggcgggtaatgatttggagaccgttcttcttcataaatccgctttcctttacgttacctcgatttttcgcctgtcctcatttgtcttcgcaaacgccttattgacaggcattacgaagacatttgtccctttttattcgtcttttccagagatttttgataactttgccacataataaaaagtggatgtacagtgaaag

SEQ ID NO: 3980 - DNA, 2779 bp, Unknown
  gut microbiota DNA sequence
gacgctctctatataagagtgcgtcctaatttcaaaataattcaaatattccccttcttatagatcttttaaaatatttctatttgcattatctatctgattagtctgtatagacgaaagatagatttgtgtagtagtttctgaatcatgccccatcgcttcgctaataataccaatcgagatgtttttcgtcttagctatacttgcccaggaatggcgcgccacatacatagtaagtggtgtggtcaatcctgcccgggctgcaatcttcttcagcttacggttcaccagcaacattttattccggtattgtctgcgctccgtgccatcttctcgttctataataggtaaaagatattgtgtttccgaatctccgtatctgtcaataatctcctgcatctgtttttcccaccgtataatgagtttcttacctgttttacgacggctataactcacaaagccactattgagatcttttttacgcaaataggcaagatctataaaagacattcctcgcatatagaaagaaaagagaaagatatctcgtgcaaattccaatgatttatgatcggaaagatccaactgcttgatgtgtttgatatctgtcagggtggcagctctctttgaggtcttgtccacaccagtatatacattctcaaaaggatctgcaggaagggccagtccctcccccactgccttgcgatacacacaacgcaaaatacgcatataaaaagaggtggtattacgacttaaatggtgagtggagcgcatctccgtttcataatgttccatcaaatctgcatccatctcatcaaaacataagtctatgccgtcacggaacttcatgaagctgttcaatgcggactgatatgtttcgactgtccgttcttttccttgccctctaagacgctctatctgctcctgcatgtattcaaaaacgaaaacgcccttactcggacggttctttaattttactaatctcatatttgccattacctaggttaattaaataaatcatcaaagaaaaatataatatcatgatttatattttaatgaggacttaaatacttgtaacggcaaatagattctttagaattaaagagaaagaactcagtgtgcttatatcgacaagtatataacaataaaaaatacaaaagcgcgcagctctgataaactgcacgcttttgcttattatttatgtccttgtctgaattacttcacttcctcaaaatcaacatgatatatctatcagcgacttgcgtacacgtgttgcaaatataacgcaaacccgaaaataagcatccataagcaacacacgctcttgctcacaaaagtacgatttttattcataaacaagagatgtaaacgcataaaaatcaaaagaaagcgatgtttttaacagattcttcggttttatccttacctttgtatatgatattgggatgttatacccgaacaacaataaggaaactatgcaaatacataacaatacattgatagcggaatgctcggcttacgatttcaaggaaatgctggaacgtaagaaagtaaagtcatggcttaaatccgtgtcggcatttgccaatacggacggtggcagtttgttttatggagtgaatgatgacggtgtaattgtaggtttggagaatccacaagccgatgctgattttatcagtgaaatgataaaggcacgacttgaccctgtgccggaagttcagcttattccgatagaacacgaagggcataccttgcttgaagtgaaagtaaaggcaggaacgcttacaccttattactattatcaggatgggacacgtaccgcatatgtacgagttggcaatgaaagcgtggagtgtaattcgcaacagcttctttcattggtattgaaaggtacgcacatgacttgggattcactgcctacccaagtggatgccagcaaacattctttcatcattctcgccaatactttccgtgagcaaacccatcaggaatggaatgacaagtatctggaatcattcggactagtaactcctgacggcaaactgaccaatgccggattgctgtttgtggataattgtaccgtattccaatcacgtattttctgtacccgttggactggactctataaagatgatgccatcagttccgtggaacatcgggctaaccttgtattactattgaaatacggcatggacttcatcaagaactataccatgagtggttgggtgaagatgccgaactatcgtctaaacctccccgactattcagaccgtgctatcttcgaaggattggtaaaccatcttatccatagagattataccgtgatgggcggtgaagtacatattgacatttacgatgaccgtgtagaactggtatcaccgggcgcaatgcttgacggaacacagattcaagaccgtgacatatacaaagtgccgtccatgcgccgtaaccctgtcattgcagacatgttcacacagttggattatatggagaaacgtggttccggtttacgcaaaatgcgagagcttacagagaagctacccaatttcctgcaaggtaaagagccgcaatatcaaacggaagcgacttctttctacaccacattctataatttgaactggggtgacaacggaagaatgcctgttgaagaagtagccaacagggtaaatagtaccctcgaaaagtatcctgtaaacaaagaaagttcggtcgaaaagttcggtgtaaacacaaaagagttcggtgtaaatgaagaaagttcggtcgaaaagttcggtgtaaa

SEQ ID NO: 3981 - DNA, 9626 bp, Unknown
  gut microbiota DNA sequence
aagttcggagatacatcggaaacacagaagaaagtcagtaaaactgcacaaaagataatcgacctcgttatttcagatccttcaatcacagctgataatatggccaacaagattggtgtaactaaacgcgctatagagaaaaatatcaagagccttagggtatgggaattttggttcacgaaggttcagacaaggctggttattggcgcattattgttaaaccataaacagaacaacaaacctatggagacctctttcataccactctttgcaatcatagccgttttgattatcgcctttttgcttgcctctttgccacaggaaaccataaaacgcgataccgagtgctttatgcaatagccattatcatgctattagctgttatccctattagtgaatatatggctggtggcatacaaaactcaagtaacaattatctgcttgtcctaatattcgatattgcagtaggatatttctgtatgtacattgctgctttgctaaaattcaatgttcttaaacgaaagaaccaagcattggaaaacgccttgacagaaaagcaacaagaaaatgtggcaatcctattggaacatcaaaacgaaaagcaacaagcacttcagcaaggagagcttgaatggttaacagaaaaaatcaaggtatttactgaagaagaacaggaagctatacttgccagtgctctatcatttgctgaacatgacttgatagttgctccctcaataaacatacagcccaaagaaacatgtagtcagcaagaactaatgtactttgtctgctctgctttttacaatatggataaaagccgtagtaaaattgtgagttttttgatgaaaatttttcctctctattttcctgctggagaaagtgtattggcaaaaagatgccgggattagaaaaggttagggagagaagagaaaaagaaacaacagcgctagtgtcacattaaaaccggaacactagcgtttggcaattaatttaatttccccattcaaggcatatgtttactcaattggattatatggagaaacgtggttctccgtcaggtacgactttttgccgtcagctattttgaatcaggaggacagttgatagaaaaatcttaagtctattcaagagatgagtagaaagaggcaacatcaccatccttcattatataagaaatctgcttattcttctccgctataatctttaattgcttcttttcttctagagtccagttcttgattttcttaagttctgaaattattgaatgagtttgtttaaaactgttgctattttccaaatccataataagtttctctttttctttgtcttccttattatctatctgtccattatggcttacctgctcttgcttatttatgtaatggacagccatcaatttttcattcgatgcagttgtatcaataatggttttgactaatttgtccaattcagatccttctgtatagtctgcaggagtataatattttatgcgcttatcttccatcattttatagacttttcgtttatcttttgtttttggattataaactccaatagaatgacctgaataagaattaatgagtttcatacaaggtatatccgtatcactatcacctatatataccatatttctgaaaggaatacgaatgtcctctggtttaaaatagtcattgacacctgaatcattcacatctaatgtccctttttctattctaaaaaggaattgagtcttgctcgtgtaattaataacttgtgctggccattgagcaacaccatctttatcataatagaaggaactggcataaattttttcaaattcattagcgacttttgtaccttctatcatttctttaagacctgatgaaatgatataatgctctacaataactcctctttccatgccatagtctctaatgcgcttaaaccaagtctcaacaccggggaataattgtactttcgccccataatccattaatgcctttttattaaatatgacttttccatgcgctttctgaatcatggtaaacatgtaagccaaattttgatccatgtcattctcttcagctaacccattggactctttccaaaaagattcgacttcatccccaacagattgtatatacccttgcgcttgcatgtcatctggtgataatgtcttatcaaagtcataacatattgcaacaactggtttactttcctttgtttttctaataaattctttactcatatgctataataaaaaaatgagacacaattactattaattatgcctcatttatgatttatctattcagtaatttcttactttacgactttgaattacttattatttgacttcctcgaagtcagcatcctgaatatcttctttattattagaagaaccctgattagcctgttgtcctgcacctgcacccggaccggcctgagcgccaccttgtgcaccactctgagcatacatttcagcgctggcagcctggaatgctgtattcagttcagccatggcagtatcaatagcagacaaatcctgtgctttatgagcatctttcagtttctgaagagcagcttcaatcggagctttcttatcagccggcaacttgtcgcctaattccttcaactgattttcagtagagaaaatcatggagtcagcttgattcaatttgtcaatcttttcacgttccttcttgtctgcttctgcattagcttcagcttcggctttcatcttttcgatttcttccttgctcaaaccagaggaggcttcgatacggatagcttgttccttgccggtagctttatccttggcagatactttcaagataccgttggcatcgatatcgaatgtcacctcaatctgaggaacaccacgacgagccggagcaataccagtcaaattgaactgaccgattgacttgttttgtgcagccatcggacgttcaccttgaagtacgtggatagtcacttcagtctggttatcggcagctgtagagaaggtctcactcttgcgggccgggatagtagtgtttgcatcaatcaacttagtcattacaccacccaatgtttcgatacccattgacaacggagtaacatccagcaataccacacctttgatttcatctgtcaaaacagcaccctgaacggcagcacctacagcaaccacttcgtcaggattaacacccttggaaggagtcttaccgaagaatttttctaccaattcctgaacagccggaatacgtgaagaaccaccaacaaggattacctcatcgatatcagagttgctcaagcctgcatcgctcatagccttcttgcaaggttcaagacaagcctgaatcaaattgtgagctaaagcttcaaatttagcacgtgtcaaagtcttaaccaagtgcttaggcataccgtctacgggcatgatgtatggcaggttgatttctgttgaagtagaagaagacaattcaatcttagctttttcagcagcttctttcagacgttgcatagccatcggatcttttgtcaaatcggcaccttcgtcattcttgaattcctgtaccaaccagtcaatgattacctgatcgaagtcatcaccgcccaagtgagtatcaccgttagtagaaagtacttcgaatacaccaccaccaaactcaaggatagagatatcgaaagtaccaccaccaaggtcgaatacagcaatcttcatatctttgtgagccttatcaagaccataagccaaagcagcagctgtcggttcgttcacaatacgtttcacttccagacctgcaatctgaccagcttctttagtagcctgacgttgtgagtccgagaagtatgccggaacggtgataacggcttctgtaacttcttgtcccagataatcctcagcagttttcttcatcttctgcagaatcatagctgaaatttcctgcggagtataaagacgtccatcaatatctacacgcggagtattattgtcacctttcactactttataaggaacacgagcagtttccttctgtacctgatcccaagtttcacccatgaaacgcttgatagagaaaatagtacgttgcggattagtgattgcctgacgttttgcaggatcacctactttacgttcgccaccgtcaacaaatgcaacgatagacggagtggtacgtttaccttcgctgtttgcgattactaccggttcattaccttcaaatactgaaacacatgaatttgtggttcctaagtcaataccaataatctttcccataattatatatctttatttatttgttttcaattaaactgatttcttggcgaatggttcacgaaggacttcttttttctttggtgcaccaaccgcacgcccttcataaaacaaacggtatgccaaaaataagaatgtgacaaaggctgacaaaatgactgatttatttgctatatgatacttttaaatggattcatataaggcaagaatgtcagaactccaccaaatacaatacctgtcagcatcctagcataatgccataaatgcaatcggcctgttttctcgtttatgagaaaacaggccgacccatatcaattcgaatgtagatggattattgtttcttcaacaccaacaattcatttccattttcacctaacaaatatactttatcatctttcatgctgaaactttttgtttcattcaaagcattcagcacgatagtttcagtttccatatcaggacacatcatcatggtagtagcaacattgtcaaatctcaaagaattgggttttccatcttcctgcattaacgcaccatttatggtattacagcccacattaccgtaaatgcggctttcatccaaattaaaaccgataaaaggggtcacctcagccgtacctacaatcttctttccattcaccaattcaataacccattctcctgaaagatcagacagtgacacttccggagccgccttcttttccaaagtcatcaacggccgaccatcttgattacatagagttatcacgtcgggcttgtcagaaaccgtctggaaagaagtcactttatccaatacacccaataccatctgctcagtcttcatattagggcacatcatgcgggtacttcctatctgtccaaacttcaatgtacctggcttcagagagtcggcttcaaaacttcccatcatacggttacatccgctattgccataaatacgtttctgagctacatcaaaaccaatgaaaggcattctctctgtagatatcttctgtccatccacctctgtaatattccattccccatccagagaagaaacagacaacatattctttccactaccacaagatacaatcaatgctccggcacaaacagccatcattttcaatactagttttttcatattatttttttgttaaatctgttagtttagtgtgcaaaactaaccattttatttttcactatagcaattatacacaaaaattttatacctttgtatcaatttatatatactaacacttaaagcaatgaaaaggtttttagccattttaattggggcaacaagctgtagcctatgcacttatgcacaaaacggatatatagtcacgactacttcacaacaaacaagtatttccgtagaatctttggaaaaacagtttataaacgatcatttcaagtattacaacctgtgtgactggacaccaggcatgaaattcatggtgatgccggaacgtaaagacatcattattcctccttttaaatcggcggaaaccaacaaggaggtggatacaggagagttaaaacataagatttttgaatatctgggttcggaaattaccgaacggggctttgtacattttaactttgaatgtgaagggcaacaatattatcacgaacttaaaaacaccaccctggaacaatattgcctgaagcccaaagccggtattcctacccttgcctacctgggtgatgtggacatagccaaagaactgctggaaggacaaaccctatatatgcgtaccaataaagtacgtatagatgatcccaacagcatatcgggctataaagaggtcccgattggtataaatgaagaagtaacagtaacagctgtcggagtgggcagccgcgcataccctgtaaaaatcgtattccaagacaagaaaggaaacacctactatcagccggtagctatatcaaagactaattgtggcatggcagacagtgattttattatggaaaataaaaataaatattttccaaattcatttagcttcagtaatgcaaatacaaaaaaatcaaagaatctgatgagtaaatatgggaaaaaacctgtctatctgaaagcggaaacggaatgtctagatgaaacagacactccggtgagacttccccgatatacacaattcaccatcaaaaatataatctcacaaaacaactctccttacgtctttttagaactggaagacatagatggaaagaattataagataaaagctgcattcacccatacgagtgtagttgatgtgattttacaatcagacaattattttacggatctattcggcataggcaacttacgaaccaagtatccgaatatcacagaagaagtttggaacatgataagccgcggtaaggtacgaaaaggaatgacaaccgacgaatgtcgtctggcattgggtaatcccatgcgcattcatatagtcacggggggctatgaaacatggtcctacgaaagaaaaaccttagatttcaccaataagaaactagaccgtatccactaatacccaaaatattttgttatctttgccctgtgaacggtaatgtctgccgggcattttattttaacaagaataaaaaacagcaaatgggtaaagtattaattatcggtgcaggcggtgtaggtactgtcgtagcacacaaagtggctcagaatccggatgtattcactgacatcatgatcgccagccgtacaaaatcaaaatgtgatgcaatcgtaaaagctatcggcaatccagctattaagactgcacaggtagatgcggacaatgtagacgaactggtagccctgtttaatagtttcaaacccgaaatcgtcatcaatgtagctctgccttatcaagatctgaccatcatggaagcttgtctgaaagccggggtgaattatctggatacagcaaactatgaaccaaaggatgaagctcatttcgaatacagctggcaatgggcttataaaaaacgttttgaagacgcaggactgacagcgatactgggttgtgggttcgacccgggagtaagtggcatttatacagcctacgcagcaaaacatcattttgacgagatgcactacttggatattgtggactgtaatgccggcaaccatcacaaagcgttcgctaccaattttaatcctgaaatcaatatccgcgaaattactcagaacggacgttattatgaagaaggcaaatgggtgaccaccaagccattggaataccacaaggatctgacttatcccaatatcggtcctcgtgattcctacttgctgtatcatgaagagctggaatcattagttaagaatttcccgaccatcaaacgtgctcgcttttggatgactttcggtcaggaatacctgactcatctgcgtgtcatccagaatatcggtatggcccgcattgacgaaatagattataacggagtgaaaattgttccgttacaattcctaaaagccgtactccccaatccacaggatctaggagaaaattatgaaggcgaaacttctatcggatgccgcatccgaggcgtaaaggatggcaaagaacgcacttactatgtttacaacaactgtagccatcaagaagcttacaaagaaactggaatgcagggagtaagctatacaactggagttccagccatgattggagccatgatgttcctgcaaggattgtggaaacgtccgggagtatggaatgtagaagagtttgatcccgatccatttatggaacaactgaacaaacaaggtttgccttggcatgaagtattcgatggtgatctagaactttaaaatagtgattaatggcccataattcatacttgggccacactacccattaatcattaaccactaaaaaatgaacataggagataaagccccggaaatattaggcttaaacgaaaaaggagaagaaattcgtttaagtaattataaaggaaaaaagatagtactctatttttatcctaaggatatgacatcgggttgtactgcccaggcatgtaatttgcgtgataattatgcggaactgcgcgcccatggttatgaagtaatcggtgtcagtgtgaatgatgccaaatcgcatcagaaatttattgaaaagaatgagctaccctttactcttattgccgataccgacaagaagttggtagaacaattcggagtatggggagaaaaaagtatgtacggacgtaaatatatgggtacattccgtacaactttcatcattaacgaagaaggcgtgattgaacgtatcatctctcccaaagaggtgaaaacaaaagagcacgcacaacaaattttataaaccaacagatttatggcaaaaaaagataacgaagaaattccattctcagcaagtccgagtgccggaaatagtgaaaaactgaaagcgctgcaagctgcaatggataagatagagaaaacttttggtaaaggctctatcatgaaaatgggtgatgacaacgtacaggaagtggaagtgattcctaccgggtctatcgccttgaacgccgcattaggggtaggcggctatcccaaaggtagaatcatagaaatttatggtcccgaatcatccggtaagactacattggctatccatgccattgctgaagctcagaaggcaggcggcattgccgctttcattgatgccgagcatgctttcgatcgtttctatgcggccaaactgggagtggatgtagataacttatggatatcacaacccgataacggtgaacaggcacttgaaattgctgagcaattgatacgctcatccgccattgatatcattgttatcgactctgtcgcggcattgactccgaaagctgaaattgaaggagatatgggtgataacaaagtaggtttacaggcacgtttgatgtctcaggctttgcgcaagcttacgtcagccatcagcaagaccaatacaacttgtatttttatcaaccagttgcgtgaaaaaatcggtatcatgtttggtaaccctgaaacaactaccggtggtaatgctctgaaattctacgcttccgtacgtttggatatccgtcgctccactcaactgaaagatggtgaagaagtaatcggcaaccagactaaagtaaaagtggtgaaaaacaaagtggcacctcctttccgtaaagccgaattcgatatcatgtttggtgaagggatctcaagagctggtgaaatcattgatttaggtgctgatttaggcattatcaagaaaagcggttcatggtacagctacaacgaaaccaaactgggacaaggacgtgacgcctccaaacaagtgattcaggacaaccccgaactggcggaagaactggaaggtctgattttcgcagcactgaaagaacaagaatagggatattcagtaaatgtctctaaaaaataagatggcat

SEQ ID NO: 3982 - DNA, 23621 bp, Unknown
  gut microbiota DNA sequence
aattcagcactataaatttaatacttttatcgctatgtttctaattataagtgaaatatatttattcttatttcgaactcacgttattttaattatacctaatcaacaaatataaaagaatttatatcacctgtagcagctgaaaaattatatgaaatgattgaacggacacggacagaaagggaaatgcaggtttgttctttctgtccgtgttccactatggatcagctcagtttatgaataaccaatcccgaacgaagtttcggttcaaaccaagttgttttgggcggcatgatattgccggtatcggcaatatccattaattgtttcatagaaacagggtaaagggccaaagccactttcatttcaccgctgtccacacgcttctttaattcctccaggccacggataccacctacaaagtcaatccgtttgtcggaacgaagatccttgattcccaatatttcatccaatatcaagttggaagaaatagtcacgtccaatactccgataggatcattgtcatcgtatgtgcccggttttgctgtcaagctgtaccatttaccgtccagatagagagagaaattgtgaagagcctgtggtctatagacctcagttcctttctcttctaccacaaaattcttgctgacagcggtcaggaattgttccggagacagcccgttcaagtcttttacaacacggttgtaatcaataatagtcagctggttggccgggaaacatacagccataaagtaattgtactcctcatttccctgatggtttgcattttgctgcgctttttcggcgcctaccaaggctgcggcagccgagcgatgatgaccatcggcaatataaagagccggcatggcttcgaaagcttttgtgatagcttttatatcttcttctttgtcgatcacccagaatgaatgtccgaagccgtcacccggagcgataaaatcatattccggccgttgtgaagtatatttcttaacgatagcatccaattccgcattatccgggtaagcaaagaataccggttctatattggcattatttacgcggacatgtttcatgcggtcttcctccttgtcacgacgggtcagttcatgttttttgatgaccccgttcatataatcgggaacatacgctcctaccaccagtccatattgggtcttgccattcatggtttgtgcatatacataataattttctttttcatcttgcaccaaccagcctttgtcctgaaacatctggaaattttcggcagccttctcatatactttaggatcgtgttcgtctgttccggcagggaaatcaatttccggttttataatatgataaagtgacttttcattacctttcgcttcctcgcgtgcttcttcagaattcagtacgtcgtatggacgtgaagctacttgttctactaattctttcggagggcggatgcctttgaagggttttattattgccataaaataaaggtattagattttacttgcaggggcgaattgcattcgcccgaaaacataagctatatgcatccggtcggattcaatccgcccctgcggttattggattacttatttatttactctgaatttttcacaaccatctttcaggaagcctactatttgtctggcagcagcgatacctgcgttgatatttgcttcagccgtctgggcccccatctttttcggtgtagcgaaataacggccggcaaatttttccgagaactctgcatgggcaaccggcatgatatcagtaacatactttaagtcggtgcgttcttccatcagtttgattaattccgcttcattgatcacttccttacgggcagtatttaccaatactcctcctttaggcatcttgttgaccaattcatagttgatggaatttttagtttcagccgtagcaggaatatgcagggacactatattacaagcagcatacagttcctcagcagaagaaacagctttcacaccgtctttttcgataacttctttcgggcagaaagcgtcaaaagcataaatatccatgccaaaacctttagcgatacgagccacattgcgacctacattgccgtatgcatggatacctaacttcttgcccatcagttcagtacccgaagtcccgttatagaaattgcggacagccatcaccatcatgccaaaagccagttcggctactgcattggagttctgtcccggagtattcataacacacacattgtgtgccgtagcagccgccaaatccacgttatcataacctgctcctgcacgtactacgattttcagttcttttgccgcatccaatacttcggcatcaataatatcactgcggataatgattgcgttaacgtcctttacagcttccagtagtttagctttttcaccatatttttccagcaataccagttcataacctgctgcttctatttctttacggataccgtctactgcaacttttgcaaacggcttgtctgttgctactaatactttcatggtcttattgtattaaaaaggttcaccacagattatcacggattatcacagattccatttattgttcctatctgtgcaattcgtataatctgtggtgaacataattattaatgaagtttctcaaattcctgcatgcagtcaatcaaagcctgaacgctttccttcggcatagcgttgtagcaagatgcacggaaaccgcctacagaacggtgtcccttaatacccaccatacctttttctgtggcaaatttcaagaaatcggcttccaggtctttgtattcgtcattcattacaaagcaaatgttcatataagagcggtcggctttatccgttactgtgccacggaacattttgttacggtctatttcagcatacagcatgtctgccttctctttagcacgtttctgcatttctgctacaccaccgttggcttttatccagcgtaaagtctgcaaagcggcataaataggaagtacaggaggtgtgttgaacatagagccgccgtcaatgtgagtctgataattcagcatagtaggaatatagcgtgataccttgcccacagcatcgttctttacaataacgaaagtgacaccggccggagccaaattcttctgcgcaccgccatagatacaaatatatttagaaacgtcgataggacgagagaaaatatcagatgacatatcagcaatcataggaaccggagaatccagatcttcatgaagttctgttccatagattgtgttattcgttgtgacgtggaaataatctgcatcggcgggaaccgtataatctttgggaatataggtataggtcgcttcagcggaagatgccacttctactacctcgccgaaagccttggcttctttcatcgctttcttggcccatacgcctgtgttcaggtaagcagcttttttttcgaggaagttgaaaggtatcatacagaattccaagctggctccacctcccaagaatagtaccgagtacccttccgggatgttcaacagttccttaaacaaagcaacagcttcgtctactacaggctgaaaatctttagcacggtgactgatttccatgatggaaaggcctgacccattaaaatcaagaacggcttgtgctgtcttctcaattacctcgcgaggcaagatagatggtcccgcattgaaattatgctttttcatttgacgtttgttttggttatacaatttgtttatatcttacattgggcgaaattacacattattttcagttttccaaaaaaatcgctaataaatttacgaatttccgcataattttctttcaaattagttaaatctgattttttatgctttcattttgtaactacatccctagtaaacaatgatctaaagcataaaaaaaatatctttttgaattattctttaatcattttatttcgagaattgacaaattgtcattatttagcttcttcaataagtgtttttatgccctttatcttctcatttcgtattaaattcaaagtttgttttatctttttgcgagatacggctgcaaaagaatagtggtcttttacatcaatccgtcctatttcgtctttattaaggtttccttttttaaagagaaatcccacaatatctatcttattgattttatctttcttgccttttcctatatataatgtcacatattcgggtaaagaaggtttgggggtgacttcgggtaaaatgaactcctccggctcatcggttatatatgcgggcactgtttcttcggcatgaaggataacataagaattaccttcggcttcccagcgggcggtacgtccgttgcggtgaatgtatccgtcttcattggcaggcagatgataatgtactacattctctatttcggggatatccagtccgcgagcggccagatcggtagaaataagcacatggcaacttccgttgcggaatttatatagggagcgttcgcggtcatcctgttccatgccgccatgaaaaatgccacattgaaacttctgggattgaagatacttccctacccgttccacactttcacggtgattacagaaaaccaatgtcgattggcttcccaaggtacaaagcaatttatataaggtttcaagtttgtctttttccggagacagtaccttatataaatgcagacggtgggtaagctgctcttccggatttaaaaaattcaatttaatggtcttgtccagccccgtaaactgcggaatctcttccgcatcggtagccgacaacagaaaacggcgttgcaagttgggcaactgtcctatgacagtcgccatctcttcctggaagccaaactccaggcatttgtcaaattcatcgattaccagagttgtgaccgtatctgcatcaaaattctgtttggaaagatgatcattcatacggcccggagtaccgatgataactgatggctgcacccctttgatggtacggtgctcttccatggccggtcgtcctccataacaacttacagccttgaagggtgtgttcatggatttaaatacctggtctatttgtaaagccagttcccgggaaggaaccagcactatagcctgtacgcctgttataccaggcttcaaactctgcaccaaaggcaacagataagctaacgtcttgccggatcccgtaggagacaataatattaggtcttttccctctttccaagcattgatggacgcctcttgcatcgggttcagccgctcaattttcaaattggctagtatgttctctatcatattcattttcgttttatacaaaagtaaagaaaaagcccgataaaagttcacttttaccgggcttattttcattattaataaaaggagatcctgatattatcctccgaagttgtcgtacatgatagaagaaggctcaacacccagactatccagcatcttaacaactgcattagacatcgggccggggccacacatgtagtattcaatatcttcgggagcttcatgatccttcagataagtttcatacatcacattgtgaacgaaacctgcggtatacttcacgcctgctgcatcggctgcgggatccggacggtccaaagccagatggaagtggaagttcgggaagtctttttccaattgttggaaatcttgcagatagaatacttcgttcaatgcacgcgcaccatagaaatagtgaagttcacggtcggtagtgtgcagtgtcttggtcatgtgcataatctgcgcacgcaacggagccataccggcaccaccacctacccaaatcatttccttcttagaatcgaagatcgggtggaagtctccgtaaggaccactcatcgttaccttgtcacccggtttcagcgtgaaaatgtaagatgaagcgatacccggattcacatccataaagccgggaccctgatctttcggtttgaacggaggagtagcgatacgcactgtcagcatgatacggtcaccctcggcaggatagttggccatagagtaagcacggatggtttcttccgtattcttacatttcaagccgaacagaccgaatttttcccatgcgggcagatactccggaccgataaggtctttatcgatatccttgttgtagtccatttcaaatttaggaatcttaatctgagcgtatgaacccggaacgaagtccatgtgttcacctttcggcaaagccacaataaactctttgatgaaagtggcaacgttcttgttgctgattacttcgcattcccattccttaacacccagtacagattcatcaatcttgatgcccaggtcaccttttactttcacctggcaacccagacgccaatgatcctgttgttgtttacggctgaaatgtcccttttcagaaggaagaatctcaccgccgccttctacaacctggcatttacattgaccgcaagaacctttaccaccacaagccgatgacaggtagatgccattgacagacagggtgttcagcaaagttgaaccttgttctacttccagttctttctctccattgatagttatctttactttgccgctcggagtaagatactgcttagctaccagcaaaataacaacgagcagaaggataattccaaggaatactccaatactagctaatattaaattcatatccattgtcttattcctttccttttagattttcaaaccagagaaacacataaatgccattgccatcaaacctacagtgatgaaagtgatacccagacctttcaaaggagcgggaacatcagagtaagccattttttcacggatggcagccagaccgataatagccagtgcccaaccgatacctgagcccaaagcgtaagtagttgcctcgccaatgttgatgaaatgacgttgctgcataaacaatgaagcacccatgatggcacagtttacagcaatcagcggaaggaagatacccaatgaagcatagagcgacgggctgaaacgttcaaccgccatttccaccaactgaacgataccggcaataacggcaataaacaggataaagctcaagaagctgaggtctactccatcaatcagcgcattaggtgccagtacgtaattttccagcaaatagttcaccggcagagttacaatcaacacgaaagtaacggctgcacccagacctacggctgtctttacgttcttcgatactgccaggtaagaacacatccccaggaagtatgcgaaaatcatattgtccacaaagatggactttacaaacaaacttaaatattccatattcttttcgttttataacggggattaattattactttcctgcaattctttgtgttttgcacgttggtaccaaatgatacaagcacagataatcaacgccataggaggcatcaacatcaagccgttgttcaggtagcccaagtcataaacagcctgcgggataacctggaagccaaacaatgtaccggcacccagcagttcacggaagaatgccacgataatcaggattttggcataacccaatccgttaccgataccatccaggaatgattcccaaggaccgttcatcatagcaaacgcttccagacgtcccatcaggatacagtttgtaataatcaaacctacatatacagaaagctgcacacttacatcgtatgcgaacgctttcaaaatttcactaacgatagttaccaatgcggcaacaaccaccaactgaacgatgatacggatacggttgggaatggtgttacgcaacaaggagataacgaagttcgagaaggctgtaataatggttacggaaagacccatcacgatagccggttccagctgagccgttacagccagtgcagaacagataccgagcacctgtacggtgacagggttattcaaacccagcggagttaaaagaacttctctattctttttagaaaataatgcgctcatattctatttaccctcctcttatttattagttaaaaatgaattgtacatgctcaggcaatccttaatcatcgcatctacacccttagaagtgatagtaccacctgagataccgtctacctgataatcgggttttgccaccttgccgtgtttttcaacacccaaagctacagtaccgttttccattacatgtttgcccaagaactgatcctggaacttagtagtggtgatttctgcacccagacccggagtttctccttgatgagagaagtaaacgccgtatacagtgtctttgtcatcattcaatgcgatgtatccccagataggtccccaaagaccggcaccataaataggcagcacatatttggtctgaccatccacgtcgcaaacgaatacatgaagacgtccgttagcgatttcacctttataagaagtctggaaagcagcatcgttctttaccaaagaaccgtctgcctgcatcaaatcgtcttctttcacatatttatcatattctgcattcacatcttttacgtcataaacgttcaaagctgccagaatttgtttctttgtgtcctgttctacattctggtactgtttttctttcagagaagaagacacgaatgccaacaggaatgctacgataacaaccattatcgaagcatagatgatagtataactattactattagtattcataatgtccgatattttagttgttagttgattttaatctgttttcgcgggctgtgatgttcttctgtacgatacagtagtcaatcagcggagcgaagatgttcatcagcaggatggcaagcatcataccttcgggataacccggattcaacacacggataacgatagccatcacaccgatcaggaagccgtagatgaacttacccttttccgtacgtgcggaagtcacagggtcggtagccatgaacacggcgccgaagcagaaaccgcccaatacgatgtgttcgtaccaaggcaactgagccatcatgttatctgtagagccgaatacattgaagatcaatcccatcacgataccaccggcaaagacagagaacatggtcttccaacttgccacgcctgtccacaacaggatgatggcacccagtgcgatagcgataacgctggtttcaccgatagaacccgggatcaaacctacaaccatatcccacatggtagcgggagtaccgttcacattaatcagttcgcttgcacccggagcggctgtagcagcctgtcccaacatcgtagcgccggtaaaaccgtccactacctgtccgccaccgataccgaaaatgctgtcagtgcttacccaaacggcatcaccggacattttggtaggataagcgaagaacaagaaagcacgggtaatcaatgcagggttgaagatattcatacctgtaccgccgaatacttccttagcgaagataacagagaatgctgtagcgacagccagaatccacaacggacattccacaggaacgatcatcgggatcaacagaccggataccaggaaaccttcctgaatttcttcgttcttccattgtgccaccacaaattcgattcccagaccgactacgtatgatacgataatcttaggcagaacagccaggaaaccataaatgaacttttcaaagaaacctgcctcctggcctacagccaagaagtgctggtaacctacgttgtacataccgaacaacagggccggtatcaacgcaataaccaccattgacatgatacgcttgctgtcaatcgcatcatgaatgtgaactcctgttttcgaagtgctgttgggtacgaacaagaatgtttcgaaaccgtcgaacaccgaacgaaacgcgtggagtttgccgccctcttcaaagtttggctttatcttgtcgagataatttcttaacgctttcattaacttttaattcttagtttttaattatttagcacatttccttgcgaagcatgtccaagccctgacgcacgatgcgttgcaattccaatttggaagagtcaacgaattcacatacagcgaagtcttcgggagccacttcgtaaataccaagtgcttccatgcggtcaatatcgccggcaatgatagctttaattaaatattcggggaaaatgctcatcgggaatactttgtcatactcgccggacatgatcatgtggcgttcgccacctttgatacgggcatccagtgtgtattccttgttaccgcacaaccagctgaaataactgcggttggcactgtactgatcggtacgcggcatgataaagcccaggaattcgtgccggtcatccccttcgggaatcacagtaagacttgtagcgtgcgcacccaggaatccgtttggcttcaccaaagttccggtcagcacgttaccgttaatgtagcgtaagtttttacctccgttcacacgtcctgcaaaaatatctgtcagcaaggctcctactttcagcttgcaataagccggtttcttcacttccgaaccggtcagggcgatagtacgggtaaggtctacgcgacctgtgttgaacaggcgtccgatgaagatcacttcttccgcacggagcgtccaaacagtttcgcctttgttgataggactgatgtggttaatctgaacgcctacgtttccggcggggttaggaccgtcgaaggcagttacagttacatttttggcgttggtcagtgcagggctcttctgctctacgctgatattcagatacgtctttgccatctttgccagtgcgtccagaccagtctggaaatctttttcctggcctttcagaacaaattcgaaatcagcagccaatgggttagtgtcaaatgcagaaacaaagatgcctttcggcttggcattcggatcagccaccacgatgtaggggcgctggataatgaatgaaaaaagtccggcttccagcagggcggcttttacctgctcgcctgtcagagtcgaaacatccttctttccaaactcttcgtagtcttgctcctttgcagctgcaatggagatgcttaagactttacgacgttcgcctctctccacgctggtaacgacaccgcttaccggagatacgaacttcacttcggggtggttcttgtcaacaaacaatgttcccccggccgtcacatattcctgttccttgaccacgactttaggagtcacgccatgaaaatcatcgggcactatcgcatagatgtccggctgcttcacgtcaaagaactcctgagcaggtttccctttcaggttgatgttcaagcctttgtgtaatttaatcacatttgccatattgggttataaaaaatggtttttaaatttgagcgcaaaagtacagaaaaaaaatgtgaaaaaagaaagaaatggtgcttattatggaaaaaattctgtaataatagaaacctttctgaatgtatgtgcaaactcaggcagatgctcactttttttttagaacacaaatgacgcgaatggcataaatttatcttgatttttaatttatgtcattcgcgtcatttgtgtttcattccggaaacacttacagtttgacggtcttcactttgccgggaatgacggtcaggtgtaccgtgccgttgttttctatatccacctcctggtagcgggcttccaccatcactttcccgtccagtgccatcaccccccaccggcaggcgctctcttcaaaagcacaataaacgcccacaggaggaagaatctttctgtatttgggaggaacgatgatacgttcccccagtttcaagccccatttcatgcccatacggtacggaagggcatctcttatctcctccagcctcttccgccttttcgcttcctcgttccttctcttctgccggttcgtttcctccgcccgctgtccggcttcctctttcagcttctttacagccgtgtcgaagtcctgctcaccgggttcgggaaggttagcggcaatgtaccgcttcctctttcctttttccacatggtaataccttcctgccccgtccatcaccacgatgctccggtcggccagacggccgcagcaccaataaacttcctcgtcatcccctgccaacaagcaggcgaacacatcaaacaccgtggaccatacggaatccaccagcttgcaggacttcggtacgcgataatccggtatcttcaagtaatattcataaaagcagatgctgtctttatgcagcccgttcatggaagcgtatgctttttttgtacggctatggaaagtctcccctaccctcagcaattccacaccgccgtaggaaaacaccaccggcttctcccggtaagtgcggcctgttttcatgtccatgtaggaaaccgtgccggcagtatccgtaacagccagcagttcctctttcaggaacttcaatctccggcaatacccaagtatcacttccggctccccggaggcactcaccactccggcctgtccatctttcaaacggactgccgcacggtttccctgaatgtcaaagacttgcagataacagggggatactgttatcttgtttccacgcttcagcccccacaggctactccgccggtcgggacaagatttcaaggcggcttgtgattcctttccctcttctgcttcctcccggttccggatggcttccatcagccggtcgtgcgttatcaccatctccagttcatcctcccgttgtctttcctcctccggcagcggaccggatacggacagcctgcctgtttccgcccgtgcccgggacagcgcgttgccaatcatccgtccctcgaacatcgccgcccagtcatggttccgggcgggcagaccgaagatgcggtatagacccacattgtctatcagcatacaggacgccttgtcggccgacctcctcagcccacgccccacctgttgcaggtatttcgccagggaaagcgtgggacgtgccagctgcacgaactccacatcgggacagtcgaagccttcggagaagatatccacattgaccagcactttcaccttcccccgtctgaaatcctccaccagttcccggcgttccgaagccggagtcctgctgtcgatagccacagcctccagtccgtgtgcgctataacaagccgctatccggcgggcatgggcgatgctgacagcatatacgattcctttctttccgcgggcatatcgttccacgctctcatacagccggccgatacttgtctcccggttcagcacctcgttcatctcctttacctggtagtccccgtccgcaccccgtttcttcaacgagtctatcaaccgctgttctttgctgttcgcacggatggacacatagtcaaaggatgacaaccacccttgtccgatgaattccgcgacggtccacgaggtgatcaggctgtcgaacaagtccatgaatcccttgccgttcagccggcagggagtggcagtcatgcccagtttccttgcctccggatatttctcccaaagtatctggtaggtttccgccagggcgtgatgcgcctcgtcgacaacgatcaggtccggctcttcatccatgtgcttccggtttcgtgacagccactggatggacatcaccctcacccttccgtcctctttgctcatcccgtgccgggacacggtttcctctatctgatccaccagctcccggcggtgcgccacgatccatacccggctgccggaaccacgcaggaattcccttactatggcggccagcagatgcgtcttgcccgtaccggtgggcatctgtaccatcacacttcggtgaagctcccactccttgaaaaggcggagcttcatctcctgctggtagtcgcgaagagtgtcgttcatgcaatacattatgcggatgccggtcgctaccggcaacaaaaaaaagggaaggccacatgcatcattgcatgcagcctatagtaaatatcttattctttacggattaatttttatcgaaaacccaattatcaataagtcctataaaagcacagactttaggatacatttcctgagttgctgctaaatcaaagttcttaaagtcttcataatcggcagctgaacgattattgaacaaaatagaataaaagcgtccccattctttagggaatttacctgtaagaataaaatgctggctgaatttttgacgtacaccttcatgactcttgactccgtctatctccgactgcaacaacaatccactcacagcataaaaacaggcataatacatcctattcattgccgtattgtaataaccacgctctatatgatcttttatttcatctaacaatgatttggctgaattcagcctatataaaacaatatcaaaccgctgttccggagtcataacaatatcccctccttcattatattctcataaaacggagtgaaacgttttccccattctttcatcgactctataaacggattgatttgaacaccggtttctaactcaatgtcatataaaggagcagttaaaagcatcttgtcctccaaagtaaccacatccttatctatcaacagcaacaggtctatatcactatcactacgcgcatcaccccgcgcctcacttccataaagtatcacctttataccaggagcaaccttatgtaaggcattttgtatagatttcacgatttcaggacgcttcatactccttatctttagattgaatttgttgttaactgcaatcaagcttaatacaaagaacgaaatttttcttcaaacaaacaaatattcagcatcttaattgatatcctatcgaaaagttcctgttccattatttttcgcttttaccgtccctgcaatgaaagagttcttacatcatatacggcctattcttctatgacccaatcccccagggtgtgtttctccacatcaaaattgatccccaccttcaccacttgcaatccgctgagggaaaagcgttcgggatactgcttcagattgatctgggccatggccgcttccgcagacctacccagcttcaattcaatgacatacagcttaccggcaacacgcatcaccacatccacacgccccttgggggtacgcacctccacatcgacatacatcccgaacagggagaagatgatgtagaacaattgctggtaatgtccctcataattcgtgttatcacaatacggaacagtagaaaggaattcctgaagaagacgcaaggccccgtccatatctcccccggctatcgcaagatacatacgggcgatggtcgtattgcctttcagcgtgttatgggccagatagccaggcagcaagctgcgcatcagcccgatccgtatctcaccgttcggaatgtccagcgtatacagttcggccagcttgttgtaatcctttatcgtaaagtaaccgctctgatagagcagaggaacaatgccctccattttctccgtaggcgcatcgaaatcagcagccatagcctgcatacttccccctaactgggagggaaggacgtggaacttgcgtagcatctctatcagataagtgggcgtgccgctgccaaaccagtaattgttcaactcgtcattggcaaaggcattcagcaggctgaacggattatagatatcgggcgaaggccaggtaaaatgataaccgtcatatttctccttcaacttctgcaacgtttcctctttgctcatttcctgcgaaacggcaagccgttctatataagctgtcatctgttcctgcatttcttcctgagtgatgccacaaatggcggcatagggcttcagcatactgatattcaagatattgttcagctcgctgaagatgctgagttgggagaatttggtaatgccggtcaggaacacaaagcgaagataagggtcgcacgccttcaacggactgtaaaaattgcgcatcacgttacggagaacgggaagatccgtttcctcatgcatcacatccagcaaaggcgcgtcatactcgtcaataaggactaccacctgtcggccggtctgttcgttggcacgcatgatgagtgaagtcatccggtcgttcagcttcacagcctcctcaggcttgccataaatttgttcatatccgctaagctggaagctcagcatgctttccaacgtatccttgtccacatgcttcgccagactcatgtcgaagtgcagcaccggatattccgtccattcggtttccagcttctcaatggccaatcccctgaaaaggtccttcttcccggcaaagtaactgtgcaacgtagaagtcagcaatgacttgccgaaccggcggggacggctcaggaaacaataattggaggcaccgtgcaccatccggtaaacatattccgtcttatctacataaaggtagtttccctctatgattttctcaaaagtctgtatgcctatcgggcatttcttcaattgctgctgttccatcattttttccattttaacattaccgctacgaagataaacaaattccgccacttcctgttgcgtttaccgcaaaatatgacttcttttcttcagaaaagaattttacgatattggtaaagaaaagctatcccattattaggttatccgtcttcagatcatccagcattcgttttatcgcttgctgcaattgtggtatgtcttccaggcaaatacgataaatctcatcagcatctacatcgaaataatgatgtactattatatcacgtacccccatcacatacctccatggaatctccggatattgagccaataattctttgtttgtcaccttatccagatttttaatgctttctccaatcgcagtcagtttcatgcagatactatccagtttcatcataccgctttcactcaatagaaaatcatccggacaggagatatccgaaaaacgaaaacttattctttccagagatttctgtatcaaatccaatatatggaaagcgatcaacgtgtcatacataaatgccctccctctgaattctttcacgtaaaaatgaatccattctatctcgcaggcgtacaatatccactttgcagcccaataattcttccaactcttgctttatacccgctaaagcgaaaaagccatgcagctgaccttccacacacacatccacatcactattttcagtctgctcgccacgtgccacagacccgaaaatacccatacgcacaatgccatatttatgagcattctcagccatatacttacgcaataatgcaatgtattcagatgtcgttttcatatttttcctccaagtaggttttcgcaaatatacaatttatttttcttcagacaaaaatttctcattaaagaatttactcaaagcatccccattatctccctcacttttcccttccactcccccagttcacgttccgcctcccgtgacagcggcgggttgacatacctgtaaaactcgatacgcctctcatagtgttcttctataaccgccttcacctcgaaaaaaagaagaagcgtcatgttattttttttcttccaagctggtaaaaaagccattagccacatggagcttacgctccaactcccgtctgtgcagattcaactggcccagacgtttcactacctcggcagccaattgccgggcctgatcaacaggattcaaatgttccatcggattaaatcgtatttttttatatgaatactcatttacatgtcctcattcaggacaaaaacacacgtatctcggttattatatcgaactttgtaacattgaaaaccaataacctgattcataaatattagggcttgcaaacttaataaataaaaacgaatgaaccaatttaaaatgtcactgtttctgccaccgatatcaccggtaaaggacagtgccaccggacgaaccgtccagccgcccaccttaacgccctacaaggaaataaccttacaggaagtgtacaaactgatcacatccagcgaacgcctgaaaacactgaccgagaccgtgcgccggacagcggaaaacggggatgaaaaagcctatcgtatgctcaagcagcagacactgccctacgttaccccctgcggtgtcttttcctaccgcaaaagcgacagcctgaccggaccgtcgggcttgattgtggtggacatagaccatcttgattcccgtggggaagcggaaaagctgaaaagacaactgttcgacgacctcctcctgcgccctgtactggcattcaccagccccggcggacgcggagtaaaagcgttcatcccctacgacctggcacgcatacccgacaccagacagaatacctccgaaaacatccactgggcgatgaactacgtacaagcaatctatgacagccacccggacggggaagataagaaaacgagccgctccggcaaaggcgtggaccgttccggcaaggacctggtacgggcctgtttcctctcgtatgacgaggaagcattgatacgccgggaaatttaagaagaatagaaaagcatactcaaaagaatgccggacaaaatttaaacaggcactcaaaaaacaacaaatatcatgaacatgaacaatcctttagaaaacttgcggcagctgaccgaagctgtccgcatggcaggcgcggatatcgctcccacctacattgaatatgtacaactggctttcgccatcgcaaacgattgcggggaagcgggacgcaatgatttcctctccctctgctccctttcctccaaatacgacgaaaaaaatgcacaagcactgttctcgaacgcgcttcatgccgataaagaagatatacatctgggaaccgtgttccatctggccgggcaatgcggagtgaagatttccggcagcgccggctctcacaaggcagggacaatggggacagcagggacagccccggattttccacacacgtgcgcgcgatataataaggtggaaaatgacgtttccgatgataccgacgaagaggaacagctcaccgaaggctccgagccttattcccccctgcctacctttccacaggactacgtgtggccggagctgctggagaaaatcatctccttcggtaaaaagcccgaacagcgtgatgtgttgctcctgggagcgtttaccgtactgggcgcctccctctcccacatagtgcggtgccagtacggccggaagtggcaggccccctgtatgcagactttcgtcgtggccccgtccgcctcgggaaaaagcgcgttgacgtgggtacggctcctcatcgaacccatacacgacaagatacgcagcgaggtgaaagaggcgatgaaaacttaccgccgggaaaaggctgcctacgactctctgggcaaggaacggaaaaatcaggaagctcccgcattgcctctcaaccggatgttcctcatatcgggaaacaacaccggaacaggcatcctgcaaaatatcatggattccaacggaacgggcatcatctgcgaaagtgaggcggacaccgtatccaccgccataggaaccgaatacggaaactggagcgacacgctgcgcaaggcgttcgaccacgaccgcctgtcctacaaccggcgcaccgaccgcgaatatcaggaggtgagcagaagctatctctccgtgctgctctcgggtacgcccgcacaggtaaagcccctgatccccacggcggagaacggtctgttctcccgccagaacttttattatatgccacgcgtcacccagtgggcagaccagttcggcgaggatgaggtggatgtggacgaggaattccgcctgatgggcaacgaatggaaaaacacgctggacgagctgacgcttcggggattgtttaccctgaagctgactcatgcccagcataaacagttcaacttcctgttcgacaagctgttccatcgttccggcaagatcaacggggacgagatgagcagttccgtcatccgtcttgccgtcaatgcgtgccgcatgatgtcgatagtcgccatcctgcgaagcctggaagacccttctctggtgaaacctgacgcgcatatttcttccgataatctgaaggaccgtatcatcccgcgctggaacctggtgattacagacgatgatttccatgccgtgcttgccttggtggagccgctttatctgcacgccacccatgttctttcgtttctgtcctcctccgttatcaagcgccggagcacggcggacaaggatatgctctttgccgagatggaggacgagtttacccgccggatgctgctggaaaaagcgcacgacaggaggatacctgaatccaccgcgctgacctggctcaaacggctcaccaaacaaggggcgctggtgagtgtggacggcaagggaacgtatcacaagaactgacccggctctctatatgtacacgcatatgtgtgtgaggaaaaaaggggctgtccccactgtccccgtgtccccgtcgctgctcagtgcggccgttgttcccggatagcaaaaatcgtttgtggcagttctttgggattgttcggaaaactccggataaactttatatacgacactccatgccggttagtataaaaacaatcgggcacgctttatgccgaaaggggatttgaataatttgcccatgtgtcaatgtaccgatttattgatttgctgctatgtgcaatttaccaatgcgccaatgtgccaatcgggtcgcactctataccgtaggtgattggccgttggttcattatcatcatctatcaaactcacgttaaacaagaaaccattcatgaataagaccgaaacagcccttctctattttccggacagtacgccgaaagtagccgtgcgtcatctgatgcgctggatcgcccggtgcgcaccattgctccacgccctggaagccactggataccatccctgtcagaaatccttcacctgccgccagttgcaactcgtctacctccacctgggagaaccgtgattccccctgggatctgccacagactgtccgagaactcttcctctctctttgagcgtggattacgcggaaagaataaagagggaagcgtgaaatccgctctgaagtcaccacatgacgcaagtgctggccgagttcccggacagtttccccaaagggtcaaaaggggtcggaaggggtcacgccgcacggacgtgaagttatctttgcagtgtcagaaggaagaagccgcaccccggcacaagattacaaaaatcctggtacaagattccgcggatcttgccccaagtttcaccgaacgccgcagcagtgtgcgccttgctcctacctgacacttttccgataataataaccctttaaaaacaaaaacgatgatcaactacagtatctcactccgtgccaatcccagtgaccaggatgctcccaagaaggcttatgccaacgcccagtactcagaaatcatgacactggacaagtttgccgagcatatctcgactcacggctccaaatacaaccgtgccgacatccaggccgtcctgatccaagcggtggactgtatgcgggagcagcttctggcaggacaacgcatccagatgggcgatctgggcactttctccattcatatcaacagcatgggagccgaatcactggagacatacaatcccgccatccatgtggaagacctgaacgtgcgctggaaagccgggacccgtttcctcagcttgctgaaagacagcgtattcaacctggtccctacccgaaaggctgccaagctggtggttaaagccctgaaagcggggaaaaacaccgtggacctgacgggagaggcttccggaccagatgacaagacggaagaaaacgcctgaactttccgggcttctgaagtctgatagtattttgtctttctgaaatgaaacggttgttctgaagtagacctgtatttctgtaaagatctgcctttctgaaataaaactgttgttctgaacaaagtgaagaatctgaatgcaatcgtttttatgcccacagattcctcgtctttgtccggaatgacagaaaaaaacaaatcctttaaaacaaatatccctatgaacaattcaaagaaaatcacctggaagcaaattctgcacgccattatccaagctgccatagcagcgctcaccgccttgggcgtaaccagttgcaccactctcttttaaaaagccccctggcccatcgcatgacactttttaatttttaattccctatttcaattcaaccatgattcaagaaactttccctatgataatcggtgaggaagagatcccgaacgaacgtgctctcctcactcaagaggacggcccgatgatggcatcctccgcttccgtgaaatatatcgtcattcattgcagcgccacacgctccacccgggattacaccgccgagcaactgctccgtgaccacaagacgcgaggtttccgcacggtggggtatcatttttatatccgtcgtgacggaagtgtgacccagcaccgcaaacttctggaagtgggtgcgcactgccgcccctggaaccgttgcagcataggcatctgctatgagggcgggctggatgcggacggacgtccggcagatacccggacaccggaacagacggaacaatttattttgttgctgatgcggatggtgaaaatctttcccggtgtccggataaggggacacagggatatgccgggaagtatcccgaaggcttgtccgtgtttcgatgcggagggggtattcgggtacttggagaaataataaagaaagtggcaatcaccatgcagtttcttctttgggggaaactgcatggagaatgcccttacgtatgatttgtttttctttgtagaaaggttttacaataatgaatttactcaatctacagactaccatactaatcgtatacgatagccctatagagaaccgacattgacatcattctaatttaccctacccaccattcatctttctacaaaacagaagcaaatcacctagcagtacaatcaatcgtgcacaccgttacagcttatcaatttcttccgctgaaagtccggcaacccggacaatatccgctatggaaaaaccgttctctttcagtttacgggcgatttccaaacgctccttcaaacgtccttccgcctctccttccgcttttccttccgcttttcctattgcttttcctatcgcttttccttccgcgacagcctgttcacggatatcattttccacaatacggctcacgttataacggtccaccgccttatcataagcgatacggtcaccctcagacaggtgagccttggcggcaaggcggtcaagatggctgaaaacctgttctttcagcgcatcgggcattctgttccagttgttcatattcttcagtgcatacattagtttatcggataaagtagaacattcgtccagttccttcgtaaaataaggaaactggagataaatctgacggaaattccggttcaccacacgaccgctgtcccggtcggaaaccaccgtgtcggtacggaacttgctttccagaccatcctccttgaaattcatcaggaaaatgccgtacacggcaggaagcctgtaacggagaccgtaagaagcctcttcttccctgagcagaccgcaatccccctccaacggagtgtcgggaacacatacctctttagaggacggattctccatctggcggctcaccgcacggcatacataatagagcgtacggtccaggaaatggctgtgccaacgattctgcatctccacgatgatgtactcgcccgtagaggtacggcagtaaaggtcatagatgatacccttgtcgtgaatattctccgaacggtcctccttgtccagaaa

SEQ ID NO: 3983 - DNA, 435 bp, Unknown
  gut microbiota DNA sequence
atccttcgtaaaataaggaaactggagataaatctgacggaaattccggttcaccacacgaccgctgtcccggtcggaaaccaccgtatcggtacggaacttgctttccagaccatcctccttgaaattcatcaggaaaacgccgtacacagcaggaagcctgtaacggagaccgtaagaagcctcctcctccctgagcataccgcaatcctcctccaacggagtgtcgggaacacacacctccttggaggatggattctccatctggcggctcaccgcacggcatacataataaagcgtacggtccaggaaatggctatgccagcgattctgcatctccactatgatgtactcgcccgtagaggtacggcagtaaaggtcatagatgatacccttgtcgtgaatattctccgaacggtcctccttgtccagaaa

SEQ ID NO: 3984 - DNA, 3686 bp, Unknown
  gut microbiota DNA sequence
gtatatgacaagttcgacacgctacccggaaagttgcatctgtgctgctgggcacacgtcaggcgcaactttgtggaagcggaaggaaatgaccctcccagagcaaggcatgcacttggaaaaataggcggactgtatgccgtggaggagaaaatcagaatggaacatctggaaggggaggcggtggtaaagcttcgccgggaaaaatcgtaccatattatcaaagaactggaaaaatggtgcaaggaggaatatggacatacggtcgataaatcgcctattgccaaggccatgttctatatgtacacacgctttgaacaactgtccggatatgtcaatgacgcacagttctgcattgacaataatccggtggagcgttctataaggccgttgactttaaacagaaaaaatacgctcttctccggatcacatgaggcagcacatgcagcggcaattttcttttcactgatgggatgctgtagggaaaataaggtgaacccaaaactatggatgcaggacgtgctgattagggtacaggagaaagaaagagaagagaaaaacgattacgccgatttactgccatttaattggaaaggataaacaggaaagctataataaagtcaaaagccagacgaagcatgtctggcttttgactttattatagcttggagagaaacacgcacgaggccgaatgcttacgtttcactaaagtgatgaaaccttatcaccctagtgatgagcttgtgccacttgggtgatgaaacttcatcacttaagtgaaacactgtacttgtcaagaggagaacacgaacttgtcctgatgaaaacccttttacataaggatgtttacgcttagtcacttttcatcccgaaacgccggaaatcccttgacaaaggcttttcaatgtgctatctttgtggaaacaacaactaaaaaaacaataaaatcatgatgaaagaaatgattcggaaggtgatggaatggtgcaagttatggaacggtgaagctgcaacggcgaaacaggcggacccttcttcggataaaagggaaaaagaacaggctgcggataaccgggaggtgcaagaccgtctggagaactacttgtggaaacactatgagttccgtttcaacgtgttgacggaacaacccgaatattgcgcgaaggggcaagggacggacacaccttataagatggtgactcagcgtaccttgaacaccttgtgcctggaagcgcaccgtcatcgcatcaattgctgggataaggatgtgagccgcctgctccattcggaacgcttggaagactatcaccctttccttacttatatggatacactgccccaatgggacggggtggaccgcgtcactccgctggcgcagcgcatctcgaaaaaagccttctggataaacggcttccaccgctggatgctgggaatggccgcccagtgggcaggacgcatggaccgttgcgccaatgcagtggcccctatgttggtgagccgtatgcagggcaagtgtaaatctactttttgtcagttgttgatgcccgacgggttgagagattattacacggacagttttgagttgacggggcagtcgggctgcgaacagaaactggcgcagttcgggctgattaatctggatgagtacgaccgtctttctcctcaaaaactgccgttgctcaagacactgatgcagatgaagaagttggatttccgtaagtcgcaccgttcatcctacagtcacctgccccgcatggcttcgtttataggaaccagtaatcataaggatttgctgaccgaccccacgggcagtcgccgttatctttgtgccgaggtgaaagagaaaatagactgcacgccactggagcacaagcaattgtttgcccaattgaaggcggagctggagggcggcgagcgttattggttttcggccgaagaggaagcggaactgcaattgcgcaaccgcgagttctatgccatgcccgtagagcaggaggtgttctaccgttgttttcgcctgcctgaggcgggagaggagttcaaactctattcggcctcggtcattttcaccattttgcagagccgttatcctgcggctatgcgcggcatgacggtggtgcgtttcggcaagatgatgagcgccatgggggcggaacggatgcatacggagaaaggaaatctgtacaaggtggtgctggcggcataattcccgtccatcaggccggctgaaaggactgacaggaggctgaaggggcttctgtcagtcttatttgttgtgtgacagtgtgttaaccgtgctgaatggactgaaggcggggtgcatgaatgccaaaaaacatactataagaatctttttaaagagccgttttctcaagaatttgtactaagtttgcaaccaaactacataattaaaaaaactatgattaacagatttgtattgaacgaagtatcttacttcggtccgggtgcgcgtgaagtgcttccacaagagattaaacgtttgggcttgcataaggcgtttgttgctacagacaaggacttgattaagttcggtgtggctgataaagtgttgaaagtcttggagaatgcaggtattccttatgaaatattcagtgaaatcaaaccgaatcctactgtaagcaatgtaaaggcgggagttgaagcttttgcaaaatcaggagcggactttattctggctatcggcggcggttcgtctatcgatacttcgaaagcgattggtatcatcactaataatccagacttcagtgatgtggtgtcactggaaggtgtggctcctacaaggaaaaagtcagtgcctatcattgcactgcccactaccgccggtactgccgccgaggtgactatcaactatgtcatcacggatgaggaaaaccataagaagatggtttgtgtagacccgaacgatattcccgccatcgctattgtggatgcggaactgatgtacactctgcctaaagggctgactgcttctaccggtttggacgcactgacccacgccatcgaagggttgataaccaaaggcgcttgggaaatgagcgatatgttcgagatcaaggcgatcgaaatgattgcccgttatctggaaaccgctgtcttcgagcctaccaatgcggaagcccgtaacggtatggccgtggcacagtacattgcaggtatggcgttctctaatgtaggcttgggcgtggttcacggtatggctcatccgttgggagctatcttcgatattcctcacggtgtggctaatgcactgttgctgcctgtcatcatggagttcaatgctccggctgctttgtccaaatatgtagatatcgccaaggcgatgaatgtgtacaaggatggcatgagccgggaagaggctgcgaaggctgctgttgaggcggtgaaggcattgtctgtcaaggtgggtatccctcagcatttgtctgaactgggtattaaggaagaagacttgccccgtctggccgcttcggctattgccgatgtgtgtacgccgggcaatcctcgtgaagtgacggaagaaattattctggaactttacaagaaggctttctaagcgtaattcttttgtaataaaagcataggtggtgtgtggatgtgcagggcatatccacacactttttttatctcctttctgttttttgaattgttatgtgagtttcatcttt

SEQ ID NO: 3985 - DNA, 192 bp, Unknown
  gut microbiota DNA sequence
tagatttctcagggtcgttgtagactacgacgttgataggatgcaggtgtaaagatggagacatcaaagccgagcattactaattgcccgttcactttccttatatgtcggatggtgtatacctttagtttttactacagaatgaaattacgataacagctcaacaatatgtcaaccttattcaggtggcta

SEQ ID NO: 3986 - DNA, 288 bp, Unknown
  gut microbiota DNA sequence
acgctccctttaaacccaataaatccggataacgctcggatcctccgtattaccgcggctgctggcacggagttagccgatccttattcataaagtacatgcaaacgggtatgcatacccgactttattcctttataaaagaagtttacaacccatagggcagtcatccttcacgctacttggctggttcaggctctcgcccattgaccaatattcctcactgctgcctcccgtaggagtttggaccgtgtctcagttccaatgtgggggaccttcctctcagaaccc

SEQ ID NO: 3987 - DNA, 1275 bp, Unknown
  gut microbiota DNA sequence
acccgtacagaattccaaaaaatatttttttttaatgaagtcataaagcaaatacaactatgccttcaaatttaatccactcatcaaactctgatcactccacagatatccccattttccaaatctcccaatcgtttcaataccaagggaaaaaaggtaatcacggacagtcttacgggcttcataaatattatggtcaaaaatgacattggcgtatggttcgaaacggatatcagtaaaaaggatatcttcttgttttaaaatgtttaaagaaacaagttttcccactgaacgtgccaacagctcttcccgggtatattcattacggttacaatacacttccatctgaagtgaggaacaaccttcgggaacattgtcgggcgacttcaaggaaggtgagtagacgcgagcaggaagaatatcctcatcataaatgtaccaccaaagataaggagggatattcttcgtcttcagtccgaccgatatctgataaccacaggtacagtgtaactgtgcaactgcattgcaaacatcaacaggaacgtttttcagcatcttaattacctcaggaagcggaagactgctaatcaaacggtcaaattgatattcatcgccttttgatgtacgaagaagacgattctctacatctatcgatatgacctgttggttataacgaatatcctggttttctaccaaagcagacaaaaactgcttaaatccaccttttcgtggataacgcatctccttactataataggttacaggagtttcggatgtattgcacccctgtatcacttcttcaacggaaggctggtataaacggcttccttcccggctgcccatccatcttgtttccaaatcctttgcctcagtcatccaatatttcttagtataaggaatcggaaaatgttctgcaaaaaaatgaccgaattgaagccgtaaccattggtcgtaattttgtatctgagaagagtcaatatctgtcggacgggataaaaaatctcttactacggcatccttcatcttctgactaagcggataaagattattttgggccggatgctttatccatattccctgataaagattatatgcattaggaacatgtctgaatacctctccggctccatccataaagattctatttacttgttcatctttagcaaaggaaaaatgaacaaaacggtcaaaacggaaaccgtcaatggtaaagttaccgcaaagacctccataggttgaatctttttcaagtacaatacacgaccgattactgct

SEQ ID NO: 3988 - DNA, 477 bp, Unknown
  gut microbiota DNA sequence
tatagcctagccagtctgaacatgaagaacttcagatcagccacccttcttaactggcttcgaaaagctttgattttagcattgaacgactccgctgaagcatttgtcaatcgttcttcaaaataatttatgatggtcgtactatggtttgaaaaggtatcaagtaccttgttgaactccatatagtcaaacttttccacttcattgtaccatcttgcgagatttagccttgcttcatcgggacctgacttcttgttgaagatgtctgtcagtttcatgctaaggctgtatccttccagaagcttggggaatttatcaaagagaatggcagccctggtcttttgctgttcattccatttgctccagtgtttcagtataatatgcttgcttctgcttactatctgtggcagggtttctccgttctccattctttcaggctcccatttccctattctctccctttccgccttactcttt

SEQ ID NO: 3989 - DNA, 524 bp, Unknown
  gut microbiota DNA sequence
ttatatttcaatttctttatttgggttatttgcctaaattttaatgccaactttgtggcatgactttcacataattcgtcgtttcatcccatatataatctcctgtataattgcagttgaacagataatccgcatcacaacgaagtaatatccactcattggaattttcagctctccaatataaatgtaagactggaatggcatattttactccatcatgtcggggagcaagtcttttaactgggaatttacaactcataatacccttccagaaacgtgttcctgtcggaatgtccacagaatccttaccgatttcatctttccattcctcatcgtttactgctcctttctttttggtacttggactatatgaattggacttcagcttgaactcacgttcccagaccgcttttatttcgccccttagcgccttttccccccggttggataaagtatataccagattccacggatcatcatcagggaccggatatgcaagaatagaggtatatccctgtccttcc

SEQ ID NO: 3990 - DNA, 1314 bp, Unknown
  gut microbiota DNA sequence
ccacgcgaccgggggcaaataccctctgtcgtggcttcgtttttttgtgtttaataaatgattggctctgcaaagatagaaaaatatttgctatgacactgtttgagatcctaaattttaatagggagcttctggagcgtctggccgggacaggttacaagccggacgactacaaatatatcgacctgtacaaggagtacgaacaaatgcgccgcaaaggtgaaaaggtgacgtattgtgtggcctttctctcggccagacatggcgtttccgaaagaaaggtgtatgagattctcgggcggttcaaaaaagaatgtacgttccatgcagtatgaaaagagtggaatttttgctttcatggggagaagaaatgaactttgtatccgaaacataaacactcttacacgacagaatgattacagcaatgaaaaagtaccactacagtcaggccccgcttccttttgtgggacagaaacgcatgttcgcatcggaattcagaaaagtcttgaagcgtttcagtgacaggacagtgttcgtcgatctgttcggcggttccggactgctctcgcacatcaccaagcgggaaagacccgatgcaaccgtaatctacaatgaccacgacaactaccgcgagcgtctggagaacatcagccggacgaacgccctgctttccgacctccgccgcctctcagaaggaatcccccgccacaggatgctctccaagaagatgcacggtatgttcctggaacgtatccgccgggaggaaagcaccggctttgtggactatctcaccatctcttcctccctgctgttctccggcaaatatgccaggaacatcggggagctcggaaaactgaatttctacaacaatatgcgcctgagcgactactgctgcgagggctatcttgacggactcgaggtggtatgctgtgactacagggagctggtggacaggtacagggactccccggatgtggtctttctgatagatcccccctacatggcgacggacatcagcacatacaggatggactggaaacttacggactatctggatgtcctgctggtactggaaggacaccctttcatctatttcacttccggcaaatcccccatactggatttctgccggtggatggaggaacatcctgaaaccggcaatcctttcaagggggccggcatatccaccctcacggccagaatgaactacagttcgtcctatacggacatcatgctgtacaaggaaatgactgaagcggcctgaaacggccacaccaccttaaattccacttgaaggtgtgcaaaatgcacacc

SEQ ID NO: 3991 - DNA, 1083 bp, Unknown
  gut microbiota DNA sequence
gaggaaaatgttttttcatgggcagcagcgaaaaggtgctggcattgatcaaacggcgtgcagcggtggatttccctcacatcgaagtggaaacctattcgccaccctataagccggagttctcggaagaggataaccgggcgatagtcgaagctatcaacaaggcaaatccagatttgctctggatagggatgactgcccccaaacaggagaaatgggcgtacacgcattggaatgaattaaaaatccattgccattgcggaacgataggtgccgttttcgatttttatgctggaacggtaaagcgtgctcccgcctggtggcagaggcattctttggaatggtgttaccggttgttgaaagaaccccgccggatgtggaaacgttacattatcggcaatctgttgttcatgtggaatatatgtaaggagtagcttgatgaaaagaatcttattgcttgttttttggtgtagtgcttccttatgggccgatgcccaggcattgctgggaactaccggactgcttcatgctcccacggctgatatgcagcgtgataaaacgttcctgtttggtggaaactatttgaatactcatccattatccacccattttcgtagccgtgaggtggggtataccttcaattattacataaacataacgatgtttccctggctggaggcgtcgtatatctgtacattggtacatgcggatcacggctctgcttattttccggaacagtcttggggaaaattcacgaatcaggaccgggctttcagtgcgcgtctgcgcctttggaaagaagggtggtggaaggagtggactccgcaaatagtccttggtctggacgatcccacctctcatgccgatcatggcggtggggaactggtgtccggtaatacaagcggttccaataattacgctacacgctattatctggctgtaaccaaacatctgaatttacagaacataggtgaatggggtgttcatgtcgcatttgtatatggtaatgccaaaggtatggagcattataaacgtccttcattcggcacaaacttccgttttgcttttcccgaaacatctata

SEQ ID NO: 3992 - DNA, 479 bp, Unknown
  gut microbiota DNA sequence
tgctataccgttgtagttatagttccctatgctggcgcgtccgttaaaaccgaagtcccagttcttatatgatactttggagttgaatcccataatcacgtcagcggtgggcttatgatactggtataagtccttttcagtcacttcaccatcaccgttacggtcaacatagactccttccatcgggttaccattcttgtcatatacttgttcaaatacataataagttccgggagcatagcctacgctgtgtattttaatggtcttgccaccatcacctccggtcgattcaaagcgtttgcccggtgagtcgctgttgtcattgtagtccagtttggtaatttcagttttgttccaagcgacattgaagcctaaatcccagttccatgtagaactaacgatgggttttgcattgatggcaaattcaaaaccggtatttttcaatgaaccgatattggccaccacatattcggcaaagt

SEQ ID NO: 3993 - DNA, 3290 bp, Unknown
  gut microbiota DNA sequence
ctggctcatgccctcctcgaacatgaccctcgcaaacgttttcccggcattgcagccgttccggactgccgcatcccggtatatttcctcaaatgttttcatcgttctgtttttttgctcttcatatttcatgtcccgctgccggacacccggtcttctgcaggaattcgttaaaatcattgcacctggggtacaggcgttccgactcgttcaccagtatcacgtcttcaggaaggaagctccgtatctttcccagtgccccgcgtcccggggcgtcgttgtcgagaaaggcgtgcaccttctcatactttgaaaggaaatcctttgaacggtccacaatggccgtggagttcaatacgcacacgtccagctttccaagtgcgggcatctccggatgctcccttgcgtactgcttgaaactgagaaggtcaaaaaagccctcgaaaacggcgcaggacctgttgccttcactgatgcaggtaatatccttggcgtaggcgcaccccttgaacatgctgttccgcaattcgaaaccccggtggtcgttggcgaatccgagcgcgtatttctcacgcggattcctctcgaaacagtagtggacctctacacagtatttacggacaatctccccgtcaatgccacgtgaggcggcgtagtcaagcagatgcctgttctgaacgggaatgaccttcaggacggtcatcggggcggctgccggaagccttcctgacaccgtttccggtttccgtatcgaaggcatggaaagctgcggggaggtcctcatccttccgagttccttcatggcctgcggaaaggagcagttttccacacgcatgaccagatccaccgccctgccatacgtaccgtccccaaaatcataccagcggttctcctccctgaaaaccttgaagctcggggaagtatcggaacggaagggggaacggtacatgtcatagccgccataccgtctggacggctcgtaaccgtaatgggagaggatgtctcccaacgggattgaattggcttcctgtgatgtcatggttatgtcgctttaatggtattttccgtttgattcctgccggtcctcacggatgggcaggatgagttctttaaatttataaatttattcccgccatcctcgcggacagcttttcagggtaattccatcatattgtcaacacggcgtttccggcttctatgcggaaactgcctgcctcatacggctcaggataaacctggtggggctcttgatcctcttgttcccccaggtttccttcagggcggtgtccagcaccatgggcgccacggaggcgagctgcaggatctcctgctggtccctcaccgcgacccccagaagctcgagcgtcttgcggcggttgcgcatggtttcctcctgcctcctctgccggtcggcctctccgtactcggcgttgtatttggcgatatagttttcaacgagaggatacaggtagttccccttggtcaggtggaaatcactctgcaggatatcctcgatcgcctttccgaccgggaattcgggataacaggccgaaagccggtatatccagccggtataatactcgtccactcccagatacttgagctttcccggaagagaatccctgtcctcatccttctccccttcaccggaggcttgtgccggaggggttggggaggatattttattttcttttattttatacggtttattttcgcgagttttgtccgcttcttcgcgaagttccttttcagctgcgaacaatgtgcgtatgcgagtcacagcctgccggatttccttcccatcctccggaagggaagccggagatccgcattcatgtgccggggtgtcctgctgttcacaagtggcatgcggtatggtggcggactccggtgacggttccgtttccagcagaaggatgctttccggaatgccgggcttgcggtggatggccttgcagatgcctacatacagttcctgtatctcctcactggtcagaatctgtttgtcctgccacagttctttgttgaaaaggcccagttcggcgcagtagtcgatgatgtccgaaacctttttctcatccatacgggaatagtccgagatgtcgaacagaccgtcggcatccataaccatatagcatccctcgacacggtagatctcgtttacaatgaaatggaacacaccccagccttccattccaaatttattttttagtctctttactttcggatcatagaaatgatcggtttcgaacctgaaataggtgaaaccctttttagctgtttttggcataagctttatatttaaagtggataatacatcagctggccgaaagctcgaactccttgggaatgtcgggatatcgggagagcagaccgcaggatctgacatgatccatatagttccgctgtatgtcagcggaagtcaggatgcggtgtttttcgtatagctcaccgttgaaaagtccgacttgtatgcagccgttgacaattcttgtgacatcttccaaagaggcattccagtaagaggccaccgcctgcgccgtttcctcgcaccacagcaggaggtagctcccgttgtggagtgtctcgtttacgagataccggtaaatgctgtaaccggaaaaaccgtattggcgggtgagtcttctgactttcatgtcagaaaattgggaagtgctgagctcatagcaaggatgtgttccgcattcctggcgccgtacagcccgtgacaggcggcggcttgttccgtttgtaaagctttgggtattcatatatgataatgtataatgtttactgttaagaattatgtatatgacggaccgggctcccactccttgggagaatgggaccggtgattatctggccggaggaatatggtgcttcttccggacgaactggacataattgtggacggtcttctcgcagacgtgcggaaagtccggataatgttcccgcaagtagtcgccaatgcggctgctggaaatggagggaaaactggtaaggagggatgcgacggcctgctcgtaggcatggagtttgtaatgccgttctttgtgctggaggacttcctccaagcttagggattgaagatgtcgtaccgtattacgggacacaccaagacgacgggctgtccgcgcaatgttgattccccgtgaacgaagatcaaggatattgctccataatatgtatttttctgttaaatttgccgcatccataatctattagacagatttcgtaactgggacattccagattacgaatctttgatgcagctaaattaccgccctcat

SEQ ID NO: 3994 - DNA, 185 bp, Unknown
  gut microbiota DNA sequence
tgtgccattacgggcatgggagcggttatgatacgaccgtcggcgagccggtatttaggacggatgatgcgtttcacatagaatcgggcggggctgacagcatactgttcgctcacttcctctcccagcttcgtcgctccctccaacgaaaggccttccggcatgggaatgataatctcctcacg

SEQ ID NO: 3995 - DNA, 80751 bp, Unknown
  gut microbiota DNA sequence
cctcaaaaggaaaaagaaaactaatttttaaaggtagaactacaatattcatgttattgaagttaaaaaacttacccttgttggaaagccatcgagggctgaccactttgccttccggcaaactcctgatcaacaccatcaatgcccattcctacaacaccgcccagaaagacaagctctttgccgaagctttgcagcagggagatgtgttaatccccgacggagcaagtattgtcaaggcgtgtcgttggctgaatgcaagatccaaacctacagagcgtattgccggctggaatctgttcgagttcgagatgaacaagctgaatactatcggaggaaaatgttttttcatgggcagcagtgaaaaagtattggcattgataaaacagcgtgtgaaagtggattatcccaacatcgaagtggaaacctattcgccaccctataagccggagttttcggaagaggacaatcgggcgatagtcgaagctatcaacaaggcaaatcctgatttgctctggatagggatgactgcccccaagcaggagaaatgggcgtacacgcattggcatgaattggaaatccattgccattgcggaacgataggtgctgtttttgatttctatgccggaacggtaaagcgtgctcccgcctggtggcagagacattctctggaatggtgttaccggttattgaaagaaccccgccggatgtggaaacgttacattatcggcaatctgttgttcatgtggaatatatgtaaggagtagcttgatgaaaagaatcttattgctcgttttttggtgtagtgtttccttatgggctgatgcccaggcattgctgggaactaccggactgcttcatgctcccacggctgatatgcagcgtgataaaacttttctgtttggtggaaactatttgaatactcatccgttatccacccattttcgtagcagtgaagtggggtataccttcaattattacattaatattactattttcccttggctggaggtgtcgtatatctgtacattggtacatgcggatcatggctctacttatttcccggaacagtcttggggaaaattcacgaatcaggaccgggctttcagtgcgcgtctgcgcctttggaaagaagggtggtggaaggagtggacaccgcaaatagtccttggtctggacgatcccacctctcatgccgatcatggcggtggtgaactggtgtccggtaatacaagcggttccaataattacgcaacacgttattatctggctgtaaccaaacatttggatgttcagaatataggtgaatggggtattcatgccgcatttgtatatggtaatgccaaaggtatagagcattataaacgtccttcattcggcacaaacttccgttttcagttactcggtgaccagcctttgattaaagttgtaaataatcttaacctgatggccgaatatgacgcccgcacagtgaacatcggggcacactaccagctttggaaagaccacatcaatctgattgccgaattgaacaacgggaaatacttctctggtggcatttacttcaaaatccatctgaaatgataaaaaagattatccgattaggatctccggaatagattttactctacaacattttgaacatcgggtgtaagggagatattgttgcaagatttatcgagtcgtatttcataggcgttaattaatgagaaacattttggatattatcattataaattctatattcgcatagaatttataaccgatataattatggaaactacagtattcaaccccatacagaggcatttgttggaaatgttttcttacgataaatctcaggaaggtctggaagaattgaaagaggtgctctttcaatattattccaaacggatgaatacaaagttggatgaactttgggataagggaattcttgaccagaaaaagctggatgaaatagctgaaatggatatccattcattaaaataacgtcaatggctagctggttcttggtacgaattgtcttattcaaagcattcctcaaaggagtcgttaccatgtcttgtggcaatcctttgtggacggaaagaacaagctctgtgtatccaatgaaatattggaggaatatatagaaattctgcaaagacttaccgacaatgaaacggcggaatatgtggtgaaaaccatattgaacagtccgtttgttgaattgataactccattctatcactttaatctgattacagtcgatcctgatgacaataagtttgtggattgtgccatttcggccaatgcgcactacattgttaccaacgaccatcattatgatgtgctgaaagatatagattttcccaaagtgaatgttgtaaatattcagcaattctgtatttatctgtcacaagaaaaataatttttgagtaaaaaggaggatttatagttggaaataaaataactataactccatgcatcctgggtgtaaaaaaccgccatagaggcagtctccatacagaggcgctctatggcggtttcccgtttccccacgtttaccgggaaaaattcccgtctccgggaagccgggaggttactcttccattttgagcttgcccagttctttcaggatgtgctccatggcttctttgtaaacctccggtttctctttttccagccatttcatcagtttgaagtaagaatttggagtcacaatctttccgtctcgaattttggtggcggtggatcggcctattgcacctttgtcgttcaagttgctggggtttaaatcgcttcttcgcacggcattactgatgcaagtgctgatgatctcaaatttttttcatgttactaaaaattaaattgttaaataataatttgtaagtagctatgattatgctatttacaaaatgtctcggcaaagataggaaatatttattaacaattgcctgtttttgtgagcaacgccctatttatattttgcgttcctttgcgttatatttatactaacacacaaaagaaatggattatacagagcagtttatccggctgaattgcagcttgatgtcggattacaaaatgatgaagctgaatgccgacatgaaatgcatggggctggggttgtatcttgaaacgatattgtttctgcgaaaacagcaggaatacaaacatgattttaacgaactggatttgctggccgatcagtggggagctaccgtggaaaatctgcaacatcttattaaggacttcgatttgtttctcattacagaggacgggtatttccgatgtctgtatctggacgaggtgatgggatatcagagcaaactttccgagcaacgtgccgctgccggcagtaagggagggagaagcagtaagaaaagtacggtgaaagcatctgcaaaagcaactgcgtctacagcgtctgcaatagggaggggcagaatcaacgaagggaaaaacggtgatacgtcctgcatggatcgtaacggggaaatctacacgaaaagtaatgatgcgccctgcgtgtatgataacggggaagcctacctgaaaagcggtgatacaccttgcatggataataacggggaaatctacctgaaaagcggtgatacatcttgcatggataataacggggaagcctacatgaaaagcggtgatgcgttctgcgtggataataacggggaagcctacatgaaaagtgatggtgtaccttgcatggataataacaaggaagtctacctgaaaagcagtggtgtacccagtatggacagcaaggagagaatttatatggaaagcaggaatgtagatagtaacaagactgtctgcatggagaacagcaagccaatccattcggattataataaggaaatctacaaggaaaacagcacggaaagcaacgtgaaaagtagtgcggaaagtatgaaaaatacgactgcaaaaaatacaaatgaaaattcagtcaaaaatgtgattcaaagtgttgataatgagtgctatggaaagaacttgcaagcaagctttaagcaaagctttataagagaagaaaagaatagaggagagaagaaaaacaacaataacaaagaaaaagaaataattgctgttgctgctgttgataaactttcccgattttccgaattgtccgaaacgataccccgatgggaacaatgcatcaatgaagctttcattactcagagttggctggaggctgtggggatgatgtcaggtttgaaggaactctttttgaacaatctttcttttattcgtgatctgttcaagaaacatgtcgtggcacaaggaaacacaggaggaatcacttccgtgtccgaagccgaagcttatttcgccaactacatccgccgagaaaggcccacccgtctttttctggaagaaaagctgaaagaaaggagccggatgcagaatgaatcgacatcgctctcgccctacgaaacgtacaatccgctgaccggcgaacgttcgtattgcggagttcctcttcctgccgatgcacccccgcgccccaacggacgtgccacctgggataacctgaaacagagctggatatgacgcgcgaagaacatgcagattatgtgcggtggctgaaaagcctgccgcgcagaaaggaccatttccgtatgccttgtcccgaatgttccgcaacgcgaagcaatcccaaagatccttcgttcagtgtgcatatcacccgtgaagggggatgggcgaaatgctttcattgtgatttcgccatagcgtggaacgaggacgagatgtggaaaagagaacagaaacaacaagaccgggaacggcagaaacagcagaaggatgcaccgcagcaccgcaacacgtcgcagcaccatgatgcagcaccgcagcaccgcaacacgtcgcagcaccacgatgcagcaccgcagcaccgcaacgcgtcgcagcaccacgatgcagcaccgcagcaacgtaacacgtcgcaacgcaagccgcacatccccctgcaaccgcctgtacattacgtatgcccggtaatcaataaaaacaaacaaattatgaatggagaaatgatggaatacatggtcggcagacgaggtattccgatggacgtcctgacaaggatgaagatagaggaacgcttggaattcctgccgcagaccggcaaggaagaagcctgcatctgcttcccttacctggaggacggagtaatgaaaaacatgaaattccgggatgccgcaaagcatttcaagatggtgaaaggagccgagctgattccttggaacatagacgccataaaagggaaggaaaagtgctacatcaccgaaggcgagatagatgccctcagcctgatagccgcaggactggaagaggtggtgtccgtacccaacggagccggaggcgcgaaccttcagtggctggaccgcttcgtggagtcgcacttcgatgacaagacggaaatcatcctggccatggataccgacaagcgcggagtggagttacgcgacgaactggtgcgccgcctgggcgtggaccgctgcaaggtggtggcctggggggaaggctgcaaggatgccaacgagtatctgttgaagtacgatcttccgaggctccgccagcaggtggagcaggcggcggaaatcccgttggaaggagtcttctgccccatggacgaatgggatacgctgatggatatttattacaacggaatgccggagggagccgatacgggactggataatctggaccggctgatcaagttcgagcgtggttttgtgctcacggtcacaggcgttcccggcagcggaaaaagcgagtttgtggacgaaattgccatgcgcctgctcctgcgccacgattggaaggtgggctatttcagcccggagaataccccgctggcctatcactaccgcaagctgatacgccgcgtggtgggcaagcgtttcgaacacaaggggatgccgttgccggaagccggacaggccatccgttacctggcacagagtgtcttttccattatgccgaaagaggacttctcggtagagagcgtgcttcgcattgccgcccaactggtgagccggaaaggagtgaaggtgctggtggtggaccccttcaaccgcttcgagcatcagattcccgactgggaaacggaaacgcagtacatcagccgcatcttcgacgagttctccaattttgccgtgaagcacaaggtgttgctcattctggtggcgcaccccaccaagttgcgccgcgaaccgggaagcaaacgctggcctgtgcccacgctgtatgatatcaacggctcggcggcctttttcaacaagacggattatggaatggtggtagaccgtaacgatgagctggggcaggtgctggtgcgtgtggccaaggtacgtttcgaccatctgggcggaccgggagatgcttttttcgccttcagcacttacaacggacgctacactcctaccgaggagaggaccttggatcataatccgcccgaaccgaagtgggagcataccaatttcctgacagagaagctgaagcccgaacagcagggcctggggtttaatgagggggaatgaagtagttgaatgttgctgttcctgaataacttggggataggagaagggagatgtcaaaacaaaaaggacaaccccgaaaagttacagatagtaattataacacgtaaaaggatcgtatcaagctctgtatggagtaatgatacgaccctttctttagtcttttaggatgctcaaatttcagattgtaagttcatgttttcaaaaactgagttttgacactcgccttttaggtcttgtagttacagtctgtaacttctcggagtagtcattttattttgacataccccctttaaaagttgcttacaagtagatcatgctgccggcaggctttactgattactggtcattcctcagcgatcactggtcattcctcattagccattaaaatcctctccaccgttcccgttttatctcctcgcactgccgtcgctgccatgcgggcattattttctccagctctttcagtttccatcccttcataaagcgtatctcgtccttttcctgctccgtgcacaggctgatgcgcagcagttcggggtagagcacctgtatatggaaaatcttggctctccacagcagcatggacatctgccagggggtgagggcttggatgcggttcagggtgagcagcatttccagataatgacggtagaaggctttgtccacggtcatgagttggtttatcagatagttcatttttattattgttaaatgaaaagattagttgaatgaagggtcaggaaatcaaagcggaggaaagggacgctatctttggagaaaacccccttggatacagtatctttggagaagcctctttggaaacaaacggttctcattggaaaccctatctttggagaaagcccccttggatgcgttatctttgaagaaacctctttgaaaacgaacggctctcattggaaaccctatctttggagaaagcttcccttaaaagcggtattcctttacagcatcaaaacaagggcacggcttcacgggattcaagtcatgatgccccactatcaacgctttggggaacaggaggcgcagctcgcgcaacagtgccagcatacttcccttctgcatcagagtacgcgtatcggcaggtgtgcagtccgccgagagtcctccttcatagcagatgccgatagaatgccggttatggttcttgcaatgcgctcccaccttttccagaggtcgtccgcggtgaatctctccgtcacgggtgatatagaaatgatatcctatgtccgtgaagccccggtggcggatgtggtcccggcggcaagtctcaaaatccagcctccgcccctcaggggtggcggagcagtggataataatcagggtgatggttctcatgatcatcagatacaggcgttcaggccgagtgcgccggcaacggcggtggctacggtgataattactttcagaatcagtgtccaggtgtttttctttgttcttgaactcattggaattttgttttagaggttgataataagtgaattgtaatggaagccaagggctgaatgtaccccaatgaaaacggcttgtcacaggggcacattcagccttttagcgtcgtgcctttagcgttgtgccttgcttccgtcatacaggagttccgtcaggcctgtcctccgttttccggctccttcgcctctccggtaagatccacactggtctttccggctttcagcgccttcaccaccagtcgggccgccttgcgcgtggccaccaggttgaacacggcttcctcctgcaagttctggaaacgtgttccggcactccagttcacattcagctttctgacgtggatggcaggattgtagtcggcagcgctttccgctcctatactgttgatgctgatggagaaatcccccaagtcgcccagctgtatcttctgtcctcccagaagctgttccctcatgcagtccaccgccatggtgaggatggccacgatgtccgcgcgcttgtacacacagccgtggctggcgatgtgctcggcaaagcggttgatgtccatcacttccgaatactgtgcactggcataagccttcttggcggcatccgcgtccatcggattgctacgcataacgatactgtaatttaccatagtctgttaaaattaaaagttgataattgagaattaagaaacactgttgccggggaatgaagcaagtcagacgtcagtcactgtccattaaccgtcagccactggttgccgactgctgaaagaaccctatctttcacgtgtaagatcctatatcttacagctgtaagattatagatctttcgccttcatcgtcccgatattacaaagatacgatgtgcggattccggaaagttgattccggtggattgtagttgataacagttgattctagttgattattgttggaaaaacattctttcttctcgtccgtttttcgtacttttatggaagtaaataaaaagtatggaatgtatggagaattttgagatacgcacgtacggccgcaccgaactggccctgtgttatttcccggatttgaatccgcaggtggcttaccgtaagttgcagtattggattgactattatcctcacctcagggagaaactggagaagatgggcagtggcttgagttgccgtacctatatgccggctcaggtacagctgattgtgggggcgataggggagccttgaaaggggattgtgatggagtgcggccagataaaaagaatagcttccccgattgcgtaatcgatatggcaagtgaacgaccggctcctgttgacagtcgcattgaaagattggcaaggttgatatatgtgaatgaaaatgacacgaatgacgccaatcagagatataaacccaatttgcgtcattcgtgtcattcacattctggataaagaacggaatagaacctctattcccgtatttcccccttatgcaccagcattttcaccagtgtccgtttggaactgtgcgtgtccgaaacccatagcacagagtcgttttgcgcatagatgcgggcaggctgggaaaaagcatatccttttacagtttttattttcttgctccattcgttggactggcgttcgtatatgttgatggcatcattgtcgccggtagcataccagcggtcgccgcacaacgccagtgtcttgggcttgaagccgggcgacagggaaaggtcgtccagatcgatggaagcgtcgtttgccatatcatcgttgaccagtgccggatcgagcacccgtatttttttcccttcataatccgtgagcagcagatgcccttccgcatcgggctgcatggaatggctggcaaagccgttgttgcccggactgccgttgccggatgcccggcggtagcggttcaccttctggtaattttccggggtggcatcctcctctttgtaaatgctgaccattccgttcttgtcgcgtgcgaaaatcagcccgtcctttaccgtcatggcctgtgcctggaatacgggaccgctccattgcccgttgcctatgcaggtgaagtaggacagttccggcaaccggaatacatggatgcgcgactggcgttcggccacatacagccggttgtccgacggcacgatggcttctatctgacttccgaaactcttctccccgccgtcgtgctgccagctctgcaaggttcccagccgctcacctttctttatactgaacagcaacaggctgctgcctgcctttccgatgtttgcgatgaaaagggtatcccccagatgagcgacggtataaggggtgaaatcctcggccgtttccatacccagggtttccgcatcaatcagctgcgccgcctcatacgagtaataccagtaactggtataatccccgtttccttctccttccccgtttcctccgccgggagcggaggggtagccgcagatttcatccagggtgactttgctgcattgtgccgtcaggactccggacagcacaatcaggatataagcgtatattttcatgttgttcttactatattatataggtatacatttatttcagctcactcatggggatggcgtaaacgcatgtcccgtttttcacgcggtcggtgatgaacagcgtgtggcggcggatgcagaatttctcaggtgcttgcagggtgatgccgccgatggtggtatggtccttcatgatctctcccgtccggggattgacctcacagaacttttctgtgccgttggaacttacaaacagccttccttcgtagaaatccaagtcgtagggtacatttttataagccagttgcccggtgcgtttgggtgaaactccttcccgtatcccgtcaggggcgaacaggtctatgcgtttggcgggatgggtggagtagagcaggccggtctgttcgtccaccgccatgccgtaagtgccgtttgtctcgcccagatgttcggaacgtacataaatccgcggagtcactccggactgtatagcctgctcttctacaaagttgacgtagcgtttgtcgtgtatcatgaccagccctttgtagagcagcacatcgaaggcatgtacggtctgcgtgggccctgttccccagcttccattgcctatgcaggtaaggaactgatggctcttcgcatcaaaaatctcggtacggcttccttcgtgggtgacataaatcttgtcgtgggcacgggtgacaccgttcgggcggccgccgaatttcccggtaacttctccgtgcttccattccttgatgcttcccaagtgcttcttgccgccgccggcaaggccgaacacctctacgctgtactggttgtccgcatcgttcacggcatacagggtatctccgtacacatatacatccttggggcggaaggtggttcccgtagcgccgggcaagtcggtataatccagcttgaacgccaccggctccccgtcgtttccttcccggtcggtctctccgcgcaggggagacaggccaccgtccagcgcatcgagttccgggtcttcgataatgtgtttcgaagccacgtatatatcatcaaaataacggttcctgctccagcgggtgtgcaggaagcggcgggaatagacgggcagctccttgtccagcgacagcgccacatatacgttgttgcacagggtgatccaccccggtcccgtctgttcgtaagtcatgtttcccgcatggccgtagcccacacagtgggcaaactcgtggaatatggtttcggtgatgcttttgtcatcggcatagtgttccagataacacacttcatgcatgccgaaggtggttcctccgcccagtcccatcacgccggtggtatagccgaaggtcagtccgcggtggttgagcacgttggccagcagggcggtcttgtctatttccgtcttgtcattgttgctgtgcagcgggccgaactcgtacagggcggtcttgaaccgttccgacgagaacatatacgccatgttcagcgcgatggccaccgcctcacgcgtgtgcgaagccttcatcttgtacttccagctgtcctgggtgtcactgtatctgccgaaggcgatgtaccatttgcaacggatggattgcagccttgcccagtacgggtcgtcacactctacggtgaaggtcaggttttcttccgtgaggtaggggtttgccatgatccgtattttctttccgctgcgggtataggcggtcaggtccttggtggcgaacggtatgtgtacccggagttgctggaaaggcatgatcttttccagcgacatgaacttgaattcttcctcgtaaccgtctatcctggcccagaaagtcacgtttttcaaggctctgggactatagaaacggagttggaaacagtgctcgtcgtccattccgaactgaagaggccggctgacgtagaagctgcgctggccggagtcgaaataaacatcctgggattcattgtcattcagcaggtaatacgtgttgtccgggttataatccgtttcggccagccggacgggcaattcgttgtttgccacgtttccttctccggaaaccggaagttcgtcctctttgcagctgcccagcagtaaaagcatacctgctaaaatcaacaggctggtggaaaaaagttttttcatcgtctgtctttattagaattacatttaaatttgaaataatcactcttttggaaaagggttgcaaaaataattgttttggatcagacggacaaagaacctgtatttcattttgtatgagtccctgttttttatgttcttttatttttctgcctcaaaaaaaataaatcctatattgttgccctgggctttgttcataggaaaatatgctgtatttttgttatccgaaataaagatgaagatatggcacaacctttagcagaacgtttgcgtccgaagacattggacgattatataggtcagaaacacctggtggggccgggggctgtcttgcgcaagatgatcgacgcgggacgcatctcctcctttatcctctgggggcctccgggggtggggaagaccacgctggcgcagatcatagccaacaagctggaaactcctttttatacactgagcgcggtcacctccggtgtgaaggatgtgcgcgatgtgatagagaaggcgagaagcaaccgttttttctctcaggccagccccatcctgttcattgatgaaatccaccggttcagcaagtcccagcaggattccctgttgggggcggtggaaacgggagtggtgaccctgataggcgccaccaccgagaatccctcgttcgaggtgatccggcccttgctctcccgctgccagctgtatgtgctgaaatcattggagaaagaggatttgctggaactgctgcataatgccatcgcaaaggacgtgatactgaaagaaaagaagatagagctgaaggagacggatgccatgctccgcttttcgggaggcgatgcccgcaagctgctgaacatactggaactggtggtggaggcggatgcggatgccggacccgtggtgattacggatgagaaggtgaccgagcgtttgcagcagaatccgttggcgtatgacaaggacggggagatgcattatgatatcatttccgcctttatcaagtccatccgcggaagtgatccggacggggcgctctactggctggcgcgtatggtggaggccggagaggacccggctttcatagcccgcagactagtcatttcggcagccgaggatatcggtctggccaatcccaacgcattgctcctggcgaacgctgcttttgatgccgtgatgaagataggatggcctgaggggcgtatcccgctggcggaagctacggtgtatctggccaccagccctaagagcaactcggcatacgaggggatcaacagtgccctggaactggtgcggcagacgggcaacctgcctgttcccttgcatctgcgcaacgcacccaccaagctgatgaaacagttgggctatggcaaggattacaagtatgcacatgcctatcagggcaatttcgtgcagcagcagttcctgccggacgaggtgaaggacagccgcatctggcatccgcagaacaatgcgcaggaagcgaagataaaggaacggatgcagagcctctggggggaacggttcaaggaatgaaaatgaattgcattgatcctgtgctataaaattaaaaattggaatgcaaatgacataaatccaaccttccggccggtttatatccatgctgtgcagctgttaatttgcgtcattcgcgttccaatctaaccgaataaatgaacaaaatatgaaatttaacttttgagcatatgaaaatagtagttttagacggttacggattgaatcccggtgatttgtcatgggaggagatgcgggcgttgggcgagctgacggtgtacgaccgcacagcccctgccgagttattggagcgttctgccggagcggaagtgctgattacaaataaaacggtgattacggcggaggatatggccgctctgcctgccttgaaatacatcggcgtgctggctacgggatataatattgtggacatccaggctgcgaaagcgcggggcatcattgtcaccaacatacctgcctacagcaccgcttccgttgcccagatggtctttgcgcatatactgaacatcacccagcgtgtaggccattatgcctatgccaaccgtcacgggcgttgggcgaacaatcccgacttctgctactgggataccgacctggtggagctggacgggaagaaactgggaatcatcggcttgggaaacaccggacaggcgacggcgcgcatcgctgccgctttcggaatgcaggtatgcgcctatacttccaagccgcagtcacaacttcccggaggaatccggaaaatggagctggatgagctgttccgcgaatgtgacgtggtgagcctgcactgcccccttacacccgataccaaagagctggtcaatgccgcccgcctggcccttatgaaaccgacggccattctgataaataccggccgcggtcccttggtgaacgagaaagacctggccgacgcactgaacaagggtgtgatagcggctgccggactggacgtgctttcttccgagcctccccaatataccaaccccctgctgacggcgaagaactgcttcattacgccgcatatcgcctgggccacgaaagaagcccgtgtccggctgatgcggattgcggtggggaacttgaaaggattcatcaagggtgagattgtaaacaatgtggcggaatgagaacaaaggaaaaagacggaaagaaaagaaggaggtaagaaaaatggaagaagacaagaatacgttggatttgcatacggaagttagggaagaggacagggtggcaaaagccgttgccttgttcaaggaaggatataactgctcccagtccgtagtgacggcttttgccgatctgtatggcttcacccgtgaacaggccctgcacatgtccgcctctttcggcggcggcatagggcggatgcgtgaaacctgcggtgctgcttgcggcatgttcctgctggccgggctggagaagtgcgccatcgaggggaaagaccgtgagagcaaggcggcgaattacgctctggtgcaggaactggccgaagaattcaagaagcggaacggcgccctgcggtgtgccgatttgttgggattgtccggaaaagagccggtagtatccacaccggaagcaaggacggaacggtattacgccaagcgtccttgtgcaagaatggtagaggaagcggcccggatttggagcgaacacctcgaaaaacaaaaaaaataggttgaaaaatcgctttttcttatagaaatacaaactttttcgatgcaaaagtgttgaataacataattttgtgtatctttgcaagcgataagaaacacaaacattcacatcggaatgtgtgggtgcggttaacgtttaactaaaagcaaattgaaaatgttgaaagaaaaagcaggtgctttggccggacagatctgggaagcactgaatggaactgaaggtttgacacaaaaacaaatcaagaaagcaaccaaactgaaagctgacaaggatttcttcctggggctgggctggctgctgagagaagataaggtcgttacttctgaagtggaaggcgagatctttgtaaaattggtgtaagaagaagattttaaactcataaaaaaatgcgttggcacatcgtttggtatgttgtcaacgcattttttcgtatatttgttgaagtctgagatatctataaaagaaatgaaaaataagagatttgcaaccggcaaaattgtagtattcaggcaaaaaagctacttttgtattgttgtttgagaatgtaaacaaaattttgatgatacagaaaataacgattgaaggatacaaatcaataaaggaacaaactgtagagctgtttcccataaatatattgataggtgggaatggaataggaaagagcaatttcatttctgcctttactcttatacataacctgtacgagcggaatcttcagaattatgttctcaccaaaggcggctccgacagtttgttgtatatgggaaaaaaagaaactgatcatttgtcctttgacttgttttttgcggaacgcggtaaggatgctcataatcgttttattgtaaatatgaaagaggctcaggattctttatttattgagcgtattgatacggcttatcacaatggggtatcctggcacaaacaactgcacgaggtcaacaagcaggaatcttcatttaagaacgaccataccggacaggcattttatgtaaacagcttcttacgcgaatttgaggtgtatcatttccatgatacgggagaccgttcccccatgaaaggaaaatgtaatatggatgataatgtcagcttgaagaacaatggggctaacattgccgcattcttatattatctgaaagaaaagcatccaaaacatttcacacgtatagaaaaggcggtagcttccgtatctcctttttttgagggattctgtttaatgcccaaccgcttgaacgaacagctgatccagctggagtggaagcagaagggaactgttgatacgtattttaatgcgtaccagttatcagacggaacactgcgttttatctgtctggcaacgttgttgcttcagccggatctgccaaagacggtcatcattgacgagccggaactcggactacatccggtagcggtcaacaaactggctgctttgatcaaaaaagcttccagagaagctcagataattatctccactcaatctgtcaatttggtggataactttgaaccggaagatatcattgttgtggatcgtaaagacaacgcgactgttttcaaccggcttgattctgagaatttagcgcattggctggaagattacagcttgggagaaatatgggagaagaatgtcattggcgggcagcctttaaattgagtgggaatgaaaagagtagtgtttatagttgaaggcgatacggaagtgagttttattcagaagcgtgtaattccctatttgtattcgaaaggatttactaatcctatgaatgcccagaaaatcttaacgaacagaaaattgaataaaaaaggtgggaatgtgggttttgaatatctgaagaatgacgtttcacgggtggctgcgacaaaaaacgtgttaatcacaaccttgcttgactttttcagacttcctacagattttcctggctataccacagacagtttgagactgccggatatggagcaggggataaaagaaaaggtaacggaatttatggatgcttcctgttttctgccttatatccaacggcatgagattgaatccctgatgtataccagtatggacggtttcaatgttgtggtggatgatcaggaaagcttggatgcattgcagcggataatagattcatatcctacccccgaagatataaacggaggggcggataccgctccttccaaacgattgatgaggatattcccgtatgagaagactgctgacggggagatgattcttgaggcgctggatatagatgatattcgaggcaaatgtcctcgttttaataaatggatggaaaaattggaggaaggacttaagaacggccacttttaagaatgaatattgttggcaaatcttctggttttgatttcagatggtttgtattattcctgcaaaattcatccgtatatgagcgagtttttgtatatttgcgcgaaatttaagtgacgaagatgaagaatatccgtaatttttgcattatagcacatatagaccacgggaaatcgaccttggccgaccgtttgttggagtttacaaaaaccatccaggtaaccgaagggcagatgcttgacgatatggacctggaaaaggagagaggtattacgatcaagagccatgccatccagatggagtacgagtatgggggagagaagtatgtactgaatctgattgacactccgggacacgtggacttttcatacgaggtatcccgttccatagccgcctgtgaaggggcgctgctcattgtggacgcttcgcagggagtgcaggcgcagactatctcgaatctgtacatggcgttggagcatgacctggaaatcattcccgtgctgaacaaatgtgatatggcgagtgccatgcccgatgaggtggaagatgaaatcatcgacctgctgggctgcaaacatgaggatattatccgtgcctccggcaagaccggaatgggtgtggaggagatattgaaggcggtggtggaacgtatcccgcacccgacgggagacgaagaggcgccgctacaggctttgattttcgactcggtattcaattctttccgtggaatcatcgcgtattttaaaatagagaacggtgtgatccgcaaaggggacaaggtaaaattcttcaataccggcaaggagtatgatgcagatgagatcggtgtgctgaaaatggatatgattccccgtgcggaactgcgcacaggagatgtggggtatatcatttcgggcatcaagacctcgcgcgaggtgaaggtgggggataccatcactcacatcgcccgtccgtgtgaaaaggcgattgccggattcgaggaagtgaagccgatggtgtttgccggggtttatcctatcgaggcggaagattacgagaacctccgcgcttcgctggagaaacttcagctgaatgatgcctcgctgactttccagccggagtcttcactggctctgggcttcggattccgttgcggttttctgggattgcttcacatggagattgttcaggaacgtctggaccgcgagtttgatatgaatgtgattacgaccgtgcccaacgtgtcgtacatggtgtatgacaagcagggacatgccaacgaggtgcataatcccggcggtatgcccgatccgacgctgattgaccacatcgaggaacctttcattgatgccacgatcattaccgccaccgattacatcggccctatcatgacactgtgtctgggcaagcgcggcgaactggtgcggcagaattatgtgtcgggcaaccgggtggagattcactacaagatgccgctgggtgaaatcgtgattgacttttatgacaagctgaagagtatctcgaaaggatatgcttcctttgactaccatcagtcgggtttccgcccttccaaactggtgaagctggatatcttgttgaacggtgagccggtggatgcgctttctaccctgacacatgtggacaatgcctataacctgggcaagcgtatgtgcgagaaactgaaagagctgattccgcgccagcagtttgatattgccattcaggcagctatcggggcgaagattatctcaagggaaaccatcaaggcggtgcgcaaggatgtgaccgcgaagtgttatggcggtgacgtgagccgtaagcgtaaattgttggaaaaacaaaaaagaggtaagaaacgaatgaaacagatcggtaatgtggaagtaccgcaaaaggcgttcctggccgttctgaagctggattaactcaagaataaaacaagctctggggagcaaacaataagcgggctctttctgttagttgaaattaaaaagtcaataacaggaagggcttgtgttttgatggcaatttatcacaaactcttaaattcaattgatatggaaaaactgaaaattctgaacttgaacttttccttccagcgggcggcgcactatcatattaatggagggatgttgctgatgggggtagtcttgctggctatgttcctggccaattctccgtggggggatatttatgcctccttttggaattacgaggtgcatcttcagataggagaatttaatttcttcagtcataacgggcatcacatgaccttgatgacttttatcaacgatgctttgatggctgtctttttcttcagtgtggggctggagataaagcgtgagatactggtgggcgagttgtccagtttccggcaggcgcttttgcccatcgtggcggcgtgcggcggtatgctggttccggtgctgatctattatttcatgacggcgggaactccggcccaaagtggtctggccataccgatggctacggatatcgccttttcgctgggagtgctcagcctgttcggcaagcgggttccgctgagcttgaaagtctttctgaccgctttcgctgtggtcgatgatatcggcggcattctggtcatcgcccttttttacacctctcatctgtcggtgaactacctgattgcttcggcgggtatcctgctgatactttgcggcgggaatttcttccgggtgcacaaccgttggttttatattttctggggagtgattatgtggtatctgtttttgcagagcggcatccacgctaccattgcgggagttgtcgcagccttcacggttcccgccactcctcattacaagataggtaagtacattaaccgcatccgcgagaacattgctgtctttcctgccagtgacaaggaaagtgttgtgttaagcaagatgcagatcaatgtgctgaaaagcatcgagtcttcctcggaccgtgtcatctctcccttgcagtcattggaagacagtctgcatggaatggtgaattatattattcttcccttgttcgcctttgccaatgcgggtgtctcgctcacggcggatcatggcggtctggaagtggggatggctacctgggcggtgctggcgggattgctggcgggtaagtttgccggcatttatttctttacctggctggtgataaagatggggttcgccggactgctgaaaggcatgacctgggtgaacctgacaggtatctgtcttttgggaggtatcggttttacggtttctttgttcatagccaacctctctttcggggattcgccggtgttgctgacgcaggcaaagatgggtgtcatactgggaacggtgctggcgggtgtgctggcgtatctggtcttgcagttcgccctgcctaaacagcctgcacaggaataaaattacagatagggcagtacggcggtgaaacggctgcccttgttcacctcggattgcacatcgatgtgtccgttcattttttctacaatgaccttgctgatggcgagtcccagccctaccccctgtacaaactcattccgcttgtagaaccgctcgaatatcatttgtaattcttctttagggattcccgcaccggtatcttctacgaagaaatggatttcctttttctctttgtcgcagaaataacccagtttgatgtgtccttgggaggtgaacttcttggcgtttcccaaaaagttggtgatgacttgggtgaggcgcatacggtctatgtgtatggtcacatcctcgtcgggaaattctttgatgaattccacaggagggagaataattacctgatgggtctgatagaccgtttcggcgaaatgatgcgcgctgcaatcctcgcaatgaaaggacatattgccggattctatgcgggatagttccagcacatcattgaccagcttcaacaagagtctggtattgttgtctatgatggaggcaaactcttttttctcttcttccgagatgtttttctcggtagtgagcaggttggagaatcccacgatggcattaagcggagtacggatttcatggctcatgttggccaggaaggattgtttcagttccgcctgttccgccagtttgcgggcgcgtatcagttcttcttccttgtctttgatctcctgaatgtttaccagaagtccggtgatgataggattttgttcattattctgcaacacgctgtatctgaattcccaccattggtaaccggtgtcgttgaattggcaacggtattgggctgttcttcgttgccggtatagtatgttggatacgttttttctgaaccgggcttgttcgtcggggtgtacataatgggctatttcctctattcccaacaggttttgggaacggttggtcagttcgcagaaagcttggtcgagcacggcggtctttccgtcgaaacaccacgcgtaggtattccctccttccagtgcaagcgttaatgcttcgtgttcgaacctgaggttgcgcaaggcttcttttttgcgtcctttttccagtgtatagatataaataaggtaggctatccccaaaaggagtgtgaagaccaggaggctttcaagaatcaggatgggggttgcgtatttttccctccacggcctgtacatgatggtatattccggtggaatgctttcaagggggatctggtatctcttcatggcctgccagttgaccaggtactgtttggcgatttgttttaccgccgggacgggtatctttccttgcagtctttctttgatgccggcggtcatgtcgcttagctgtgtttcgatgggggcgaaataacctcccagcatgtattcctttatcccgaatccttcgttgatggtttcgaatccgggattgtcgaacaggctgccgatgcgcagggtggtatagtcccgtttggtatacaggaacagggagtattggaagactccgctggacagccacatcaggtcgcgggcagctacggaatcactggacaggcggactacgacggtggagtccaattggttgtattcgttcagcttttcgtacagggattcatattcggtatcatctttgtcactgatggggatattcagcttgtcgggccgggcctcttgtcttttccattggtggagggtgatttccgatcctttgcattgttcgctcaggtctttccagataaggcggtcaagcacggtccgcccgttcaggatgtggatgcggactttgcccatgatgcgttctatcatccggcaggtggtgaggtaatcgggtttgtctatgtagcccgtaatgttgggatattgtgccagcaactcttggttgggataattcactccgctgaatacgacgggaacctgcctgacatacgggtttccgcaagccatgacagagtaggttgcctgatcatcgagcacggcaatcaaatcccctccccatgagcggatggaatctgcaaactcggaaatccgtcgctcttcttctacggattcgtatttctcgcaatccagataaaaggtgcgcagctggaagtctatttgctggtctttcagtcctttgacaaacagtttgtttacaatgccggcaccgctgtacccttcctggtaggaatggataagggctattttatatttttgtgcataaagcggactccctataagaagggctgtcataaaaatgaaaaaggccttatgcttcatgtcaaacgtgattattaagtgaaccgggggacaaagataggaatgtttctttaattccggctatgatttacaggaaattattggaagagagagggaaataaccatcccggttggtggaaaacagcaattccggcttcttgaaaaacatgcttcttgcttttcaaggaaccggaattgcctgtgataaaaaggaatgggccaacccgtcagcgggggttatttgtgttgctccggagacggggtactttgagaggccggtccggcggcagcgtttgtagaggcgcttgaagcggaacttttagccgcgccgaaaaccggagccgctgtctgtgccgttgtggcctgttcttcccagtggaacggttcgaactgtgtatccttgtctacccatgacggtttgcgcgatgcatagattatgaacggagctgcgactaccacgatgcagccgataatcaaaacggcaaaccatacggtgttgctgcctaccgcaatctggctgggcggaatgaagctgagcacgaatgccagtagtgaaccacagaaacccagaccgccgatgagccacatcagtccgttgcctttgctgccgatgcggaacgggcgcggggcctttttcatattgtaacgcagataaatggcgccgctgaacatcagcagatacatgataaggtaaagcaatacggtgagctgtgacaggatttggtagaaactctgtacggaaggcatcacaacgaacagcaggctgagcaaggttacggcaaggccttggaccagcagaatgtttttctgtacgccgttggcgttggtcttctggaagaagggaggcagataacctgctttgcccactgcgaagatacctttggacggacctgccacccaggtcaacacgcctgccagcacaccgaatgccaaagccacggcgatgataggcgacaaccacgaagcatggacatacttgaagtaattatcaaagcctaccagcagactctgtgtcaggttgatgtccttttcgggaatgatgatccccagtgcgaaggtgccgagcacgaagatgatcacggtgatagccgcaccgatgaatacggctttcggatagttcttggcaggattttccatgtcttttacgtggataccgcccatttccataccggcatagaacaggaagatgctggaagccagtaccaggttgtcgaagttgctgaaatcggggaagaagttgccgtcaaagttcatctggctctgtccgccggaagcaaggtaaatcaccgccagcaccatcagcaggccggcaggaatgatcgtacctaccataccgcctactttggccactttgcctacccagcccatgcctttcagcgaaatgaaggtggccagccagtagataatcaagaccaccgccagtgagtaatagcggttggatgccaaggccatatcatgggtgtcactcatgccgataaatgccagtgccacggctccgaaagtcaggacggtgggataccagatggtgctttccacccattgcaggaagatggcgaggaagccgaatttctttccgtaggcttcacccacccatcggaacacaccgccttgcttgtcctggaacatggccgccagttccgccgctaccaacgaggtaggtatcaggaagacgatggccgcgaataaataataaaatgccgaactcagtccgtattcggcttcagcaggcagcccgcgcagggatactaccgcagtcacgttcataatagcgagggtaaatacccctagcttgactgatttactaatgtttgccataaagtttaggttttaaaaaatgtatgttttttgtttacggagtttataacaactccctggaaatgatgtttatccgtttaggtttattaacccggaaggtatccggaatgaaacaatcgtacccggaagggtgtttctagaaaaaacaatataatcagtatcgtttatgaaaacagctttctcctcattcatctattcccgcagggggatttacgggatcttgcatatactcatcctgttgatgtccctttttctggttataagtatctcgatagatacttttcataacatccctttcctgaatcaaggttcttatctgaagattcagttctggatatgtatgtttttcctgttcgatttcctgctggagtttttcctctcgaaagaaaaaggaagatacttcaccagccattttattttcctgctggtatctataccttatttaaatatcattgatttctatcacatcactttctcgcccgaaatcagttatttcctgcgctttatccctttgctgaggggagggtatgcgctggctatcgtggtgggctggctgtcgggcagcaaggcgtccgggctgtttacctcgtacatcaccatgctgatggccaccgtgtattttgccagccttatcttctttgtgctggaacataaggtgaaccctatggtgacggactactggagtgcgctgtggtgggcgtttatggatgtcactaccgtagggagcaatatttatgccgtcactcctacggggaaaatactgtcggtggtgctggccgccctgggaatgatgatgttccccattttcacggtatacgtcaccagtctggtgcagcaggccaacaagcggaaggaggaatattatcaatcgcaacaatcggagccggcggatactaaataatagcttgaacttcgtcaaaaataagaaaaaagtcttatcttcgtagccaataacaaattgctaacctaaataaacaacaagatgaaattattggctctgtgtgcggcggggataggcttgatgctgtgtgcctcgtgtacaaacaacaaacatttgatcagtgatgaggctgaacgtgccgctgttcagcaggattttgaggcacggcgtgatacgctggcccaaggtgacctcttccaggtattcgaacaacccatgagcgatgagcagaaggaggcgatgactttcctttacgcctatatgcctttggcggatatagcggatcatcccggtgaattctatctggaaaacgtggattacgctttcaaggcgcgtgaggagatgccgtggggaaaagtggttcccgaacgcgagttccgccactttgtattgcccatccgcgtaaacaacgagaatctggacgacagccgtaaggtattctacgaggaactgaaggacagagtgaaaaccctttctttatatgatgccgtgctggaagtgaaccactggtgtcatgagaaagtgatttatactccctctgatgcccgtaccagtagtccgctggcttccgtaaagacagcctacggacgttgcggcgaggaatctacgttcacggtagccgccttgcgttcggtaggcatccctgcccgccaggtatatacgccgcgttgggcacataccgatgacaatcatgcctgggtggaagcctgggtggatggcaaatggtacttcctaggtgcttgcgaacccgaaccggtactgaatctgggttggttcaacgctcccgcttcacggggtatgctgatgcacaccaaggtgttcggacgttataacggaccggaagaagtgatgtaccgcactccccggtatacggaaatcaatgtgattgacaattatgcccctacggcaaaagccgatgtgaccatcgtggatgcggatggcaaaccggtggctgatgccaaagtggaattcaaggtgtataactatgccgaattttataccgtagcttccaaacagacggatgcggacggcaagacgttcctgacagccggaaaaggggatatgctggtatgggcttccaaagatggaaaattcggttactccaaactgtctttcggaaaagacaatgccttgaccgtgaaactggacaagacggccggcgaggcttatacactggatatggatatcattcctccggtggaaggcgccaatatgcccgaagtgactcccgaacaacgtgcggagaacaatcgccgcatggccttggaggactctatccgcaatgcctacgtggctacgttcatgacggatgaatcggcccgtcatttcgctaaagagtatcagttggatgaggatgttgttgccaaattgctggtggcatcacgtggtaaccacgaaaccatccgtgactttatggcccgtctccgttcggacaagtcaaagaagggcggcattgacctgcttcagcagatttccgccaaagaccttcgcgatgtaagttccgaagtgttgatagaccacatgatgaattcacatctgtgcgccaatgccgattatttccgcagatttgtgcgtaatccgcgtgtgagcaacgaaatgattactccgtacaaaggattctttgagaaagcagtgcccgaacaggagcgtgaggcttaccttgccgatccgatgaagctggttgcatgggttgccgaaaatatccgtgtggacaaggattgcaacctgggcggttctccgattactccggaaggggtgtggaaggcccgtacagccgatgtgcacagccgtgatatcttctttgtttccatggcacgcagcatgggtattcctgcacgtatagacgaagtgaccggaaaagtgcagttgatgggtgatgaaggtgctgttgatgtgaactttgaggcgatggaacaggccagtgcgcctaccggcaagtttattgccagatatacgccgatcaagtctttggccgacccgaagtattattctcatttctctatttccagactgactcctgccggaaccttgaaattgctgaattatgatgaaggcgatattgatatgggtggcggcgctacttgggctaatctgttgaagaacggaacggcactggatgccggcaattatgtgatggtgaccggtactcgtctggccaacggcggcgtattgtcccagctgactttctttaccatcaagccgggggaaacgactacggtggacttggtgatgcgtgaaagtaaggatgatattcaggtaatcggtaatttcaactcggaatctacttataaaccgatagatagcgatgaactgaagtctattcttgccactacaggacgtggttactacattgtagccgtactgggtgccggacaagaacctacgaaccatgccttgcgtgatattgcggcattgggtaaggagtttgatgaatggggcagaggaatcgtgctgttgttccccaacgaggagcagtacaagaagttccgcccgcaggaattccccggattaccggctaccattacttacggtattgatgtggacggttccatccagaaacagattgcagaaggcatgaagttgtctaacaagactatcctgcctatgtttatcattggggatacctttaaccgggtggtattcgtgtcacaaggatataccatcggactgggtgagcagctgatgaaggtgatacataagctgtaggattcagtataaacaaaaagtaacgcggatattcaagtttgcaaactgaatatccgcgttaaatatattgatagcgtttatgcttacctgttgtttacttgtcatcatccaagtcatcgtcctcatcgtcccagtcatcctctttctttgatttcttggggttgaggcttttgtttttcttttccagtgctttgtcgttttcgtctttcaatgccagttcggacaaggcggcttttactttgtcgggatcggtaacgtctttcagatactcttctatctttacagtacctcccatggatacttttgagttacgataaatcatgccgctgtctacgctgctccgtccggagaaatgaaattccgaagttccggtttcttcggcaatcttacggatattaccggcattcacaccgcatcccggcatgatgatgatccgtccgtcggcctgttccaccaattctttcagaagagggattcccttttcggcggtagcttcctgtccggaagtaagaacccggtctatacccagtccgataatctgttccaaggcctctttgggattgctgcacatatcaaaagcacggtggaaggtgacactcatctcgcctaccgcattcatcagtttctgcatcagaggcacatcgacatagccttctgcggtaagacagccgaataccacaccgtccgcacccagctggcgtgccactttaatatcatgcagcatgatttcttgttcaataggagaatataggaaatctccgccacggggacggataatgacatgcagttttgtttggttcaataattggcgtgccatacggatttcgccaaaagacggggttgttccgccttccggaatacctgcacatagttctacacgataagcaccggcttgttgtgccttcacagcactttccacggagttggcgcaaatctcgatttttgatttgttactcataaagttatttaatagttaattcaattccataatcaacgtcatcgggcgctttgggctgttccagcatttctctttcaaatattccgccaagggaactccaatggtttctctgcgtgagttcgtcattggtccggttctttacggatgactttgttcttcataatatgatgaatttgtcagtgcaaagataggcataatgtaagagtgtgagaaattttagcgggaaaaatttttaattaaaaagccggtactcctctcggagtgagagaaataccggttttcctatgggaacgaaatggattattgcacgtggatgcgatggccattgaatacgttcatgcccagtttgttcataatatgcttgatggcaagctgtgctttcacggagttgccggcgtcatccagaggaggcgcgaaggctgcaatgcccatgacacccggcattacgcccatgacaccgcctcctacgcctgtcttggcaggaattcccgaagtgtaaagccagtcgcctgtgtgctgatagaaacctacggtagctatcatggaggtgattttcggggagagggctttgtcgaacacttgcttgttggtgttcgggttcaatccttcgttggcgatggtggctccacagatggacaactgttctgcagtgatgcccatggaacactggcgggtgtagaggtcgagcgacatatcggggtcatcgtagatacggttataatttttcaatagccaggcgatggaacggttgttgaaatttgtcgccgactctgaccggtacagttcgtcgatcagttgcggggtacttccgcatagttcggtcatattgtctacgatggctttccacttggcatcgctgtttcctacgggttgcaccatactgttggccgagatggcgccggcgtttaccaatggggtggacggatggtcgttttccaacaagatggccatgatggagttgaacggcagtccggtagcatcggcgccaatcatttcgagcaccttgggagcaccgtattggcggagtaccaggatggcggtcagcaccttggaaacggactcgataccaaaacggtactgagagtcacccagttggatgatttctccgttcatcagacagatactgatcccgaacagtttgggatcaatatttgccagataagggatgtagtcggcgttcttaccgtctgtattgtccttgtacagattgtaagcctcctgggcaacatcctttatttgctggatagttatagttctttccataaattaatttgattgaagtaaccatctaccttaacggcggatggttgcattattgttatctatgcttatttcttagtggcgttgctatgggcattgtgagtgaacacagtaccttttacagcgatattcttgtcttgggcgatgcgggtaggagtgggatattccagtttctcgaactcgcagatggcattcttgatgtcgttcaacaacatatccgccatgtcacggctgaatccctgacgtactacaacacgcataactacgtaattctggatattttccggcaaggtgtaggcaggaaccatccagccgctttgctgcaatttagcctgcaaatcgtacagagtccatttggcgttctttgcatattcgggtttcatgtaccagatgaacaaaggatttactacgtcatcgctgtaatttacgaacggagccatcttggctatttcgctgtggatgtacttggtgatttccatggaattgtattggatggctttgtatccttggaatcccagacggataaattggtagtactgtcccagaatctgtgcggcgggacggctgaagttcaaaccaacctgtgtgatgttcgcacccagataattgacactgaacgacatggcatccggaaggtatttcttgtctttccatactacccatcccagtcccggataaaccagtccgaacttgtggccggaagtgctgatggagagaacccatttcaagcggaagtcccattttgtgtcgggattgaggaacggcaggatgaaaccgccggttgctgcatctacatggataggaatatcatagccggttttggcgttgtaggcatccagtgctttgtccaacgcttccacgtcatcgttcaagcctgtccatgtcacaccttggatgggaacgatgcagatggtgttctcgtcacacatcttcagtgcttcttcggggtccagagtggttttgtccaaggtgagaggtacttggcgcatttcaatttgccaaagttgggcgaacttttcccaaacaacctgaaaaccgcttgaaatgacaaagttaggcttgtcagtcggtttcccctgagctttacgtctgtctttccagcgtaaccaggcggctactcctcccagcatacaagcctcgctggagccgatagccagtgctccggttttccattttgcctgttcgggcgaattccacaaattagccatgatattgatacatttggcattcatcactgcgatacgaggatattctgtttcatcaatgtagttgatgctgatggcttcgttcatcagtttggtggcatagtcgtccatgtaggtggtaacgaaagtggccaggttaaggcgtggctgggtttgggcgaatgtttcgtcttttaccatttgataagcaatctgtggggtggtaggttccatagggatggtatctaccggggcaggctgtagcatttcgtttgaaccaaacacggctgtctttgcgtcaccgtctctcaaatcacaattacattctttcattttacttaaagtttagattagtaatacaatggaaaacatgggagtttcccgcgtttttctccctcaacaggaggtttggagaaaagtttcttgattttatgttttttaatttatgggggataatgtgtcatgcggaacatagcgcagccaattggcatagtagcatatgggcacatgattgcattgaccaattataaaccggctttgaaccaattcttttacactttgtttctatcacaatctaaaccgatttcattatgaaagtacaaacagggcaggggaccattcccctcattacgttagtaggtatattttccatctcggcactcaatgcattgccgggactggcggtgtcgcccattttgggagatttgaataaaatatttccctctgctacagatctggagatccagatgttgtcttcgttgccgtcacttcttatcataccctttatcttgttatcaggtaaattgacagagaaagtgaacaaccttttgttgttgcagatagggctggctcttttcggggcgagtggtattctttatctgctttctgataaaatgtggcagttgatagccgtcagcgccatgttggggatggggtcgggattgattgttccgctttctaccggattgatatcccgttattttgtgggaagttaccgtacaaagcaatttggttacagttctgccatcaccaatatcacgctggtgcttgccactacgctgacaggatatctggcagaagtgaactggcatttgccgtttttggtctatctgtttccttttgtatccgttttccttactcgttatctgaaaaaagatctctccaattatcattcctctgatgatattccagccgatactgtcagggaaatgggtaagcggggaattaatgtcaaggctttggtcaagctgatggctttttacggattggctacttatctggtgattattattagtttcaatctgcctttcctgatggaagaatatggactgtccagtggtagggcaggcatcttgatatctttgttttttctcgctattatggcaccgggttttgtcttgaataagatagtgcaggtcttgggtcgtcgtatctatatggtttgtttgttgatgatagcctgcggaatggggattattctgcttagtcgttccgaaatactgattgctttgggatgtattctgaacgggctttcatacggtattatccaaccgttgatttatgataagacttctgatgtggcggttcctcacaaagtgacgttggcacttgcttttgtcatggcgatgaattatgtggccatactgctttgtccgtttattgtggatgcttttcagaatctgttccattctcattcgcaaacctttgccttctggcttaatctgatggtagccttgatggggatgtttattgtgatgaagcaggaaaaactgagtttataagaaaaatacccacgtaataacagcatgaagtatgaatagacaagttgaagcaaaccttagcatggttgtctccaaagcgttgggaggccttaatatgaacgcactgaagtatcttttacctttgtggatagctcctgtgacaggggttactttccgattggtatttggggccgccgctttttggcttattgatatattttgcaagcccgaaaactccactatccgtcagaaatggcagctctttattttaggggctttaggtatttatggatatatgtttttttatttgttgggtatcagtaaggctactccggtttccagttctatttttgtcagtttggagcctatatgggtattcattatctctgtattgttttataaggaaaaagtaacctggatgaaagtgcttggcattggaatgggattgggaggagctgttctatgcatattcacacaacctagtgacgatcttgcctccaatgctccgttaggtaatttgatgtgtttggccagttcattggtttatgccgtctatcttgttttcagtaaccgtctgttaaaaggagtgggagatatgacgatgttaaaatatacttttttaggggcggctgttatggctgttgttgtcaatacgatttatggttttgatgctcctatactgaaaatgtcacttttctctacgcctatgttggtcttgctttttgttttggtatttcctaccaccattagttatttattacttcctctcgggctgaaatatctgaaaacgacattagtagccatttacgggtatttaatattgattgttgctacggtgacttcttttgttttggggcaggatcgcttctcatggacacagttggcggcgattgttcttatttgtgccagtgtttatctggtggaagtagccgagagcaataaacagattacgtcgaaattaaaataagacagcagataaggagtgtcaaaatgaaaacgatagtgctgccggggcttttacatacttccttgagtgtgaactctgtcgacaagtgaaaaggagaacaaagagaaaagaatacaattttacgttgtatgtgagtgtaaggaatcaattttatttgtagctttgcacccaatttaaaaacaagagtgttatacctatgctacaattagatgcaatatacaaagcggctcatgtcctgaaagaggttgtccgtcgcactgatttgatttatgctcctcagataaatcctgagagtacagtttatctgaagcccgaaaacctgcaactcacaggatcgtttaaagtgcgtggtgcttattacaagatttcccaattgtccgatgaagaaaaggcgagaggcgtgatagcctgttctgccggtaatcatgcgcaaggggtggcattggctgccactaagtgcggtatcaagtcgttgatttgtcttccggaaggagcgcctatatctaaagttgaggctacgaagcattatggggcggaagtttgtttggttccgggagtctatgatgatgcttatcagaaagccctgcaattgcgtgatgaaaagggatatacttttgttcatccctttgatgacgagaacgtgatagccggacaaggtactatcggtttggaattattggaggaaatgccggatgtggaggtagtcattgttcccattggtgggggaggactgatttcgggagtggcttatgcgttgaaggctttgaaaccatctgtcaaggtatatggcgtacaggcgttgggtgcggccagtatggcaaattctattcttcattcgcgtattgagcgtcttcactctgtttccacttttgccgatggaatcgcggtgaaagagccgggaacaaatacttttgacttggtaaatcagtatgtggacggagttgtaactgtgactgaggacgagattgccgcagctattctggcattgatagaacgccagcggattgttgcagagggggcgggagctgtgtctgttgccgcagccatgttcaataaagtaccggtaaagggtaagaaaactgtctgcctggtgtccggaggcaatattgatgtgacgatattgagccgtgtcatcagtcgcggtatggcgaagtcgggacgtacctatgcagtaactttggacttgatagacaagccggggcagctgttgggagtcagcaaaattgtcgcagagcagggaggaaatgtaatttctgtacatcatgagcgaaatagtgagagtgcagatgtcaccggatgtgcccttcgtgtcgttatggaaaccagaaacgaggaacatatagcatccattcgtcaaaaactgttggatgcaggctatgtgataatgaaataaattatataccttacaagtagaaaggaggaaaattaaatatttcttccttttcttgcttctaattttaatttctccacacaaaaaatcgatttttatagtgaaaatatcattttatacttcttagaatccaattaaagtcgtacatttgtcgcagttttgtaatgtagagtttgcaaaaatgaccgatataatcaaacatcgtggtattgtggaaaacattgaaggttctcacgtgcgggtgagaatcgtacaaacttctgcctgttcggcttgtagtgtgaaagggcattgcaatgcatctgaaagtaaagagaaactgattgatgtttttgacatgaaggcatcttcttaccgcataggtgaggaggtgatgatttatggtactacttccatggggatgcaagccgtattgctggcttttggtatccctttcttggtattgctgattactttatttatttccatgcgtcttacggggggggatgagttaaggtcggcgcttgttgctttgtcagccttgctcccgtattaccttattatatatgtatgcaggaataagttgagcaagaagttttcatttacgcttgaaccaataaaaaataattaataaataactaactaaaatttatggatttaattctggttgcagtaatttcgttgggagcgattggcttgattgccgcggtaatcttgtatgccgcttctaagaagtttgctgtgtatgaagatccgcggattgccaaggtgagcgaagtgcttcctcaggcgaattgcggtggatgtggttatcccggttgctctggttttgccggtgcctgcgtgaaggctgccgatgccggttcgctggagggtaagttatgtccggttggtggtgctccggtaatggagaaagtagctgccattttgggattggaagccgttgctgctgaaccgaaagttgcggtggtaagatgtaacggtagttgtgaaaatcgccctcgtactgctttgtacgatggagctaaatcgtgtgccatcgctcatgccacttcaggtggtgagacgggttgtacattcggttgtctgggttgtggtgattgtgtggaagcgtgtcagtttgatgctattcacatgaatcctgaaaccggtcttccggaagtggacgaagaaaaatgtacagcttgtggggcttgcagcaaagcttgtccgcgtaagatcattgaaattcgtccgaaaggaaagaacaaccgccgcgtagtggtgatgtgtgtgaacaaggataagggagctgttgccaacaaagcttgcaaggctagttgtattggttgtggaaagtgtgtgaaagtgtgtccgttcgaagccattacgttggaaaataatttggcatacattgatccggctaagtgtaagtcttgccgtaaatgcgaatcggaatgtccgaaaggggctatccaagctatcaatttcccgccacgtaaaccgaaagtagaagtgccggctggtgaggctgctgcaaaacctgctgtaaaagtagaggcttcaaaggtggaaactccgaaagcggaagcggtgaaagctgaggctccgaaaacggaagcataatcaaaattcaaagtaagtaaaaattaaaaagatataacagtgaagacatttagaattggtggagtacatccagcagaaaataaattgtcagcaggcaaagccattgaaacacttgcacttcctaagcaagcggtatttcctttgtcacagcatatcggtgctcctgctactgccatcgtgaaaaaaggcgatgtggtgaaggtaggtacgaagattgctgaggcgggtggctttgtttcagcagccatcttctcgtctgtatccggtaaagtgaacaaggtagacgccgtaatcgatgctagcggttaccgcaagccggctatctttatcgatgtggatggtgacgaatgggaagaatcaatagaccgcagttcgacattggtgaaagagtgtgctctcacacccgaagaaatcgttgctaaagtgaaaaatgcaggtgtagtaggtatgggcggtgcttgtttccctactcatgtgaaactttctcctcctccgggctgcaaggcggaatgtgtaattatcaatgctgtagagtgtgagccttacctcactgccgaccatcgtttgatgttggaaaaggcagacgaagtactggtgggtgtaagcatcctgatgaaagctgcaaaagtgaccaagggatatatcggtattgaaaataataaaccggatgctattaagttgatgactgaaaaggctgctcagtatcccggtataaaggtagttcctttgcaggtgaaatatccgcaaggtggtgagaaacagttgatagatgctgtgatcggtcgccaggttcctgctcctcccgctattcctatcaatgtgggtgcggtagttcagaatgtaggtactgcatttgccgtttatgaagccgttcagaaaaacaaacctttgtttgaacgtatcgtgactgttacgggtaagtctgtcaagaatccctccaacttcctcacccgtatgggtaccccgatgagccagctgattgatgcggctggcggtttgcccgaagatacgggaaaagtgataggtggcggtccgatgatgggtaaagcactggttaatacggaagttcccatttgtaaaggtagttcgggtgtgctgattatgaatgataaggaagctgcccgtgcggaagctcagccctgtatccgctgtgccaagtgcgtcagtgtgtgtcctatgggattggagcctttcttgttggcgacactttcagctcataaggactgggagagagtagaaaaagaagatgtaatgtcgtgcatcgagtgcggttcgtgtcagtttacatgtccgtctcatcgttatttgctggactatatccgtttgggtaagggcacagtaggcggtatcatccgtgcacgtaatgctaaaaaataattcgacaaaatagtatggctaataaattaatagtatcattatcgcctcacgttcatagcggtgacagcatacagaagaatatgtatggtgtactcattgcgttgatacctgcgttgctggtgtcattttatatgttcggactgggcgccgtggtggtgaccttgacctcggttgccgcctgtgtattcttcgaatgggcgattaccaagtttattttgaagagagaacgctctaccatctgtgatggttcggctattataaccggtgtgttgctggcattcaatctgccttccaacttgccgctttggattattatcatcggtgcgttggtggcaatcggtgtgggcaagatgactttcggcggattgggttgtaatcctttcaatcccgcgctggtaggtcgtatcttcctgctgatttcttttcctgtgcagatgacttcatggccgttggttcaacaatggggaagttataccgatgctgaaaccggtgctactccgctggcattgatgaaaatggctgtaaagggtgatgcaaatgctttaggtcagttgcccgatacattaagtctgtttctgggtaataacccgggttcactaggtgaggtgagtgcattggctttattgcttggtctgggatatatgctatggaaaaagattatttcctggcatattcctgtatctattctagtgacagtatttgtatttgccgggctgatgcatttggttgatccggttgcttacgcatctccgttggctcacttgtttacaggtggtttgatgttgggagctattttcatggcaaccgactatgttacttcgcctatgactcataaaggtatgattatttacggtgtggctatcggtttcctgaccgtggttatccgtttgttcggtgcatatcccgaaggtatgtctttcgctatattcattatgaacgcattcactccgttaatcaatacttattgtaaacctaaaagattcggggaggtcgtgaagaaatgaaaaaactagaatcatctttgaaaaacatggttatcgtgctgacaggcgtaaccgtggtagccggagcattgctgggttatgtgaatgagttgacaaaggaacccattgcacaggctaatgccaaggctttgagtgatgccattgctatcgtagttccgggatttgacaataatcctgccgaagctcctgaaaccatagaattggaaggcgttacttataagatatataaagcaaccaaaggaggagaatttattggtgcagccgtagagtcttctgcaaatggttttggtggtgcgttgaatgtattggtaggtttcgataaagagggtaatattatagactattctttgttgagtcatgcagaaactccgggactgggatcaaaggcagccgattggtttaagaaaggcggcaaaggcgatattactggtatgaatccgggacagaaagcattggttgtaaataaagatggcggtcagatagatgcaatcactgcttctactatcacgacacgtgcttttctgaaagctgtgaataatgcttatgcggcatatagtggccaaaatgtggatggttccagcggtgcgacacagcaggtgtctgaaactgctgccgatgcccccaaagcagctaaggcacaatgtgagggaactcaggattgttgcggacaagcctgtgactctgctgcctgcaaagctgcttgtggtggtaaatgtgatcctgctaactgcgacaaggcggactgtaaaaaagcagaatgcccaaagcaagattgtaaaaacaaaaaataaggaaggagcagactatgaataattttaaagtattgatgaacgggattgtcaaagagaatcctacgtttgtactccttttgggtatgtgtcctacattgggaaccacttcttctgccatcaatggtatgggtatgggactggcaaccatgtttgtgttgatttgttcgaatgtggtaatttcatctatcaagaatctgattcctgatatggtgcgtattcctgcattcattgtggttattgcatcatttgtaaccttgttgcagatgattatgcaggcatatgtgccggcgctgtatgctactttgggattgtttattccgttgattgtggtaaactgtatcttgctgggacgcgccgaagcgtttgccgcaaagaacggtcctgttccttcattctttgacggattgggtatgggactaggatttacacttgcattgaccatccttggtggtgtacgtgagttccttggtacaggtaaattgtttgatatcgctattatgccggagcaatacggaatgttgattttcgttctcgcaccgggagccttcattgcattgggttacctcattgcgattgtgaataaactgaagaaagcataacccgtaaaaagtaagaaaatggaatatatattgatatttatcaccgctatatttgtgaacaacattgtgttgtcacaattcttgggtatttgtccattcctaggtgtatccaagaaagttgagacagctacgggtatgggagcggctgttgcattcgtgcttaccatcgctaccattgttacctatcttatccagaaattcgtgctcgatgctttcgggttggaatatttgcagaccattgcatttatccttgtcattgcagcattggtacagatggtggaaatcattttgaagaaggtatctcccgccctttatcaggcattaggagtctttcttccgttgattactactaactgctgtattctgggtgtggctattttggtaatccagaaagactttgatttgttgacgggggtggtttatgccttctctacagctcttggttttgctttggctatggtgttgtttgcaggtatccgtgaacaattaagtttggtgaatatacctaaaggaatgcagggaatggctatcgcattggttactgccggtctgctggcaatggcattcatgggattttcaggtgtagacaaaggcttgggtgttttgtttggaatagaataaattcacttcatcgttaaaataaaccgattcagaagtccggagcacagcttcggacttttttattagaaagaaatccattgttcttgtccataaattcaatttttatgcttatttttgcattagaattaatagagagattaaatggctatgaccttgattgtactcgcggccactatggggaataaatatggtggattgaaacagctggagggaataggtcctaatggcgaaacaatattagatttttccatatatgatgccgtaagagtcggatttaataagatcgtatttgtcataagcagacattttgaacaagaattcaagaaactggtatcaggcaaatacgaacatgtggtagaagtggagtatgtttatcaggatgtggaaacgattcctgaagaaaagcgtaatccgaagcgcaaagcactgtacggttcggtaagagctgttctgatgggagaagagttgattgactctccattcggtgtgataaatgccgtgaacttttaccaaagagaaagttttgaattgttatataataatctggtgatgttgggagaagctgactaccatagtttcaatatttgctacaggctgagaaatgtattggcggaaagcggaggggttacccgtggtatttgtgaagtggatgaaaaaggatatctgttgtccgttacagaccgtgtaggagtagaacggataagtggaaatccgatgtatcctaatgaattacataaatgggtggctttggatgacaacagcttggtttcaatgaatatgtggggatttactccgcaggtattcggtgagatgaagaaggcgttcgataagttcatagatgagaatggaatggatatgaaagcccattattctattccggcttttatgaatgagcgtattgctgacggagtcagggtgaaagtgattgagacacctgccagatggatgggattggtatcgcatgatgacaagatacaagtcctgcttcgtatcaatgatatgatacgaaaagggatctacccgtcgaagttgttttgaacctattagaaaacgacagaatattaagtattatgaaagaaagaattttagtaacaggaggaaccggctacatcggttctcatacggtagtagagctgcaaaatagcggttacgacgtagtgattgtggacaatttgtccaactcaagcgccgatgtggtagataatatagaaaaggtttcaggaatccgtcctgcatttgaaaagttggattgcttggatcttgagggaatggataagctgtttactaaatatccgggtataaaaggtattattcattttgcggctagcaaggctgtgggtgaatcggtacaaaaaccgttgttgtattatcgcaataacttggtttcattgattaacctgttggagttaatgccgaaacatggagtagaaggtattattttttcatcatcatgtacggtgtatggccagcccgatgttcttcctgtaacggaagaggctccgattaagaaggctgagtctccgtacggtaatacaaaacagatcaatgaagaaattattcgtgatacagttgcttcgggatcgcctatcaatgctattatgttgcgttactttaatcctattggcgcacatcccactgcattaataggtgaattacctaatggggttccacaaaatttgctaccttatgttactcagacagcgatgggtattcgtgaaaaactgagtgtgttcggggatgattatgatacaccggacggttcttgcatccgtgactatatatatgtagtggatttggcgaaggctcacgttatcgcaatggatcgcattttgaataacaagcagaaggagaaggtggaagtctttaatattggaacgggtaaaggcgtttctgtattggaactgatcaatacgtttgaaaaagctaccggtgtgaaacttaattatcagatcgtgggtcgtcgtgccggagatattgagaaggtatgggctaatcctgattttgctaataaggagttgggatggaaggcagaagccaatttggaggacactctacgttcggcttggaactggcagctgaaactaagagaaagaggaattcaataagaattaagatatttttagaaagaccgatgaacaaaggacgctagtgtggcgttttatagatgcaaataacctgaaacccctcttggatatgtgaatacctgattggcggtagttatgttactcaaaacatagagcaggctaaaaaattgcatagtagttttgtcgtgttttattttgtgtttgtgttgtggctgttctccgacgtgagtcgggggacagttttttttctgactatttagttgttttttagttatttatggctatatttgtcgaaaataatcacgcactactttatgaaaacaaaattttggatcatctgcttatcagttttctttgtgtcttgcttgcgtaatatgcatgatatatatacgggggaagaggaagaagaggaggaaaaaatcaataaagacgatttttttgattttactactgtccgtaatagtcaacttatcattgattatggcatgaaagtacagactgctttttatctgtatgatgaatatcctatggaattagttggaaatacttgggaatttaaagatataaatcccatttatgccgcttcgactgatatgaatggtagatttttttcaaaagtatctttgccggcttatttgaaaaaggtatggctggtaactgataatgtgttggttgtatcacctgttgaattggaatttctatctgacggactaacctttaattatgttgattataaggcacaactgtctgccaacgggcattctagagcggtaatgggaggagtgagttatcctgacggatatgatgtattgggtaattggaatgaaaatggggttcctgattatttgttgcctgaaaagttggatatacccggtgcttttttagagagatgcagtaatttaagccgttctatagtagtagataatcgtaatttgctggaaaggtttccggaactacgtacttcagggagtaatgatatggtaataactaaatctacaggtttggttgcgacttattttgatttctcgtctactgcgtgggaggatatggttgcttattatacttataaagaaggagagtctgtggacatagctaccataaaaaagaccatcctgattccacgttccagtaggaatgctcctaaatctttagtcggtgagcaaataaaactaaaatattggaataaggaacaaagcaagtatgaagatgaatttccccaaggtactcatattggatggattttattgggaatgggatttggaaaagaaaagggtgtttttcctcgttattctaatcctgcatataacgataataaagagcaacgttcagttttgttaagtgatccggaactggacaattgtttctttatggctatggaagataatgtggacatgcgttttaatgatgtacagtttgctattatggcgtctgcttcttcttctgtagaacctactcctaatataccggatgaagtaaataagggtgaaatttcgtatgtagtcaaagggtctttggcttatgaggacaattggcctgataagaatgattacgatatgaatgatgttgtgatatattattccagtacagttgtgaaagataaatcttctaacgcattggtgcgcaccactactacttttactccgatgaatgatggtgctacttatacaaatgggtttggttttcagttggattacgtagggaaggagcatatagatttggtgcaggtgagtcaagaaggtaatgtgatcggaaaaaactttgagccgggaatagaaaagcctgtattaatacttttttctgatataaagcctgttctcaaaaagcctgtgactgtagtgatcggatttaaaaaatatgataaagtaagcgacatggatgcttatccgccttacaattctttcatttttgtgaataaacgttctcatgaagtacatttgtcaggctataagccgacaagcgtagctgatgagagtttacgtggtacgggtagtgatttgagtcaagactccaatggtatcccaatgtattatatagcagaagataatatgcctttcgctataaatatcagtaacagtgaatttagatggccttcagagaaggtgtctattactacctattatcccgagtttaaacagtggagagattcttttggcgcggattataaagattggtatttacatcctaaagaataataaagggtgaaaggcactgttgtttttgataaatcggactaacaggactttttacttgaaaaaatgtcaccttttgaagccaagtgattcaatctttttgtacttttgcggacaatatgattttataaaggaaaactcacatggattcagtctttattacgacgcgtaagcaacggattatcagagaactaagggattatatgttgattgctcttggtatgctgatgtatgctattggatggaccgtctttttgttacctaatgaccttccttcgggtgcggtgccaggtattgcttctatagtttattgggctaccggtttgccggttcagtacacttatttgggaataaacggagcattgttgatactttctttggttattttgggatggaagtttagtgtgaaaaccatctatgctgtatttgtgctgagttctattctgcctatcatacaggatttgaccgggggagagtctttaatacatgaccaacctttcatggcttgtgtcttgggagcctttttctgcggaggtggtattggtgtcgctttttctgccaatggtagcacaggaggtacggatattatagctgctattgtcaataagtatcgtgatattactttgggccgggttattttgatgtgtgatttggttattatctcttccagttattttgtattgcatgattgggagaaggtggtatatggatatgttgtcttgtttatatccagctttgtcttggatcaggtagtaaatagtgcccgtcagtcagtgcaattctttattatttctaagaagcatgaagaaatagggcatcgcataaataaagaccttcatcgaggagtgacgttcattgacggagtaggttgttataccggtgcgggtgtgaaaatgatgtttgtgctggcaaaaaaacgtgagtctactactatattccgtttgataaaagatatagatccgaatgcatttgtatcacaaagtgctgtcattggtgtatttggagaaggctttgatagaataaaggttaaataagagttccgaagttaaaaaatagaataagggcgttctgaatggacgcctttttttatgtctgttttttgaatgaacttcaaaggatataagactttgttaactgaatgaactttcataatgtaagtttgttgtctgctttatctcgaaaaataagtataaaataatattttgaaattatatcagattatattttgatatcaaaatgttagtttatacctttgctgtataaaataagaaatgataaactaataaataacctgatcatggaaacaaaacttacagaagaaacccgagtagaaagtgatttaattggtgcccgcgaaattccggccagtgcattgtatggtgtgcagactctaagaggcatagaaaatttcccaataagtaaatttcatctaaatgaatatccgttgtttatcaacggtcttgccattacgaaaatggcagctgcaatggctaactatgagttaggtttattgactaaagaacaaaaagatgccatagtgttggcgtgtcaggaaatcttaaatggtgagcatcatgagcaattcccggtagacatgattcagggaggtgccggtacttctaccaatatgaatgctaatgaagtcattgctaaccgtgctttggagattatgggacacaaacgtggcgagtatcaatattgctctcctaatgaccatgtgaactgctcgcaatcaacgaatgatgcttatcccactgcaatccatattggcatgtattattctcatcttcgttttctgccttatttggaatcgctgattggtgcattccataagaaaggagaagagtttgcgcatatcatcaaaatggggcgtactcagctggaagatgccgttcctatgactttaggtcagacattcaatggttttgccagtatattgagagatgaaattcgtcatttgaatgaagctgcggcagacttcctgacagtaaatatgggtgctaccgctattggtacaggcatttgtgcggaaccgggatatgcggaaaaatgtgtgaaagcattgtgtgaaattacaggttttgatttcaaattgtcgtcagatttggtaggagctacttcagatacttcctgcttggtaggttatgcttcagctttaaaaaggatagccgtaaaggtaaataaaatatgtaatgatttacgtttgctggctagcggaccgcgttgtggcttaggagaattcaaccttccggctatgcaaccgggatcttctataatgccaggtaaggtgaatccggtgattcctgaagtgatgaatcagatttgttataaggtaatgggtaacgaactatgtgtgactatggctggcgaagctgcccaaatggaactgaatgctatggaaccggtgatggcacagtgttgttttgaatctgtagatttaatgatcaatggttttgaaaccttgcgtacacgttgtgtagaaggtattactgctaatgcggaacgttgcaagattgaagtgcataacagtattggtgtagtaaccgcattgaatccgattattggttataaaaactctacaaagattgcaaaagaagcgttggaaacaggtagaagtgtttatgaactggttttggaacatggtattttaaataaggaagagttggatacaatcctaagtccggaaaacatgttgaagccggtaaaattggatatcaagcctagaagataaatttatttcaccacagactacaggaaggtaaagaacttgtttcatgaagccggcttcaatatttgtaaagccggctccatgagtggtggcaccagttttatttctgccgataaattgatttctagaaatccggtatagtggtttgccactgctatagcgtataaattgttttgccgatattttatcggcagacagtttgtatagcctgtggtatatttttttagaactttctgaatgtgaggcgtgcataatcagatttcagaattagtttcttgcctgttgctttttccaccttaagatgattaatagcttgattaagtccgaaaggtttcaattcattcagtgtcgttagtttttcttcatctccccggtggcggaattcactcatggttacctcatctcctttataagagaaacgtccgatatgagtgcctccatttccacctttggcactgatttccaccaaatgtaactggatactataataaatgcggttacattcttctattttcccattagtatattctatagtcattaattgccatctgccatctaatttgccgttgatgggagctttgtcacaactgctgattcccagcataaagagtatgaataataatatttgtttcatatgttgattgggttgacagttaaaacttctatttattgcccgatttgataattccttgtttgcggataaccagcattccaccataattatttccaagtatgctgccgcgatccatagctccggatacagtgaaactccatcctttcagttgttgtggagcataagttacttcaaacaaagagttgaattgtttcttgatctcattcagaggattatcataagtaccccaatggcgggagtaggagagcagcatacgataacttagcgactgacagggggaaccgcagaatcctatgtgatgtgccagtacacgattgctgataaaagtaatctgtccgttcttgttgtaaataggtccgggaagtaaaggattacctattcccattccccaatgctgccatccttgatagaggtagtgattataataattatctttagcactgatttgctcttcaaatttcccccaaaaggaatcatacagcataggtccggtttgatcttttgttcctaatccttcgtatacaaaagtatcaatgaagcggtttttgggaaaagttatttccagtccgatgtgtccgtctttccaacgtccgtattggaaaaacatttgggagtggtcgtcgaaataatgttcataatagatctttaccttccatcggttaagataagctgttgcggcaaaattccagctaccgacatggtttccgtagatgtttacttgttcgccttcgggtgtggtatcatctccggccataggaaccaatacacgcataaagtcaacaaaccgggtaggcatatctattacaggctctttttgtcctgcaatatattggtctccgccaaattgggcggacatttgtattcctccttcaaattctaccggaaaatgttctttgtttcctactttggcgaaaagcgatttactgtggtaaagtacatcaatggtatatgggttgcctatggaggtgaaatgttcctgccatttgtcatcagtaaaacgtccataggctatgtgtcctttcaaatgaagccatttatgggtacctggtatggctacataatcgggaacttccaggcgtatttggggaatggggcgggcattatttgattctaccatacctccgctgcttaacttggaattctttaattcgggcaagcgttctttgctgccgatactcaggttcaaccatcggtaactgaggtttgcataggcttgttggatgatgaaggaggaggtgaaattgtaggcggttgccaaatccagtcctgcactgaagccgaaatgttggtttaatggcattgtatgtgcaatccctgcccgtaaataaccattttcggtattggcagaagataaaccttgcctgttggcagtaagccacatcggcgcgtaggttcctttacccgatgttcctcccatctcaacgatatattctgttttgacagggagttgggcattggtgtgctgcgtaatagatattaacagaaattgtaataagaatagttgtattttcttcatttagtttatgtgtttagtgctaagcttgctaaaacgaaatcggtttatcagtctgccatcccgaacttttgtgaaaaatttggactctaatcattttatgtatatgaaaagtttcactaatgttcagaatggccgactgtataatcatatcagcaggaattttggcatatttattttcctccggcaggcaggtttttcagccagtaatcagccattgtctttcgcagatgcaagctggttcccttgccttcgtaaattccatgggaacgcatcgggtaagaaatctgtgagaagatttttccgtgccgtaccagttcattgaccaacatttcacaattctgataatgaacattgtcatctcctgtaccgtgaattaacagcaagttgcctttcaatcctgctgcatacgagatgggagaccctttgcggtagccctccggattattttgaggagtattcatataacgttcttgataaaccgtgtcatacagacgctggtcggccacaaaagcaatggcaatgcctgtgtggaaaacatcgggataacggaacatactgttcagcgtctggctgcctccgccactccagccggtgataccgatacgtgcggtgtcaatgaaagagtattgacgtgccaagtcttggatgcctcttgcctgatcttcactggcaaaggttccgacttctccataaatacatttgcgccattcgcgtccacggggtgcattggcaccacggttctcgatgctgactatgatataccccaggtttgccaagtactggtgccataaacttcctccgctccatacatcctgtacggtggcgttggcaggttctccatagacatcaattatgaccggatattttttgctgggatcaaagtttacgggtttgagcatccatgcatctagttccagttctcctgaacgggtttttacaaattctttcggttgcagccccaaggctttgtattgctccttggcttttgcattgtcagtaatcagacgtatacttttatgggcagggaaagacaccatgtcgattacagggggagtttccgagttactgaatgtatggactgcccatttgccggacggtgacatgatataacgatgttgcccgctttggtcaacaggacttagccgctttacctctccattgccgaaaagacgtgcccggtagagatagcgctgggtgaagttgtcgggagaggcgataaagtacacaaaacctttatccatatccgcacctacttcttgaatataatcaaaagctccttgggtgatgggcttgatttctttaccatcacggcttacacgatacaggtggcgccatccgtcacgttcgctttcccaagtgaaatacttgttccctttcaaccaacgcacattgtcattcgtttccaaccatgcggcatcttgatcggtaaagatattgacgagggtattttcacctattttcgcaatccatactttattggtgttttgggcacggttcatttgctggatgaacagttcgttgcagcccggaatgaattccatacgtggaatatagtggttgcgtgtatcacctggaagagccagccaagtggtgtttccaccgtcggctgatacatagcctacttttacagcggagtttgctgttccggctttagggtagggaaaacgttggattttaggataaatggaatctacattattgatgatatcaaaccatcccgtaccttgggtatcgctttgccaataggctatgtattgcccgtcaggactccagcggaaaccgtcgcggcagttgaattcttcttcgtatacccagtcgaatgttccgtttacaatttcattatttccgtcttgagttagttggttgattttcccgtcaaccagactctctacataaatgttgtttctggagacatatgctacccggctggcatccggcgagaacttggcgaacatcaaagtagcttccggcaagcttttgcccaattgttgcagtttgccgtctttcaaattaagcacccagtaatcaccgcgggtatcataacgccatacgcgacgggtattggtatagatcaatactttggagttatcctcgctgaatacgaaattgcggacagagataggttttcctgtttgcggattcagaagcatattggcagggatcagcacttctttggaattgtcctttgctttgtaggcagtgacctcgtatgctccctcggcatttttctctattttggaataacgttctccatctttcatccagttcacgttacttccgccttctgtcttgatcagtcctccgtatacggcctcctccaatgtggggatacgttgcgcatgagttgtggttccgaaacagaataagcataagactaatgtaaataagttctttttcgtcatagttattatgaatcttttactaaaaaatagatgtccatttgaaaacacaagtatgtattgagattccggatatctgttttcaaaaaacgggcgtctattttagaaaaacggacgcctgctcttttcttttttatttaattcctaatttctgtttgattgcagccggaatagcatctttatgcaccatgaggaaaatagtcttggcacgtacatagctttcggacatattcagatacccgccaaatgtattgcgttctgtaccccaagaatttttggtgatatagtatttggtcccgttctggtctttggtaataccggtaagatgcatcaggtggtcatctgtagtgacaaatgcttcataaccttcctgacggacttccggagtgacatttacttcgggacacggtttttcaaatttgtaggcttccgccagcatctctctttgttctttagggtccattttctcaaaacgtgcacggtcggaacccgaaaggtcttccgcttttttcactaccggattgatggctacaccatttttgaatgaaaaacctttttcactgacatcaccgtcccaacatacggtatatccgtgggtcaaagcatagtcggcaacttccatcatttcgtccagcggaagattgtacatttgttcattttcccaattgtcgggtacttccggagagaatttctggtaatacggtttgtgagtgaaactagtcagttcgatataatcgtccatgttcaaacccagactttcggcaaaagatttcggagtgtactcttttcctttgtaagtgaacttttcaggaagttctcctagataagtatcgaaaaggttgttgatcagcttgtagtattccgggctgcgacgtttcatcttaacggctgtgtttcctaaagcgttgatatatctcaccatttcgccatggttatgtttctctgagttatagttgattccgtgatatacttcctcgggtacgatacccacttggttgaaagcattcttccatgtgtgtgaaaggcttccttgtcctaaattcccgttgcctccccggtaatagttgtcttccaattggttcaagtacttttggcgtacaatgaacatttcagaaagatcatattcccctttgcccatacggagcagttcggattccatgaacgaagtggtggcaaagcaccagcaagttccggtagaggcctgatttttgactggagttgctttctgtgatgcaacagtcgtgaatttgtaaccactttcttgtgcatacatggctgatgcacagcatagcagtgcggctagtgtgaatacttttgtcttcataagtttgtttttaatatgataaggttaacaattaaaagccgaagcgtgactcaatccaatattggtttgccatttcgtcccagcgaaggatggtggcgcctataaagtctgccgtgtagtctgtgagataagcacgggctgcttcttcccctttagattgaaggatactttggtattgtgcttccacaaatggaagttcccgttgtcctttttcctcgaaatgacgaatatttttttccattactttgcgggcagttccccatcttacagcagccagtttgttggcgcggcgatagtgccataaggcggcgtcgtcgcgatagcggtggttaccgcagattttatacatagcagggaaatcagtaatgccacagaataccggaacgcgcgggctttgtccggggttgtccatagagaaccataccacaccgcctactgcatcgggcagccagttgcgcaattggataactgtagaataagcacattgcggaactgcgatattgcgtactgatttcacaactccctttttaataccgttcagcatattcagttcatcgccacgcatccacggattggctttcgggctgataatggtgtctacttttccggtttttctatcttttaccgtaactttcagattctgtgtcatatccagcggcgttccttcgtatgtttcccggagcaatgccataacatcggttacagatacttgcttgtcgggttttacactgataggcagttcttctgcttcataatcaagctttaatgacggtgccagtgcattcaggataaagtgctcgcgggtgctgaaggatttcagttggccggagtaattctttccgctataagctttccaaaatttaaaaggctcttttccatcccaatatcctaattttttagccacgtcaaatacattttcggaagccatatagtggtcgggatctttcagattgagggtgctgattcgcgagatgttggcagatacgcctacatgatcatccggaatacggactgccgcccatactccgccaattttatcttttccttctccgaagacttcgaagtgccatacttcatcaggatcggcaatggtcagacattcgccgctgtcgccataaccgtattgttttatgagatctcccatcaggcggatagcctcacgggctgttgtacagcgttgcaatgccacacgttgcaattcttcaatcataaacatacctttgggattttccagatccctgcgtccgcttacggtagtttcacctatccccagctgcttttcgttgatgcaagggtaggaggtgtccatgaaggcatatgtttttctagcttgtggtatttgccccttgatttttacattagtctggtcggctacaaactcggtatgcatacggccatcgtaaatattcattacagtatccctttcataactttctgccggaaccatgtttacccaggttcggtaccagctgtcgcatgtatgactggttataactgatccatcggtagttgctttctttcctaccataatgctagtgcagctttccggatcctttgtgtaattcgtttgggctgtgacactttgtgccatgactaaacccaggattgttaaagaggctagtagtttcataaaggtcgttttattactattgcgtttcaaaagtatataaaaaaaactattattcagaactttatcggtttaattttgtaatttatgtctaataatccagccttttttgtatttttgcagcaaatacaaaaattgggagcacatgacaactagtatagacatagctagaaggatagcagaagttaaccatcctctcagtagagaaagtgttcacgcattagccgaaatcttagtttgtagaaaatatcgtaaaggggagattgttttgcaggccggtgaggtttgtaaagcgatgttgtttatagaaaaaggaatgctcagacaattttattataaatatgataaagatctgactgagcatatcggttatgagaacggaatgattatttgcatagagagttattttaaacaggagcccacccgcttgatggtggaaactttggaagcatccgtggtatgggagttaccccgtgtggaagtggagaaattgatagatcaatatcacgatatcgaacgtctttatcgcggttttatcgaacattctttgatagagtcacaggtgaaggcggacacgcttcgttttgaaccggctcatgaacgttataacagattgttgcagcttcatcccgaaatattgaagcgtgcgcctcttgtgtacatcgcttccttattacagatgactcccgaaaccttgagccgtgtccgttcttccttgctttagaattgataaatcaatcctaaccgggtttcaaaggtcttatattttatgtcctcatggtaggaataatgtgtgtggcggtagtaataggacacttccatattggctttgaagtgggagcttagattcaactcgataatcggattcactacagcgagcattacatttcctttgtctccctgcgcattcagatagagcggatctattgtttccaaatccttgtgttcgtatcctttccaggtaaaaatctggtaaagatgcatattcagtgcgaacatgccgtaacggccgaagtccagaatggtgttgttctttatgctgtatccgcttcccatattgtaattgcggtctattacgttgtaatagtcggtaaggcttccacccagcaggatggcactcaggaacacacgctgttccaaatttaccaggctgttcattcgggggaatttataaatcatacccggtcccacactggcagcttccgaaatcttgtaagggatacgccccgatccgtcaatcacttcctcggaatcaaaatagttgaagtgctggaagataccgaacatcatttccatgccggtagtggttttcaggggaacaccccatagtttgcccatcaggttgatctggctgataagaggctggttcccggaaagaccgaaggtggcccgcgcggtgaagtaatcgtatgggccgtcattcactttatcgaaggcatctccgtattgtacccggaattcaaggtagggattgtgctctccacggaacaggtaattgtcatcggccagataacggtcaccggcacctatggaaaagtgtaccggaatgcggtcgtaatcgtggtatttgtaatgagagcgttttactttccacatctcgccggttatcattcggttcaatccccgcatggggcagatcaaggttcccaaaaactcgcgggtgaaacgtgagaaaccacgcttggagtcgtccagtaccaaagaagacatacggtgcgttacttctcccagggcgatgccgcctagggtggttgccatcaggtcattgatggcgggcggctccacttctgcggctatttcccacatcaaactaccagcaaaggcgtatggagccgattcccaaaaggtaagtccgttgctgcgtgctgcattgaaataaagatttccgtgataggggtgggcgaacaggttggtggagaattggtcgttatcccatacaaaaccatgcttgatattgcgccgtatgctgccgatactgattttggcaaagtcttcgttcattacataacggtcgaatgcccatactccgacattcattccgaaagtttcggcggcggcacgccaagggtgttttttttgcaggcgaggatcggtgaatgtatacatggaatcggggcggtggagcatctgggctgtgacgttcccggcacttaatgccagcaggcagactaatgcgatatgctgtagtttcatactgtatggattagtttatactagggtgacggggctgcttaaaacaagataacacctgcttcgaaaataggttttttttcgtagaacttatttttatcatagtagcgcgtcatgccgtaaccacccgatgcaaagaaactgattctggatttgaatttatattccagattgatacgggcttgcaatgaatacatgcgttccggtgtttccgcatcttcattttcaaagttttctatatggaaataacctaagtcgccacttagttccagtttggaggcgatgggatagtaaagaccggcacggtagaacacacagcccgaaaatttgtcattcaaatccagatagtgtgtaccgatacccagcatggtataactccggcggtttttaaaacgcacggcagcattcagtttgctggtgttacctgcaaacagcatcatctggatacgggttttgggagtgatattcaccaaacctagtttatgggcggtagtatccttgctatggttgatgattcctatttgtattccttttacattcccgccacacaggttgagtaaaccgatttgcgcgccgcttacttctccggcgtagttgccgggagcgaactgcacaccgcgtaacttgccttggcaaacattggtcagtcctgagaattgcagggcattttccgtcttgacggcgatatttaccgcaccgcaaagctgcaagcctctgatttctccggcagcgatattgctgatggcggagaattgcataccattcacgtttacacctacattaccaatggctgagacttgagcgcctttggcttctccgccactgatattgagcagggtggaaacttgtgctccgttcagtttctcggcagatacgttcatcagtccgccgatagcgacgccattttgtgattttccggcaatgttggccaagccggctatctgaactccttgggctttgttgccggccagattcatcagaccgccgatggtaactcctcttgatatgtttccggcaatgttgcctaatccggaaatttggataccgttggctttccctccggcaacattcatcagtccgctgagcatgatgccattggcattgcctccggctacattggcaatacctcccagttggaaaccggaggcgtggcgtccggtaatgctggcaaggccggagatttggaaacccgtcatatcgttttgtacaacactggatacagcgttgataccgattcctttcagttgatagatatttgtaagcagaccgatattcagataagtggttttgacactgtctttcttcgcggaaatgttcaaggagatgttggggccttttttaagcttgtcctttttctgggcaaaagcaggagttgacatacctgcacaatatcctaaaaggagtattgctgctatacgcatattcattttcatacatttttagtttcttgggtgcaaatgtaataaaaatgtagatataagggggaattatggggagaattgatcggggggcaagagtaaaattatgttttgttttgtctcctttcacgcatcatgatccaggtgtccatatatgcggatgtataacctgtaacatctataatgtatagcctgcaacatctataatcttcagacttatacattatatatgttgcaggcaggttcttttttctgccaggtgttattttacttcctgatataagaaacgtttgatactctttttaggagttttctcgaattcttccggatagatttttacacgggctatttgtgaatatgcaggaagttctgtattcaagttgatacggttctcttccatagcctgtgctatcgcgtcattatccagcccatgagcaaaggcatcgtcgaaatcgggataaaccaaagccgccagtttgctgtctgcctgctgtatgataatgctttctgaaacgaacggcatgttattcaatttatcttcaatctcttccggataaatattctgtcccgatggacccaacagcatgtttttgctgcgtcccttgatggtaacgttgccttccgcatccataacacccaggtcaccggtatgcaaccagccgtccttgtctatcacctcggcggtagcttcgggattcttgtaatagcctaacattacattaggtcctttgcatactatctcacctactatattctcagggtcggggctcaatattttgacttccatacgaggagccgcctttccgcaggaacccggcttgaaatatttccaatcttcataacagataatcggagcacactcagtcatgccatatcccacggtataggggaaatctatacttttcaggaactgctctatttcttgattgaaggcggcacctcctacaataatttcgtagaaattacctccgaaggcatttatcatctgttcgcggactgtggctttgattttatcattgatgataggaactttcagtaaaatcttcatagccggggtttccagtttgggcagtacattcttcttgatgattttttcgataatcaatggaacggctactaccagattgggtttcacttcggaaaaggcttggaagatgattttcggactgggggtacgggtcaggaaataaatatggcatcccacacagaattcataaaggaactcgaaagccagtccgtacatgtgtgccatagggagcatggaaaccagcttgtcacccggattcattttcaagacatcaaaagcgaactgggtattcgaccacaatgcgcggtaaggaatcatcactcctttggaataactggtcgtgccggaagtatagttgatcacagccagttcttccggtgtatcccggcggtagctgacatgttcccggcggaaattgcgcggatatttctttccgaacagttcgttcagatgatcgcgtgcatagtccaatttggaactgcgggaaactagcagggtatagtcattcatcaggataaccccttctaacaacggcatggcattttcattcagattctcccataccatatcgcccaccatcagcaggcgtgcttccgagtgattgactatattatgaatgttgtccgatttgaattcgtgaagaatgggaacaatcactgccccgtatgtaacggcagccaggaaagtaactccccaatgagaactgttgcggccacagacagctatcttgtctccttgcttgatgccgcttaattcgaagatgatgtgtagcttttctattttgcgggctacatctttatattgtaatgtggcacctttataatctgtaagggcatccaagtcccagtttttctttatactgtcttccaggaaggcaataaaactctgctccattgtatatactcttttgtttatattttgcacaaactttaatcaaatgtgcaaatataagactttctttggagcatacaaattaaacagaaggaaaaatagtgattagtggttaatgagctgcgctgtgatgtcgcatggatatgaaccactaatcactaaccactgatttttattctttgctgctgaaatacttcatgaactgtgtacgttcaaacggattgctggctccggtagacagtgcgttcatcgagctcttgaattcgctgatgtccttgtagccttgccggttcatccattgggtcatttcatttgtcatatctgcaatggcctgattgcctctttggtagatgacactgcacagttctacagccgaagcgcctgccagaattgctttgactatcgcttttccatcgtgcacaccgcccgagatggcatagtctgtctgaggaacttgtgccgaagcgatagcagtccagcgcagtccgttggacaagtcggcaggagtactgaatacatcgcctgcagaatatgtcatggtgtcgatattgatatccggctggtagaatcggttgaacaataccacagcattggctccgttggcataaagctggttgatcagtgcgatggggttggtcagattgctgcccagtttcacaatgacggggatggaaatctgtttcttgatactgcttacgatatcgatatgacgctgttcgaaagaaccgtattgatattctttttcggtctgcaaggaaaggatgttgatttccagtgcgtcggcttctgctgcttccacggtacgggcaaagtctgtccattctgagttgctgaagcagttgatgctggcaatgacaggaatggtgcaaagctttttagtctgttcaatcaatgaaatatattcgttcaatgcatgagagcgtacatatgtgctcaagtagtcatctccttcgggagagccataagtagccatgtgatgtgcttccatcatgatctgctcttcgaaaactgatttcaaaacaatggctccggcgcctgccagctccagtttcttgttcttttcagcgctgtttgtaaggctggaactgctgatgattataggattgcgcagtgacaacccggcaaaagtggtttttaattgagtcatataaatagtagttttaatagtttcgttctccaaagattttgcttcctaccctgactagtgtacttccggcttccactgccagcggataatcgtgtgacatacccatggaaatttctttaaagtattctgaatcagaaaaatagttctgctttatttctttgaagaatgtatttaaggaacaaaattctcttttgatttgttcgtcgtcatccacattggtcgccatacccatcactcctgataagcggacatttttcaaatccttccatccgcctgtatccagcatttccctgcattcgtcaaaagagaaaccgaacttcgtttcctcttgggcgatatgtatctgcaataaacaagggatgacgcgatggactttggaagcttgtttattgacttcaaccaacaatttatacgagtctatggcatgtatcatagctacataaggggccatgtatttgactttgtttgtttgcaggtggccgatgaaatgccattcaatgtctttgggcagggtttcatatttctgagtcatttcctgcacgtggctctcaccgaaaatacgctggccggcagcatacgcttcttccaacgcctcgttgggatggaatttggatacggctaccaggcggacacccgcaggcagttcggaaagaacttcttttaaatttgcttgaatgctcattatctgttatactttctatttttttatcaggctttattcggtttttccggcatccggaaattcaggtttcacatccggttcggcttcgtatgggtaaacatccatgatggcggtttcggctacggacgcaatcacgtagtctgccattgtacctttcattccttcgtccagtttctttacagcgtcgcgaaggtcggaagcttgtaccagtacggtagtggaggtctttttctctgctccgcttttttcgtccagcgtaatgaagaacagcttgcacttaaaccagcggtcggctgcatcttcttcagaggggaacagttcgctgtagttggcgcgtttgatgtccgaaacagtgaactcgccgctgatatacggagtgatttcttcaataatacgggcttctgcttcagtaaagctcagcgcgtcaaccaaatagggttccgttactttcttgttcatgccgttttccatgactttttcgtaacgtatcttacattcaaaccaagtatgcatcataaaagtttattgttttattgaatattaaattggatacaaagatacaatttatttaatcttcgtctcccattttacttaatttcttcatgctttccttattccactagtttgcagctgttcaattgcatgaattcgtgaatcactttttcatgatcgcccattaatatgatgtgatggttacccaaaggattacgcataaaatagtctacgggtttgtccagtttgattcttgcctgggtgcggcaggcattgatgtagttggtattttctatcagttggcctgtggaaacgaaatactcgtccagacactctcccgcgcattttatcatcgtgatgcctcccggatgcagaataccctgtatggctatcccggtctccgtttcaaaatgattccggatgataaactgatccaccattttggtggcaatcgtacagtgagccatcactatttcgttctggtcatcgttgatgaatgccggattcgccatgaatcctgcctggccggtcagtgtcttggcgatgagcagagtaaagatggattgcaagtctccttcacatccggccgggatgccttcatcattcagcagggcaagtgccagacatccggtagttcctaatttctcaatcaacgagaagcaggagagggttaccgcatccagctttttcttttcgcagattattttcacggcctgataaagacgcatggctttcagcaaatcttccggagttccttcccggcaggcaatggcacggttggcaaatacggacgcctcatatcctatatcatcatcctttatctgataaaacagacaatacacttcctccatggggatatcaatgaactctattccccagcggcgtttggcaagcaggtaatctacattgctggccaccagccacggagaagaatatcccacaactcctattcgttttcctcttacctcgcgctgggcggcgaaagccttgtgatgatctatcagttgtttcaccatattggggatagtgccatgaataatatgtactttcattcctttgctgcgtatccatgtagctatttccagggaagcagccagtgagttctgttgtccgtcggtcagcagatggataggatagggaagtagttcgaagtgttgggtgaccattttttctaccccgcccgaagcgatgaaagccatccggtaggcatctgccggaatacttgcagcctctgtatatggtaccagatgaagcgtgaaaaacttctcgatttccacaaataaatctttatggcaatcatatacagattcaattctgttcaaggaggactggaaggttatcaggtatagattcatttgatattttgctttgttttactggaacaaacttacatgtttttttttaataaccctaaaaaatgcgcattaagataacaaagatttaaattcttaattaattgtttgctcggttggttgcgaaagtctatctttgcacttcgattaaataatttttataacattatgccaataatatccatcagaggaaacgagatgcccgcatcgccaattcgcaaattggcaccgctggccgatgctgcaaaacagagaggaattcatgtgtatcacctgaatatcggtcagcccgacctgcctactccgcgagcggcccttgatgcgattcgtaatattgaccgtaccgttttggaatatagtcccagccagggataccgcagctatcgcgagaaactggtgggttattataagaaatatgacatcaacttgtctgccgatgatatcatcatcactaccggaggttcggaagcggtgctgtttgcttttctgagttgcttgaatccgggagatgagatcattgtgccggaacctgcctatgccaactatatggcgttcgccatttcggccggagccgtgatccgcacggtgacgactaccatcgaggaagggttctccctgccgaaagtggagaagttcgaggagttgataaacgaacgcacaaaagctattctgatctgtaacccgaataatccgaccggctatttgtatacccgccgcgagatgaaccagattcgtgacatggtgaagaagtatgatctttacctgttctcggatgaagtgtaccgcgagtttatctataccggttctccttatatctctgcctgtcacttggaaggcattgaagaaaatgtggtactgatagactcggtgtccaagcgttattccgaatgcggtatccgtatcggtgcgttgattaccaagaataaggaagtgagaaatgctgtcatgaagttctgccaggcacgtctgagccctcctttgatcggtcagattgctgccgaggcttcattggatgcccccgaagagtacacacgcgagacgtatgacgaatacgtggagcgccgtaagtgcctgattgacgggctgaaccgtattccgggtgtttattcgcccataccgatgggtgcattctatacggttgccaaattaccggtggacgacagcgagaagttctgtgcatggtgtctgtcggaattcaactatgaaggcgagacggtcatgatggctccggctgccggattctataccactcccggtgcaggccgtaatgaggtgcgtattgcctacgtgttgaagaaagaggatttggtccgtgcgttgttcgtactgcgtaaggcattggaagcatatcccggaagggtagaagactgatatggactggaagctctttattgccagacgcatctatcgcagcaatgagggtggaaaagaggtgtccaagcctgccgtccgcattgctatgctgggcatagccatcgggctggccgtcatgattgtgtcggtagcggtggtgatcggtttcaaacatgaggtacgcgacaaggtggtaggcttggggtccgatatcgtaataactaacttcgactcccagcaatcttatcagacggttcccatcgttgccaacgacagtttgctccatctgttgaaaacactggaaggagtgaagcacgtgcagcgctattccaccaagccgggaatgattatgacagacgacagctttcagggaatggtactgaaaggtgtttctcatgaatacgactggaggtttttaaagaatcatttgcaggaaggggaaattcctgttttctcggatactgcctctaccaataaggtattggtgtcccgcactattgccgacaagcttcatctgaaactgggtgataaaatctatacctattatatagaggataatgtgcgcgcccgccgtcttactgtcgccggcatctatcagaccaatttttccgcatacgatgatttgtttctgataaccgacttatatacggtgaaccgtttgaatggctggcagaaagggcaggtgagtggtatggaactggaagtgaatgagtatagccggttggagccggtgaaggaggaaatccgtgcacgggtggatacgcaggtggatgcatacggaggtacttactatactcagacggtggaggaagtcaatcctcagatatttgcatggctggatttgctggatatgaatgtgtgggttatcttgtttctcatgacgggggtggccggattcaccatgatatccggtttgctgattatcattctggagcgtaccaatatgatcggggtgctgaaagcattgggagctgataattttgctatccgtaagatattcctcagtttttctgtattcttgataggcagggggatgctatggggaaatatcatcggggtggcattatgctttattcaatctcaatttcatcttttcaaactggaccctgccacttattatgtagatcgtgttcctgttgaattcaacatttggatttatttgttgctgaatgtctgtactttgctggtgtcggtgctgatgcttgtcgggccgtcatttctggtgacgcgtattcatccggcaaaatctattcggtttgaatgagaagattctctttctgcgttttccgtatatccggtattaatccttttttcctataatgctaaggtctttttcccttatgattaagtctttttatgcggtaatgtactacagtctcctacagtgaatcgtatagtccattatagtggactgtacggtctgatgtaatggactgtacagtctgttgtgaaagtctgtagtagttgatagaaagaaaagacctaattgttaggaagaaatgctttagtcgggcggatgtgttagaaccaaccctgctgcgaattcgtgacagggccggttctttatagagagaatgtaaagttacgtatagtatgtcacttccttcagttcacagtttgcagaagaaagaaacgaagaaaggcatgcttatgtttatcagtatgccgtggacgatggccacgggtacggcttccggtccggagcagcgtgcgatggctgccagggaaatgtcggaagaaccgatgcccgccgccgagataggcgccagataaccgaaatatttgcggaaaaggggagctcctatcaaggcggtcatttcccggaaaatattggatagtagtgcgatggtccccaattcggtagcaagctgcacaccgatggagggggatttgatctgcgtgataaggatggaggaaacggaataataggagaatccgcttccgacagccatgcagtcgaaaatactccagcggctcaagagaaagcctccgatggcggaaaacagcagagtgccgcttacggtggcaaggggtacaagcagtgttctgaaattgagggataagacaaactgcctgaggttgcggttgcttccaagattaatgccgagtaacagcatcagtacatatagtacatatacagaggtttggtgtacgtcgaagtccaccgcatagctgactccggctacgcagccaaacaagaaaaaggctagagttacaagactacttttcaccgcttgccccctttcctttgaaaaagatgtggtatactgcaagggaggccatcatgctgcccaatatgcttaatgaggagatgacggctgcctggccgcagaagtaaccaagattgtcaataatcagtctgttaagaccaatagagagaccgagtaagaaaagtagcagacagaccacgatatggatgagaggagtgatcttgcgtacttgggatttgtggcgtaagggatagcctataaggactccgacagccattatagaaatgaaagtaaacatgagattcaactgtttttctgattttacaatattacttataacacgcttttggacaaacgcatttacggtatgttggtaaagttgaaagaacggatggaccagattattttcatacttatgctttcaatttgaaactttttgttgtttttaaaacgggtgcaaaagtagaataattgtctttaatatgcaaataatatacatattaaatcttattgaagcgaaatatgatataaaacaaacaatatttgtgatatttcgttgtaaaacgaaggttttaaattgttacatttatagttttaccgaataatattgcatgtgcatgggtgggtgaaaacaatgaaaaaggggctgtttggggtgtgttagagaatataaagcgataaaaggtttcaatttgttatgctggataatgtgatactcttctgttttttcaggcagtgattacattggtggaaaagtgtttcttgcataacctttcttggcggataaaaacaaatcagggtttgtataaacaagccctgatttgtttttgtcggatcaagatggataaccggatttagaattcaaatttttctaatttcatcttgcccaattcttgcaatttaggaaccaaggttataaaatgtgcagctttttcgtgtgcatccagtgactcagcatctttccatgtttcgcaaatcataaggacatctttccgtgtcgcgctctcaaagatatcataagcgatgcaacccttgtcgtttaaagattgcgctaccaattcctttgctgtttctaagacagcattgcggttactctcgtttacttggataaaaacatttaatctgatcataattcgtattattaaattaagaaatgtatagttggtttcattctctttttattttctcataaactcatttttccgtctgaatttacgttgtaatttgaataccccattccatgcaggttgcagaaaatcgaataaggggagtagtgcacagaacttccgttcgccaaaaactttggcggtttttctgaaaacaatcagttgcatcgtgaagcgtgctgaccatagcaaaacggcaatgcctgcaatagtccattggtggagaagaatactgatggttatagtggcgatgatggctgtatagaacaagaatctgctgcaagtctcaaatcccatgagataacgggcggttccatgaaataaccggctggtagccgcatagcttattttctcttcacaccatattcttttatatttaggcatggcgattcgcatcagactttcagggctggcttcaactcgtgtattgtgtgcacgggctgtttcattgatgaacaaatcatcttctccacgttgcagattcaggtgggaggcaaatcccttctgcttgtagtacagtgttttccgataagccatattccgtcctgtgcccatgtagggatgtccggaaacagccatacccagataacgcatagaattcagcaacgtgtcgaaagtgattttcttattaaaccatcccggtactttttcgtagttgctgtagcctaaaacgatttcggtggcaggtgtgaaattacgtgccatctgtttcagccattgattgctttgcggacggcaatcgggttcggtaaataccagccattcatggcggctggctttaattcccattgttattcccagtttcttgtggctgatgtagcgtgcactgtcggggataaaggtatgatagagattgggatatttgtcttccagtaatttcaacgtattgtcacaatcatccgccgggcggtcgtaaatcacaatcacttcgaattccggatagtcctgctctaaaataaatgggaggttttcttgtaattcgtgggctgcgtcttttgccacaatgatgacagacagtggaggattttgggtatttatatcagtggcatatgctgtttctctgctgtgagtgtatagtttgttatatagccccagatagtaaacggcctgcgtggtgaataaggctcccgaagctattggtaagattatatctatggtgaatggttccatgtgtgatctgttttaaaaacgtgcaaaaatacagcaaataattgaattgtagcaggatgaatattctttatttattcaaaagttcagatttaattataatttaatgttaaaagtgtgttttcgtgaatatttttcaagtataattgctatatttaaagaagttaactgaaacctgtaacaagtcctgaccaacgggcaattattatgagaatacaatttgagattaaagaaagtttgatcaatatacttgatcagcttatgcattccgacttttgggctacggaaatcaaggaagatgagtcaggaaagaagattatcaagattaaagacttggcttataacttagaagccgtggccgaggtgatggggaatgaaatttttattagaactgctttgtctaagtacacgtatcgtatttatgaggtgaagggggagtgctggtgcgagtatgtgggggcctatcgcggttttttggaacagaagctccttccaataattactccgaaggaaaatctgttggaatgtgaggtgctggatagttccatattaggaggcaaacagaaaactttgcgtgagtatgcggaagataatttaaagctaaagaagttccgtgaacagaattttggtaataatggattttcaaaagcggatcatccacggcgtgtgtatgatgaatttataaaagaagatttcattccggaagataaataagaaacagcgccgctttgcatcaaagcggcgctgtttcttatttattcaggcagttggagttggtttatactaactcttctgaggtatatcctttgggcaatgcacgacaattgtaagccgatgccataatttcaccatatgctcctgctgaacggagagcgaaaaggtcgccacggtgtgctttgttcaaatcaatagccttgccgaatacatcggatgattcgcagatggggcctaccacatcgtaagtttccataggttcttccgaagtgatattttctattttgtggtatgcctgatagagggcaggacgaatcaagtcggtcatgccggcatctaatatggcaaactgtttgttggttccttgctttacataaatcactttgctgataaggctgccgcactgtcctactacggcacgtcccagttcgaaatgtaaagtctgctgggggcgcagtttcagatgcttgtgataagtggcaaagtattccgtgaagttggggatggcttgacggttggggtgtgcataatcaattcctaacccgccgcctacattgatatgttctactatgatttggcgggcatagagtttttcctgtagttcgtttacacggttgcacaaggctacaaaatcacccatatccagaatctgagaaccgatgtggaaatgtaagcctacaaattttacatgaggcaatgttccggccatatcaatcactttgtccatatcttccatgctgatcccgaatttgttctctgctagtccggtggtgatatttgcatgggtatgcgcacctacattcggattgatacggaaagctacacgggctgttttgcctttggcggcagccagttcgttaatgatttccagttcgggtacggactctacgttgaagcagaaaatatcataatccagacccagattaatttcccagtctgtcttgcctacgccagcatagactattttgtttgtcgggaatccggccttaatggctgcgcggatttctccgccacttacacagtcggctcccagaccgctttcgcggataattgtcaggactttgtggttagcattggccttcacggcgtaatgcacgcagaaattattgtatttgcctgcttctttgttgatgcatgacaaggtttctcgcagcacattgacatcgtaatagtagaagggagtttccaactctctgaacttgtttacggggaatgttcctttcatattgtattttgtttttatgagcaagggcgaattaaattcgcccgaaaacaccaactttgtagagtgggatgtattcgggcggattcaatccgcccctacagtagaaattatttattgttgaataaatgatcgcttaatgactgcaatgctttcttcttgtcttcttcacgaatcaggaaagaaatattgtagttgctaccgccgaatgaaatcatacgtaccggtatgtcgcgcatggcgtccaacgctttggcttcaaagcctacgttttcccattccaggtcaccgactacacagatgatacacatatcctgatctacggttactgtaccatatttcttcaagtcgtccagaatttcattcagatgtttggtgttatcaatggatacggaaacaccgacctctgaagtacagatcatgtcgatagaggtctgatagctttcgaagatttcgaatactttgcgcaagaagccgtgggccagtaacatacggcttgatttgatcttgatggcagtgatgttgtctttggctgcaactgccttgattttgcctttttccgtatcattggaaatcaaagtccccggggctgtaggttccattgtattaagcagacggacgggaatattggcatatttggcaggctgtacgcaagtagggtgcagaatcttcgcaccaaagtaggccaactcggcagcttcttcgaagtgcaggtgacgtacaggagaagtcttgtctacgatgcgcgggtcattatcgtgcataccgtcaatatctgtccatatctggatttcggaggcgtttacagcggcaccgatcagtgatgcggtatagtcgcttccgccacgttgcagattatctatctcgccataggcgttacggcagataaaaccttgtgtgatataaatttcagcatccggatgtatttccagctgtgcggccagtttttctttgatatatacaggatcgggctccgagttcttgtccgtgcgcatgaattccaatgccggaagtaagatggcgttgactccttgttcctgcaaatagttggtaaccatgttggtggagatcaattcgccttgtgccaggattactttttcttcgaacagtgtgaaaatatcttttgtatacgaacgaatataatcgaactgtgcttttataaattcctgtgttttctgcttatactcgtcagtagaataaagttcattaacatgctgtttatatttagcttccagtctgttaatgatttcattcgcaccttcgggatttttcttatacagataatccgaaatttcaaccaacgtgtttgttgttccagacatggctgaaagtacaacaatcttctgttcaccgtcggtaattaatttggctacttctttcattctttgtgcagaacctaccgaagtacctccaaactttaaaactttcatttttcgtttcgtattttaattgttcctatattgataattagcgtgcaaatatacaaataagactgcaaaaatcagcattttagcgatgatatttatcattcatctacttattctgccgtttcttggggtgtaactgtcgttttttctcctttttcggtctcattttgacttctttccatccggctgtattcgtgagttacttctttgatatgatgattctcaaagcggtagacaactcccggatattccgacaggagatgcagattatgggtggtcatcatgatggcggagcctgtagcacaaatggatttcagaagttctacaattttgcgccctgtttcggtgtccaggttacccgtcggctcgtcggccagaataatgtccggccggttcaggatggcacgggcgataacaatgcgttgttgctcgccacccgatagctcgttgggcattttgtatcctttgccggtcattcccacttggtccagtacttcttcaatgcgtgctttgatggttgctttgtttgtccatccggtggcgcgcaatacaaaactgaggtttgcgtgtacggtgcggtctgtcagtaactgaaaatcttgaaagacaatgcctaaacggcgacgcagttcgggaatatgcttccgcttgatgttagtcatgttgtagcctaacacctcagcttctcctgactgtatatccagctcaccgtaaattgttttcagtaatgaggtttttccggaaccgacttttccaatgaggtaaacaaattcacccttgttcagttccaggtttacatcttccaatacgcctaactcttgttggttgatatatacgtttttatatcgaatgagagcttcgtccatcattttaatgttttttccacgtagcgctatgacgttctttcaattcacgggcaaggtcttcgatgcgatagccttttgaggtgagcagtacaatcatgtggtatatcagatcggctccttcgtagatgaggcgttcgtcggttccgttacaagcttcgataaccgtttccacggcttcctcgcctactttctgtgccattttgttgataccggattcgaacaggctggtggtgtaagagcctgcaggcatttcctcgtgacgtttgtcaatgaaatcttgtaattccttcaggaacatgatgtcttctttgttttcttctccccagcaagtatctgttccggtgtgacatacaggacctgccggatttactttgatcagcagggtatccttgtcacagtcttcttttatagaaacaacattcaggaaattcccgctttcttcaccttttgtccacagacggttcttggtacggctgaagaaggttactttaccggtttccactgtctttcggtatgcttcttcattcataaaccctaacatcagtactttgctggtgctgttgtcttgtatgatggcggggatcaacccgttcattttttcgaaattcaaatccatttttctatattttattgttatattatcggtgttgtatagaacttgtttaaaatttcatcagcatcgtcattcagagtggaatgaggatctgaaggtcgtttgccagtctttcatcctgtttgggatggtagtggaaacagatttagatgcaattaaaaacagagttataacctcacattaattccttgctcgcaaagatactgttttaattcgggaattttaatttctccgaaatgaaaaacgctggctgctaatgcagcatctgctttcccttttgcaaatgtatcgcggaaatgttccatgcatccggcgcctccagatgcgatgacgggaattgtcagtaaatccgccagggtggagagggcttcgttggcatatccgtttttcactccgtcatggttcatgctcgtgaaaagaatttctcctgccccgcggttgttcacctctttagcccagtcaaacaggtacttgtcggtttcaatccggccgccgttcagatagcatttccacccggtttcagtctgcttggcgtcaatggctaccacacagacctgtgaaccgaaatgtttggcaatcttgtctaccaaatccggattgcggatggctgatgaattgatagaaactttgtcagctcctgcattcaatagccggtctacgtcgctcagttcgtttatacctcctcctacagtaaaggggatattgatattggccgctacccgttttaccaaatcggtaaaggttttgcgcccttcatggctggcagtgatatcgagaaagaccagttcgtcagctccctgttcactgtaggtacgccccagttctaccggatcacctgcttgacgtaagtttacgaaattggttccttttacggtctgcccgtctttgatgtccaggcaaggtatgattctttttgctaacatgatttgctcttacatgaaacggtttaagtctttcaatgtaatttttccctcgtataatgccttgccgaaaacaacagccggaactttggctatttccaggtcgataatgtcctgtatacagcttactcctccgctggctatcagatgcatattcgggaactccttcaggatttgctggtatagttccacggaaggcccttgcaacattccgtcacggctgatgtcggtacataacaccttgaaaaccccttctttagtataatctttcaaaaaagggatcaactgctgctgactttcttctttccagccattgacagaaattttattctcctttacatcagctcccagaatgattttctcgtttccgtattgttccagccattttttgaaaagcccgggatttttcacggctacgctgcccagggttaccatttgtgcgccattgtcgaaagcgatgactaggtcctcgtctgtttttatccctcctccaaaatcaatgaccagagaagtgcggctggcgatttggtccagtacacggtaattcacaacatggcgtgaaactgctccatccagatcgacaatgtgcagacgatgaatcccatgggcttcaaattctttggcaacctcaaccgggttttcgttatatactttctgtgtgttataatctccttgagaaagacggacgcatttgccatcaataatgtcgatggcaggaattaactctatcatatctatttcttcttatgcattgttatatataatgtaatggttcacaattctaaaaagttcctcaggattcgttcgcccacggctccgctcttttccggatggaactgtgtcgcatagaaattatctttgtgcaaggccgaactgtaggggaggatataatctgtttgtgctgccgtaaactcgttcagaggcacatagaagctatgtacgaagtatacaaattcttctttggtgaatcctttgaacaggtcgctgcgtacatgagtcagggtgttccatcccatatggggtactttgtcttcatgccgggtggggctgaacaactttacatcagtatcaaagatgcccaagcagtcggcatttccttcttcggagtgccggcacatcagctgcattcccaggcagatacctagtacaggttgttttaagtttttaataacttcatccaaccggtttttccggagatggctcatggttgtttcggcttcgcccacaccggggaagataactttgtcggcactcatcaatacttccttatcggaagtgatggttgcttctactccaaggcgcttcagtgcatagtctacggagtagatgtttcctgcattatattttacgacagcaattttcatcagctaaagataactgttttatttttataagccaatacttttcgttcaatatgtttctgaacagcacgagaaaggactattttttccaaatctttacctttacttactaaatcctgcacagtgtccttgtgtgtgatgcgtactacatcttgctcaatgataggaccggcatccagttcggaggtaacataatggctggtcgcaccaatgatttttactcctcgttcaaacgctgcatgataaggttttgcaccaacgaacgcagggaggaaagagtggtgtatgttgatgatgcggttgggatatgcttcaatcatttgttcggaaatcacttgcatatagcgtgccagtacaatgaaattgatgttatgtttttccaacagctccatttctgctttttcctgttcctttttgttctctttagtaatagggaagagatagaacggtataccgaaacgttctgccacatgctgaaggtcgggatggttacttataatcagcggaatttccacattccattctccggccgtgtagcgtgccagcatatcgaacaggcaatgggacagtttggaaacaaatatggccattttgggttttacatccgagaaataaagacggaatttcatttcatatttttgggcatacaaggtttcaaaataatcttctattttatttttaggaataaagaaatcctttatttcccattctatacgcatgaaaaatatattttctacatggtccacatattggtctaagtagacaatattacctttgttaattgtaataaagtttgtgacttctgccaaaatgcctggttggtctgggcagtgcaacaataattttgcagttgtattcatctttttccctaattttcgattttaatctattgagtgcacaaaaatagcgaattattgccaataagctaaattttataacaagaagtttgttgaaaagattaaaataataacaatatcgtaatttttagggtggggaggtgaagggagttggaaaatattttttttatggtttttgccaaaacgcttgcagatttaaaaataatgcgtacctttgcacccgcaatcgagagagaaagcgtcggaagagagactatcaaaattattggtgcgttagttcagttggttagaatacatgcctgtcacgcatggggtcacgggttcgagtcccgtacgcaccgcaagtctttttccgatttatcaaaattactggtgcgttagttcagttggttagaatacatgcctgtcacgcatggggtcacgggttcgagtcccgtacgcaccgc

SEQ ID NO: 3996 - DNA, 5582 bp, Unknown
  gut microbiota DNA sequence
tattgccgtattttgcgttttgtgagaaaataaaaaatcctgattccggaaatcaggattttactgtctttttttcttcaaggtggtgccaccagcaaccgaaaatcggtttgtatagcactatttctcaataagttatatctttcctacgatgtaagtcccttgaataaggttttcacagctttgcaccgttcaacatcagtttgtatcttgggtacgcatttctgaatgcgaagatagtacattttctgatattaaattctttaatttagatttttgttagtaagtcgatgaaattatttatttagaatatctatacatctatctaacatgacttcattgtcaattattacaatatgcagtttttttcttgtcctagtgattatttgatataacatttgtctttgcgaataataagtattatcagcaattaaatctccttgagaattatatttaaaagagtcatctatgactatcacaacgttgtcgaactcttgaccaactacagaatgtgcgcattctgtatcaccggataagtatgcttcataatggaaggttgagcgtgttcccggtgtgtaattaggcactttccagtttttcttcgataattcttgcagcaatgattttgcagaaaaataatttttgcaatatgtaagttcaatgttgggatagtctatgttggatatattctttttgagattgaaaagttgtcttataaaatatgcaatttctttatttgttctaattttatctgttagcttatagggggtacatgataattctttttcaatcctttctttggtatggtaatttttctcattatcacgcaagtattggttttcatcgtatgagaatatgcattttttattgaaagtgcgtacttcctctatatatttatcaaattgatatggatacattcgttgggcttcgtcaattataattaagtcaaaatctgtcgtattcggagcatatttaggcatatgtatgctccaaccatattcttccattaagattttgtgaccactatttagtggagcacaatgtaaaataagtactttttcgcctttccgaatgctttctttagctatatgataagtcaataatgttttgcctgttcctgcactacctgttaaagctatgaattttgttgttgcgtcagataactttgttcggatttcattatatatttgttcttgttgaactgtaagaaaatatccttctgccataaatttttcaggagaattgaaaggagaaactaaatagtcggatggattaaataaatcatcaatattgttgaatgttactacttcttgaagcaacagcttgttgcacaactcattaaaagtcgcttcttttatttcattattgctatcttttcttatgagtttgtaaagcttattttcatttaaaatataggtataaatataaatttccttattcaagaactcgaggtagtatttattcttttgctgttgtttgaatatcttgtctattgaactctccgtttttatttctatgttgataatataattatcaccaaatctaagtaaatcaaattcttttccaatttgtggtattgaatatcctaaataatagttgttaacaatggtgatgctattttttatttttaacaattcattcacaaaagattctataccattaagctcgtaatcttttattccactgattattccgtaactattcataagtttttggaatagtgtattacttagttttcgataagcttctatgatagatagaatattgacatttttcatagggcaaatttgtaaatactaattctaaatatgatgataatttttacttggtgtttcatctctttgggctattccaataatatcctccatttttctgtgcccctctaaactctatcaaatctaatctaaccaaagaatttaagtagcgtttagcagtcggaacacttttgcctattaatcttgcaattttagacgaattaagtcccggatattgcttgatgatatttagtacttcttgttcttttgagtttacagtatcatttacagtatcatttacagtatcattcttgatgctgatacctcttttgaatataaccgtaaacatcccgtccgtatgaaattctggttcaggcagattcgcttccctcatggcttcctgcatacgaggaatgccggatgccactctttcaaccaaatgcatacgggtaaacaatccaaagattaatgggttgcgtgtcatgctcttgtgtccgaaatctttagctacgataggcaaaagccctccgggattagaaacctctacccggtcatcaaacatttctattgtaatggttgctccctgttcgtaataatcacgatgtgagagagcgttaataatggcttctttaaacacagtaagaggaatttcccaaatttcttctcttggtcctgctccctcaattttataagctacttgcagtttactttctagccatgccatagcctgcaaatattgttggtatagtggaccgccaaaggttttatcatcaatgatatatactttggttgttcctttgaaaaggacacatcttgttactgcgtgtggaaactttcgttcaggttgtttcccaaagaacatggctgctccattcttggctactccgttatccgtaaacagttccaaattctcaaatatctgtttgttggcagtcgatggacttagctttgcttccgtgcgaaagtcttttatcgcttgttcatctgcatctgtgtaaatgttgaaccacgaacaagggatagcatcaaaaaatattttgttgcattcctgaaagaaactgcgcatttcttcgacagtacgaagtttctgtgagtttgctccctcacgcacaaagatagaaccagaaaatatataaggtttatctttccctgatggaacatcaattacccaaactgtcttatcctcgatatttaccgcatacatatcacaatggagagctggagatatttcactgatagagccttgaatggctgaacgtttatcattttccaaacctgtaccaataatctgtccgttatcatctacgccgataagcaaatatcctccgtcagcattagcgaaagcgcaaatttcctctgttagttcacgaactattgaaggtacacgaactttaaactctacattatagccttctccgctatcgataagtgattgtatggtttctgtatttgtcatagacatctataaatataatgcaaaaatagtcatttctattgttttaataactctaaaaacaaggatatgtatatggtttacttcaaattgttctttctgaaattagaggggctgcatcctctatactttttgaaaaacttattaagatggctctcatcggtaaatcccaattcttcaacgatttcacaaattctcatttgactatgtaataatctattttctactaactttagtttgtagtttaaaatgtattgctgcatagtttcattagtatgttttttgatatatcgtcctaaataattctccgaaatgccaaaatgttggcttatatcttttgctctgattttacctgttttatagatgtttgcttgaatatactgcaatatgtcaagcgatttgtcctcagagcattcatccacctgttcaggcaagaacattgcgatattgcgtgctaccacaataataatcgtattaattatttgtgttataatctccttgctgtataaatttcggttaatatattccctgataatcgcttcaatcatgggtttcaccaatagcttatctactttatttcttagtatacaaccgggttgatgattagcatgttgaagaataaactccagtctttggatattttcagcaccgaaaacagaagaatgtatatatatgtcgttaaacttgatgtcgacaaacttagttgttgtatggatttcgaaagaatgtgtatctccgggagtaatcataaacaaatgtccgtcatgataaggaaacatattgttgttaatccattggatgcctgttcctgaaagaatatatactaattcaaaaaaggtatgttcatgctcttttagcaaggattcgtcaagctcgctaaaactaatttcgaatggttgatgtaggttttctcttttcatgccataaatatagccctaaaaaacggattaataccaaaataacgaaaaataatacctaaaattagccgaaaaatcggtataactttgcaatatatttaaaattatagcttatgaaaactgaaatggaaaaatgtttggcaggtgaatggtatgattgccacgacccgttttttatggatttgaaaagtaaagctcatcacttgttgatgaaatataattctttgccgtatgaacaaaagactgaaaaatatgccgtactaaaggaaatgtttggaagtataggcgcaaatgtttctgtcggtcattcgtttatatgtgattatggatgcaatatacatatcggtgataatgtcaccgtaaatactggttgtacatttgtcgattgcaataagattaccatagggaacaatgtgctggtagcacctaatgtacaaatctatacggcaactcacccggtagagtttaatgaacgacttgtattgacagaaaccccggatggctgtaagtatgtccgtcgaacttttgccctccctgtcatgatagaggatggctgctggattggcggtggagtaattattttaccgggagtgacaatagggcaaaaatgtgtgattggtgcaggaagtgttgtaaccaaagatattccggcaaatagcttggcggtaggaaatccttgccgggtgatacggaaaatcaatcaaatgtaaggttatgattaaattagtagcctttgacttagacggtacaatcggagatacaattcccatgtgcctcaaagccttaaaaaaggcagtaactccctatgttactcttaatgatgtatccgaaaatgatattttagaaacttttggactaaatgaaaaagggatgataaaaaaacttgttggttataattgggaaaatgctttggatgacttctacgtgatatacgaacaaatgcatataatgtgccctcgtcctttcgatggtataacagaactgattgagaagttaaaaaagaaatctattcttattgctttggttacaggaaaaggagaaaagagctgtgcgataacattacgtcaatttaatatggacacgtgttttgataaagtaaaaactggaaatcctttcaaaaataataaagcagagaattttagggaactgctcgcagattataaattacaaccggatgaaatgatatatataggtgatacagtttcagatattgtgtcttgtagggaagttggaatacgatgtttatctgcttcatggataacttcttgcttagatgcacaaaaattagaagctcacaatgctgggaatgttttttattcaatagcttcacttgaatgctatttaatgggatgacaaatatatgtgcttaataaaaaaacatttagtatttctattgtatgaacaaaatatcagatttgagtttctttcgattattatcggaatgctcacaacgtaaag

SEQ ID NO: 3997 - DNA, 1376 bp, Unknown
  gut microbiota DNA sequence
cgttttgattgaagcctccggacttgaagaagttccggaggctttttttttgtatccgcacgcatgaaatgtgacctctaccgttttttccccgtgggtgtgggtacctttcccacggaactgtccggaaggggcaggtttttatttagaattagaaaaggggttaaacagattgtatttcataatttctttatgattatcgaatatatttaccacttgaacttgaataatttttaggtctgcgtgaacaaaaaaacaatagaattgtttcaataatataaaccgagaatctttcgaaactagtagccaaaatgaagcttatcgtcaaaataggattaatagccctgcttttaatatttaattatcagggagtcgatgcagatattgtttcttccgctattgacagatatgctactactacagaacatcaagataatatggcatctgatcatggtacattggataccatgtctttcacccactctttactcacagggcaacagcaggtattagcgaaactaatgcccgatgatccccgtatccgcagagcagaggaacttcaacagaacttcttaaaaattctcataggtcgtttttcactacgggaagaaatactggcaactgaccgcgctaagatctttccgtttaatcccattcattgtgtgtttccggcatctcattatttcgtgttcacgctgaaacgcattttgatttaattaatcgttataaatttagttgtttcatcttctccggctccctgcagagtgtcggggttggtatagaattgtcatttttttaactataacgattaattaaaacatatatcatggaagctattcaaaataaaactactaataagattgtaggtattaaaaatgcgggttgggtaattatatgctgctttatcattgcagtttgtatctatcacttcacattggggaatccatccaactttatgaataatgaccctaataaccatccgttgccgggcagtttcctgggaacaatttacaaaggtggtgtagtggtgcccattatcctgaccctgttgctcaccgtcatagcattgagcgttatttagccatccggtctgcttttggcagaggttcgctggtgaaattcgtcgctaatattaaatctgccttagccgctggtgatatgaagaaggcacaagagctatgtgataaacaaggcggttctgtagccaatgtagttacttcgactttaagaaagtatgccgacgtggaaaacgatgcgacactttccaaggaccagaaagtactggccattcaaaaagaattggaagaagcaactgccctggagctccctatgatggagcagaagctgccgaatatgcacagcgcgctaaagatgtg

SEQ ID NO: 3998 - DNA, 304 bp, Unknown
  gut microbiota DNA sequence
tctccgtccgtgaaaccgttgcaaccgcttttctgcacatagttcagaatgtgggtcacgcactcgtccatgttcttggcagggttgcggtacttctttgcaaatagcgcatcttcctccgcacgctgttccaagtacatatatatcgttctcttgaaatggtctgttcctttcatatcgctgtcatttttagattatctgtttcagtatctctctccaataggtcggctctacctcgctgagaaggaagtccatgaaatccctccgtgcgtccttgttcagttcgtggtacaatcttcggaaa

SEQ ID NO: 3999 - DNA, 862 bp, Unknown
  gut microbiota DNA sequence
tggcgtgagttcggcttgcagaaaggagtattgagaatctgattcttcatttaattaagcaaaagtatggaaatacatattggagaccgcgtagccgatgtgacgttggtgagcaaggaaggaaacaaggtacagtttatgattgacggaaaaccgtatgatgtggatatcgttatggccgagaacggaagctgttccatcctgcacgatggcaattccttcaatgccgaactgatccgtggggagggtggaaagagttatgatgtgaatatgttctaccgttcctatcatgtggacatagtggacacccagaccaagtatctgcgtatgaaaaagggcggcgaggagagacaggatgacaagattgtggctcccatgcccggaaaggttgtgaaaattcccgtccggaaaggcgaccgtctgtcatccggggatattgtggtagtgctggaggccatgaagatgcagagcaactacaaagtgacctcggactgtacggtaagggatatcctggtcaatgagggggattccgtcaatgctaaccaggtattaatagtattggatataataaaagaagattgatcatgacaagagaagaaatatacagccggtttgaagagctggacaaacgcgcgtcgctgggcggcggtgtggacaagatcgagaaacaacacgcccaagggaagatgaccgctcgcgagcgtatcggaatgttgctggacaaaggtacgttcaatgaactggacaagctggtgaatcaccgttgtaccaacttcggcatggagaagaagcagattgccggagatggtatggtcaccggttacggaaagatagacggccgtccggtgtttgtctatgcata

SEQ ID NO: 4000 - DNA, 867 bp, Unknown
  gut microbiota DNA sequence
atcatcttaaaaggacattcaatttttaagttgggtgtccttacttacataagctgaatgttcgttcagcatttgtaaccaactattaataattgtgaattatgaagacatacatagcatatttaagacaatccaccatgaagcagcaaatctctggtcttggtgtagaagcacaacgagagattatacacaaccatgtaaagaataagcttatacttgctgaatatattgaaacggagagtgggaagaaatctaacagacctcaacttcttgcagctttagcgatgtgcaggaaaacaaattctattctgattgtagccaaattggataggttgtcaagaaatgttgcatttacttcaaagctattggagagtgatgttgagattgtgttctgtgacttcccacaagctaacagactaattctgcatatcatcagtagcatagccgaatatgaagcaggactaatcagtcagagaaccaagcaatcacttcaagccaaaaaagcaaggggtgtgaggcttggtaaatcggagaatttgatgaataaatttgaacaagctgttcagcatagtatcactaccaacaaggctaaagctgataacaatccaaataacatgagagcgatagcattgttacggtcattgtctatgcaaggaaaatcattatctgaaatgacttgtctgttgaatgagcaaggctttgttacatctaagggatgcaagtttcagattacacaagtcaagaggttacttgtcagagcagggttgatgtcgtgaagtcactttgaaagacaggacaaatttagagcaaggttagtcttatatatcccaatttgaatttgtcctactcctaaatttaaacgaagaa

SEQ ID NO: 4001 - DNA, 1642 bp, Unknown
  gut microbiota DNA sequence
tactgtgatatatggaatttataaagttcaattaaaaaggtcaaagtgtataaatttccatgctaatgaacaaaaatacattttggggctttataaataacgatatatttgtaaaatactgcttgaatatttcagattgaaagaaataaggtactcattttaaatttaaggccatgaaagaattaaagatgtacatcgatgggcgattcatcgaaaaccaatccgataagtggattgatgtattgaacccttctacggaagaagtgatatctaaaatgcctgatggcacaccggaagatgcacgagcagctataaatgccgccgtgaaggcacagctttcttgggaaagtcttacctctattgaacgcgccggctatttaactcggattgcacaaggtatccgcaagcgggagcaggaattgactgatattatcatccgggagggtggaaaaacaagaggattagctaatgtagaggtgttatttacggctgattaccttgattatatggccggatgggcccgtcgctatgaaggggaaattattcctagtgaccgtcctcacgaaaatatatttgtctttaagaaacctattggggtgacaacaggcatcctgccttggaatttcccttttttcttgattgcccgtaaggccgctcctgctctgttgacggggaatacaattgtggtaaagccgagtcagctgacaccggaaaatgcgtatgttttcgcacagattgtagatgaagttgggttgcctaaaggtgtattcaatctggtgaacggtcgtggttcggtgattggacatgaactggctgctaaccctaaagtaggtatggttagtctgaccggaagtgtggaggctggaatacagaccatggcagccgcttctgccaatgtgacgaaggtttctttggaattgggagggaaggctcccggtattgtaatgccggatgcagatttggatttagctgtaaaatccattattgcttcgcgtgttattaatacaggacaggtatgtaattgctgtgagcgcgtgtatgtacattctagtataaaagaggctttccttgagaaactgttggcaggattcaagcaggtgaaagtgggtgatccgaatcagtatacagacctcgatatgggtccgttgattgatgccaatgcactgaaatcagtagaagagaaagtgaaaaaagctattgagcagggagctgagttgctatgcggtggtcatcgtatcggtactaaaggatatttctttgaaccgacgattttgattaattgtacccaaaagatggatattattcaggaagaaacttttggaccggtacttccggttgttgagtttacagaggtggaagacgccattgcctgggctaatgattgtgaatatgggctgacttcttctatttatacccagaacctggatatgacattcaaattgattcgtgcgttgaaatttggtgaaacttatgtgaatcgtgagaattttgaggcgatgcagggattccatgccggatggcgtaaatctggtatcggcggcgcggatggtaaacatgggctggaagagtatttacagacgcagctggtttatttggaaactaaagagtgatttatatgcttttctgaatagttaggagggat

SEQ ID NO: 4002 - DNA, 1727 bp, Unknown
  gut microbiota DNA sequence
aaacttatcatgcaaacacttagtcagggcagacacattaaaaattattgtcccgtaaaagttgtgacaaatagttttcatcccatcccgcttttagtcttttcagattcatacttccttttgttgttttctcattcttaagcatgataagcgccatctttgttgccaccgagaagtttctggctgcattttttacctttttactgtagtcttctcgaaaggtaacatccagttgccaatgaagattattcccaatagatcaatgctgcctgatggcagatgcaatcttctcaggtcgggtattatcaagtgaagttacatagtatctgacctcttgagtatattcccctgttgcgactattgttctttccgactttatccttacaacagacttcaaccccacaagtttctccttgaacattttctccattatagatccataactgactacagtacagtttcttttctcaatccttccatatccggcatttttccgacacatgcctggtgactctattgattatttcatctctatcctgataatagtcaatgatttgtttagccggttgataattttttttcttattctcctttatagcgataatataatttgcatcatgctcaataatggtctgggttatatctttctggcaccccatcgcgtcaattgtaacaatacaaccacttagttccaaagagttaattaacaatggaatagctgtaatctcattgtttttgtcatctactttcacctgacctaaagaaattccattagcggcagaccaggcggaaaccatccattatttgaatccttcttttcccctagtatgttctccatcacattggcttggaccacgcatgagcttgccatctatagctacaacgcctttcacctccagacagactcgttttacccaattacggaagatcaactcaaaataatcgggctttatcatactgaagaatctgttaaaagtatcatgactggggatgaactccaggccgggtatgcgactcttgaaaaaagcaattttcgaattgccaaattcctcaatttcattccaggactggacctcacagattacagcagcaatgaatatatagatactagtttccattttatggactttcttgcggttcatactaggatcttctatttgtttacaaaggtcaattataccaatttccatgttagtttatgtttcaatatattttataaagataagaaaaaacaatcgacacaaacagacaataacacattaataatcaacaatataacaaataaacaacaaggaatagtatagtaaaaaatataatatatttactctggaacgcttagttgaatttatagtttcaccaaggtgaagcaagcgtatcacttgggtgactacgcctctccacttagatgccaatgtattgtcacctaggtgaaaccacaaaagaagacagacaaaagataagcatccgggattgtgcgtgttttttccagtcataacaaagtcaaaagcctaacgtacttcgtttggcttttgattttataacagcttgaagagaaatacacaagaggccgaatgcttacaattcttccataaacttgaccaatgagtgaacaatgcttcaatccatatacacccacgcagggtgtgactatggttgtctatacacgtattcacctcgtcattgtttcaatccacacacccacgcagggtgtgacaacgtccataatg

SEQ ID NO: 4003 - DNA, 2241 bp, Unknown
  gut microbiota DNA sequence
acccattcgtacggtctgccttccaacgtcccatttgccagatacattccccgagcatcttcctgataaggcttcaaatcttccagcttgggacgtacatagttagttgcatgactgcgtgcaccggtatacatcaccgtaggagccggcgccttctctcctcctgcatgatcataatattctcctttaatatatacctccgttgcatgagttttccaatacatttgcaaacgggaagtaagccattcaggccctcggtcagcatatcggtcagtccgttgctttaacttttcaaacacttcctgtgcccacggttcttcctttatcaacttctgcgtttcaactttgccattactatccgtcagataacggggatgaccttgtgacagtttcaccgataaggaagtttcctgtgcatataatacacttgttacaagcaagcatatccataaaacgatctttctcataattctattcattctctttcacaaaaatacgtatcataaagctattccactcaatccaaatgaattattttatcatccgcctcttccattcaaatttaaagttaccgaatataaaatgtttgctttaccggctctgcagtctttatcttaggatcagagttttttccgtattgccatgctattacagttacttttaccggataggtggttttaggaggaatagcagttaatatcaatcgattaccatccacataagccggtcccgattccacataaaaatcgaccggcaagccacaactggaaacagcagataaagaaacgtacttagtaccacgctttatgtccggtaacgttgcaaacttaatatattgctgctgtccttccgtatttttaaccggaattatcatctgagcttgctgaacagccggtttatattcttcatctcccggatgagttattgaaaaaacaatatccgatttcttgtccgtccataaagttccccgattccattgtattcgaaatgtcacagaatcaactaaaacaactgggccggtaatcatctgcaggaccggagcttttccagcatgaccaatagatgccccaacaggcaaatcagtccaattggaaagtcggggactttctcctggaacagtatccaaaaaaacaggggtcaattgaaatgtgataccatcttcctgtggtataaaagccgggtgaacttgtaaatgagtattctgttgggatactgtttttccgttttgagacacacttaccaattgtggcttcatatcgtaatatcgggattgatacgccaaagtagcctctatcatctcacgatcaaaaaaccaaaatgcttgtgcaggatcccctttaaattgatttaccggtgccggaatacatgaaggcttttcattttttttccatcgctccatcaaccatccctcctttgtcggatctacgtgtccataatgcattgccttcttgatatagagagctatatattgtgctttttccggagtataggcaaagtgtccttcagcaggacaggccaacatgcttaaaggcagcaatggatgctccttacgttctttcaaaccttcattgctccatgtatgtgctgattcatattctcccatggtttccagacaaggaattttattgatgttacgttctccccaaatatccggacatagccagcgatcacgatgatatggccactgaccactgacagaaatgcatgccaatgtacgttccggtttataggcagcaagataataaggccaactagcagcagccgaatgtcctatggctattaaaggagctgtagacaactctttatatccagattcttcagcaagatctgccaaaaggccatccaaagtttcccatgccccatccgtaaaatcaaatccatgattgaaagaaggacatacccatatttgagcaacatcaagctcagccatacgttgtcggaaagcctcatcttcaaggatagaaatttcctccatattgtgttgggcaaccaagattgcttttacttgttcacactgcccgggaatccacaagtaagcccttgactcaggatttttgggatgagtactaaaattatggacgggtacagaccattgccaaattcctgtttgtgcaacaagcgtaaatgataaaagccaaccgaatattccaaataaaaatacatgtttcatagctatcttcattgtttattataaaaacgaatcagaatcaagaaacactcaactttattctaaaattatct

SEQ ID NO: 4004 - DNA, 29307 bp, Unknown
  gut microbiota DNA sequence
ttggctgattttgtaatatttaatgaatgtccctaaataacatgctctcaaattcagaaaagagggattgccgcagaggcagttcctcttttgtttttataaaagtccgtttctattccctatgagtccatcgtaatcttacaacccaaagatataaatctttcacctgtaagatctataatcttccgggggtaagatctataatcttcgcattgcatcctcccttccctgttctgttccatattgcctgttgtctttacgcactatacctcgccaatgtctacttaacatatttatccaacactttttccaaggcattttgtgaaaccggcttagtcaggcaatcatcgcatccggcttctatagccctatctttgtcgggctcaaaagcaaaggcagtcaaagcgacaataggcattcttttgaataagaacgaatcaggcgcgtagcctccagcccatccatatggggcatcttgatatccatcaaaatcaagtcgggctgatgttctttaaattgattcaccgcatcctctccattcttagcccatagcagattacatcttttccctaacaatgtctttaacagcaaaaagttgctgtctacatcttccgccaccagtactgttcttctttgcaatacttttctcggttccgtactccctgattccggacacttcgtagccttttcggattccggacattttttacccgccttataaggaatcgtaaaacgaaaagtagaaccttcattcagtttggattccgcagtaatctctccacctaatttttctacaatcaccctacaaatcgcaagccccaaacctgttccctgaacaaaagtattcagtttcacgaaacgctcaaaaatcattttaatcttctcctcggagatacccattcccgtatcttttacataaaaatcaatatactcctccctcacttcaaaaccaaaacggatttcccctttgaaagtaaattttatagcattggttatcaaatttgtaacaacttgcataattcggttctgatcttcattgattatcaaactggtgtctttattgtctaatatcaaaacaaccccagtctgcacccgatccttatgcatctcatacacattacggcacaattctcccaaatccattggatatctgatgtattccaatgtacccgcctctatttttgccaaatcaagaatgtcattgattaattgcaacaatatttccgaattctggttgatgatgtccgaataaagtttttcatcctctgcattatccgctatagtcatcaaacgggagaaacctactattgcattcagaggagtacggatttcgtgactcatattggctagaaaggctgttttcagcctatcggactgctcagccttgatacgggcctgaaccagttcttgctctatgttctgcatattggtaatatcccacgaaatgccgataataagcggtgcacgcccttccagaggaactaatgtttttaaagtctgcacgatacgggtctcgcctgtagccgtcacatacgtttcctgcatttccatgcgctcgcgggtacggatcaattccaaatcatcccgatgaaacttctccgcattctcatgttcgggaaacacttcaaaatcagtatggcccaatgctttggaagcaggaattttagagtggctggcaaacgccttgttccaataaagatatcggaaatcatcttcagggtccttcacaaacaaataaacaggaatattattcagtatggcatccatcagataattcagttcacgcaattcgtcacggttcttgataacatccgttatatcctgtgtaaaaaaccaaatcatttcctcgccctgattttgaatcataaaggccgaaacctgatgaacacgaagttttgtttctcccacacgggtatatttggcacgataagcaaaattacctccattatcacgaatctcttgaacacgtttatcaaatatttctttagtattcagagaaacagataaatcataaaccttctgtgttcccagctcctctttcactccatattcctcaataaactgccggttggcataaactaaggttccgtcagccgatacagccagaatactatcactgaccttatccagtacccgtttaaatatttccaggttctgctgtgtggcaactctttcactaatatcacgacacattatcagcacatattcttcatctaaggggaaaatacggttttcataataatgatgttctccatttacatccagttcatgatgggccgtagatcctctaccggtagtaattactttcagaagattattatgaatattatgataggcctctttaggaaccatctcacgcatggacattcctttaaaggtttcatttgaaacacctacatgattggtttcctcattagaaacaacctcaatgcccgtttcttcatgattgaaaaccgtcaacatatccggtaacgaatcaaggatctttactgcatatttttctttgaaactaatgttatcagagccatgctccaaagcggacaatttttctttcaataacctgttctcctctctcaaagaggcaagttcttgctccactattttaagcttgtgttcacaatccatatttattgaaaatctttaggattcctaatcttacaaatttaagaaactttttgtgaatcaagaaagaatagtgaattattttttaataatgagaagaaggagggggattagtggttagtggtgagtagtgaatgatgagtgattagcgattaatagttagtagttaatgagttgcgctatcatcccgcaaggtcattaaccactaatcactaaccactaatctaataactagtattccgaccagcttttgatagcgatgtcatccaccgtcatggtgcagaaagcattgataaacgcgcttgccagacgggcattggtaatcaagggcacattcaggtcgatggcggcacgacgaatcttgtatccattgtccaactcccctgctgtcaggttcttcgggatattgactaccatgtctatctctttccggtgcaacatatccagtgcctgaggtttcccttcctcactgggccaatacacgcgggtattttccaccccgttctcggtcaggaagtgggatgagcctccggtggcataaagtttataacctttcttctgcaacatacgggccgcttccaaggtatccgctttctgcttggcattacctgtagaaagcaacacgctcttttcaggaatacgatatcccacagacagcatcgccttcaatacggcacacgaagtatccgtgccgatgcagcctacttcaccggtagaggccatgtctacccccaataccggatcggctttctgcaaacggttgaaagagaactggctggccttaatacccacataatccaactcgaaaagattcttattcggtttctcaaccggcagtccaagcatcactttggtagccagttcaataaaattgattttcagcaccttgctgacaaaggggaagctgcgtgaagcacgaaggttacattcaatcaccttgatatcgttatcctttgccagatattggatattgaacggaccggagatattcaattccttggctatctgacgggagatgcgcttgatgcggcgcaccgtttccacatacagcttttgcggtgggaactggatagtggcatcgcccgaatgcactccggcatactcaatgtgctcactgatagcgtatgccacaatctcaccattctgagccacagcgtccatttccacttccttggcgtgctcgatgaactggctcaccactaccggatgctttttcgatacattggcagccagtttcaggaagcgttccaactcttcttgattggagcagacattcatggccgcaccactcaacacatacgagggacgtaccaaaacagggaagcctaccttgtcaataaaggcatggatgtcttccatagaagtcaatgcgctccattcgggctgatccactccgatgcggtccagcatggccgagaatttatcccggtcttcggcattgtcaatgctcttggcactggtaccgaggatatttacattttgcgcatccagacggagagccagattgttaggaatctggccaccggtagatacaatgactccgtgaggattctccagttcgagaatatccatcacacgctcgaaagtcagctcgtcaaagtacagacggtcgcacatatcatagtcggtagaaaccgtttcgggattataattaatcatgacactgcggtaaccctccttacggatagtctgcaaagcctgcacaccacaccagtcaaattccaccgacgaaccgatgcggtaagcgcctgaacccagtaccacgatggatttatggtcgcctaagtactttacgtcattggccacaccgctatacgtcaaatacagatagttggtctgtgcagggtactcggccgccaaggtatcgatttgtttcaccaccggaaggattcccacctgcttgcgatgattacgcacatacagaataccgtcttccatatctccttcgtagccaatggcacgggctatctggaaatcggagaatccctgcactttcgccttgcggagcaattcgtccggcatatcggtaatctgcttgtggttattgccccattcgtgcatctctttagaagtgtccatgatgtgctgcaatttctgcaagaaccatttgtcaatcttggtcagctcatgaatctggtctaccgtgtaacctgcacgcatggctttgctgatcacgaaaatacgtttgtccgtcggctcacgaagggctttgtccacgtcttctataaccaattccttattctctacgaaaccatgcattccctgaccaatcatgcgcaaacctttctgaatggcttcttcgaaagtacgtccgatagccatcacctcgcccaccgatttcatggacgagcccagttcacggtccacaccgtggaacttgcccaagtcccaacggggaatcttgcacaccacatagtccagtgcaggctcgaagaaggcactggtggtctttgtcaccgagtttttcaagtcgaacaacccatatcccaagcctaatttggcggcaacgaaagccaacggatagccggtagccttggaagccaatgcagacgaacgcgaaagacgggcgttgacctcaatgacacggtaatcttccgattcgggatcgaaggcatactgtacattgcattcgcccacaatgccgatatggcggatgatacggatagccagttcacgaagtttatgatactcggcattggtcagtgtctgcgaaggggcgatcacgatagactcgccggtatggatacccagcgggtcgaagttctccatgttacatacagtgatgcagttatcataacggtcacggaccacttcatactccacctccttccagcctttcaaactcttttccaccaatacctgcggcgagaaagagaaggccttttcagccagaacattcagttcctcttcattgtcacagaaacctgagcccaaaccacccaatgcataggcggcacggataatgaccggataacctaattctttagcggcgcgacgggcatcttccagattttccaccgcttcgctcttgatggtcttgacattgatttcattcagtttttctacaaacaattcacggtcttcagtatccatgatggcctgcacgggagtacccaacacacggacattgtatttttcgaagatacctgctttgtacagtgccaccccacagttcaaggcagtctgtccgccgaaagacaggagcacgccgtccggacgttccttttctatcaccttctctacaaaataaggagtaacgggcaggaaataaatctggtctgccaccccttcgctggtctgcacggtagcgatgttcgggttgatcagaaccgtttcaatcccttcctccttcaaggctttcaatgcttgcgaacccgaatagtcgaactctccggcctcgccaatcttcaaggcaccggaacctaataacaatactttctttatttcgtctttcatacttgttctttttaatacacggtttataacaacttcacaaactcatcaaacaggaactcggtatccgtaggtcccgatgcagcttccggatggaactgtgccgagaaccaaggtttggttttatgcctgataccctcgttggaaccgtcattcatattgatgaacagcggttcccaatcggttcccaatgtattattatctaccgcataaccgtggttctgactggtaatgaaacaacgttccgttcctatcatgcgcaccggttggttatggctgcgatgaccgtatttcaatttatagatggtggcgcctcctgctttggaaagcaactgattccccatacaaatgccgaaaataggcttgtcgctcaggctcatcgccttgcggatatgctgtaccgcctcatcgcaagtatccggatcacccggaccgttcgaaataaacaatccgtcatactccatccctgtaaagtcatggttccaaggaacacggatcacttccacatcccgtttcagcagacaacggatgatatttgtctttaccccacaatccaccaacaccacttttttcttacctgcaccttcattgtaacgaatgacttccttacacgatactttatctacataattgatacctgcatacattgcttcgggcacattgccgggctcatcatcaaatacaattttccccatcattaccccatgttcgcgaagaactttggtcagttcacgggtatcgatacctgtaatgcccggcacttgctcacgcttcagccagtcggccagactttctttcgcattccagtgactgtattcttcactgtaatcacttacaataatcgcttcggcatggatacgttcactttccataaaagtagccaagccattgggttcgatagtaaagggaggtaccccgtagttaccgaccaacggataagttaaggtcatcagctgccccgcatatgaagggtctgtcaaactctcaggataaccggtcatagcggtattaaacaccacttcgccggctaccggtttctcataaccgaacgacttgcccgggaaacggctcccgtcgtcgaggatcaatgttacatttctcatctaatctatcttgaatggttgttctttagaattgataaactttttctatatagtctataaacgcctggttcaccagcttcactccacccggagtaggataatccccactgaaataccagtcgcccgtatggttgggacacgcttcatgcaatccttccagtgtctgataaacgatttccactttcgcctgcgtacccttcggagtgagaagttccaccatttttgccgcaatctcctcattagtgaaaggggcataaatttctttcacataattcaccatctgctctttgggtaaccccacctggtctttcgatttgttgtaagcacgggctatcacatctttcatatcccgttctttcaataaatcgatagcagccttgaaagcgataaactgatccatactggccatatcaataccataataatcaggataacgcacctgtggcgaagaagaaacaatgacgattttcttcggatgcaggcggtcgaggatgccgataatgctctgtcttaacgtagttccccggacgatgctgtcatcaataatcaccagattatccacatgaggcacaaggcttccataagtgatatcatacacatgggcagccaaatcattccgactgttgccttcggcgataaaggtacgcagcttgatatccttgatggctactttctcgctacggatacgccaggacaggattttttccagttcctcgtgattgggatgatgccccaaagcctctatcttctttactttcagttcattcagataattgtcgaatccttccagcagtccatagaaagccacttccgccgtattgggtataaaagagaatacggtatgctccacatcatagtctaccgctttcaaaataggattcaccagtttttcgcccagctgttttctttctttataaatatccatgtcacttccccggctgaaatagatacgttcgaaggaacaggctttcttctctttcgcccggttgatctgtgccagacgcatctttccagtcttgcttataaggatagcctgtcccggttgcaattcattgatgcttccggcagatacattcaaggcagtctgaatgacagggcgctcggatgccaataccatgatttcatcgtccatgtaccagaaagccggacgaatgccccacggatcgcgcaccgcaaaagactcaccgctaccggtcataccgcagatcacatagcctccatcccactccttgctcgaagtcttgaggacattgcccagatcaatgcggtcttctatagcgtgagtgatatccatgcctttcagaccttccttctcacattccacatagaggcgctccacctcgcgatccaaacggtgccccacttgttccagcataatatatgtgtcggcatatttacgcggatgctggccgtcggcagtgatacgtgcgaaaatctcatccacattggtcatgttgaaattgccgcacaacgccaaattcttggcacgccagttgttacggcgcaagaacggatgcacgtaggagataccgctttttccggtagtggaataacgcaaatgccccatatatacctctccggcaaagggaaggcatttcttggcgtatccggcatcatgcaattgttcaggcgccaaatccttgaaatgattttgcaccgtaccgaatatctctgttatcgcccctgaacctaaagctctttcacggaacatatattcttcaccgggattggcctccagtttgacacaggccagcccggcgccttcctgtccgcggttatgttgtttttccatcagcagatacagcttgttcaagccatacatccaggttccatacttttcctgataatattccagcggtttcagcagtcgtatcatagcgactccacattcatgctttaacggttccatgctctccctttactacttaaattaatagttcattttcagattcttataaaaacatcccaaaggtataacaagaccttctgtcatttttccaaacttacggtacatctttcaagaattatgccggaaacttcctgcataatctccggcagcattgccttctattctactgttaccgacttcgccagatttcgtggctgatccacattcttccctttgcaaatggctacatggtaggccaataactgtaaggggaccgtagctatcaacggttcgaggcactctaatgtttcgggcaactcaatgcaatcatcggccaacttactgattaccgtatctccttctgtgaccaaagcgattacttttcccttccgcgccttgatttcctgtatgttactcattatcttttcatacatcgcattatgcgtagctaccaccacaacaggcatttcggcatcaatcaatgcgataggtccatgtttcatctcagcggcgggatagccttcagcgtgaatataagatatctccttcaactttaacgcgccttccaaagctaccgggaaactgtacccccgccccaaatagaggaaattatgtgcataggtgaaaatacgcgacagttccgctattttaggattactgatcaatatcttttttattttagccggaatcacagtcaattcccggatcacttccaggtatttctcatctgccatactccctttctcttttgccagtgtcagcgccagcatggtaagcacggttacctgtccggtaaatgccttggtggacgccactcctatctccggtcctacatgaatataagaaccggtatctgtaatgcgcggaatggatgaacctaccgcattgcatataccatagataaaagctcctttctctttcgccagttctatggcagccaatgtatcggccgtttcacccgattgcgagatagctattaccacatcgtcttcatgaatcaccggatcacgatagcggaactcggaggcatattccacttctaccggaatacggcagaaactttctatcagttgtttccctatcaatccggcatgccacgaagttccgcaagccacaattacaaagcgacgagccttgagcagacgttccttatgatcaataaccgccgacagtactactttatcaccgtccgcattgatgcgtccacgcatacagtcgttaatacaatcgggttgttcgaatatctccttcaacatgaaatgcgggtatccccctttctccagttgtcccagattcatttccaccgtacgtacttcgggattttgaagcacgttgtccagattgacgacttccaatgtcttgtctctgcgaatcaccgctatctccccatcttgcagatacaccactttatccgtatactctacaatcggagtagcatccgaagccagaaagaattcatccttccctatccctaccaccagcggactgcttttgcgtgctgcaataatctcatcgggattattcttgtcgagcaccgctatagcgtatgcgccaatcacctcatgcagagccaactgaacggcagtaagtaaatctaaatggttggaaagttggaaaaattcaattaactgtacgagaacttcggtatctgtactacttttaaagatgaacccttttttttgtagcttttctttcagggtagcgtagttttcaataataccattgtggataagagctagattctttgaagaagaaaaatgaggatgagcgttagcctgacaaggctctccgtgggtggcccatcgggtgtgggcaataccaattgtaccggaaacgtctttttgggaaacaaaagcctctaggtctgaaacctttcctttcgttttataaacgttcaacctcctttttttgtctatcaatgcgactcctgcgctatcatagccccggtattccaaccgcttcaggccttttatgagaacagggtaagcatctcgttttccaatatagcctactattccacacataatctactaagtatatgttctgattcgactgcaaagatacaaatatcaattaacataaatgcaataaaaaaccataaataattgacgaaagcgataaaaaagtaagaataaaaatcgaaaagaaatattttattcgttttttttaataaatatgaaaacttacagtatgatattgtctgttgtggttttagttacgatttgaaagacagtaagcaagcaagaagggtaatgtgtaaagaggaccgtcatcccgacgcccctctccgcaaacttaaaacaaccaacaaaagaaatagataacctttatgcagtgattatctaataaaaagcaattcacgatatttaggtaatgtccacatctggttgtctacgatcagctccagcttgtcgatatgataacgtatctcttccagcatcggggcgatggtatcgtgataggcaatggccttttcgcgctcgctctctattttgttcgccacttttcgcgcctccaccatggcatttacatgctcggtgatgaaaatggttcgccgggcaatctcttcgatgagtttcatgttctcggccgacagttgggatgctttttccgccgggaagagctctttcattttatacacattgtctatcagcttgctttggtattcggtggctacggggatgatgtggttcatcgccaggtcgcccagcacgcgcgcctcgatctggattttctttgtgtaagtttcccatttcacttcattgcgcgcctccagctccttgcgggtcatcacgccggtggattcgaacatggcgatgctcgcgggcttcaagtagttgtcgaaaatgagcgggcagctcgtttcgcagtccagaccccgatgggcggcctccgccttccattcgtccgagtagccgttgccgtcaaaacggacaggcttgcactccttgatgtagcggcggataatttcaatgatggcggagattttcggttcacccttttcgatgagcgcgtccacgtcctgcttgaaccgggcaagttgttcggcaacggccgcgttgagcgcaatcatggcactggcacagtttgcctccgagcctacggcgcggaattcgaagcgattgccggtgaaggcgaacggcgaggtgcggttgcggtcggtattgtcaatcagcagttcgggaatttgcgggatgtccagcttcattccctgtttgcctgccagtgagacaaggtcatcgttgccgctttcttctatatggtccagcacttgcgtgagctgtttgcccaggaaagaagaaatgatggctggcggcgcttcgttggctcccaggcgatgggcgttggtggcactcatgatagaggctttcagcaaaccgttgtggtggtataccgccatcagggtgttgacaatgaaggtgatgaagcgcagattatcttcggcggtcttgcccggagccatcagcaggacgccggtgtctgtacccagtgaccagttgttatgcttccccgagccgttgacgcctttgaagggcttttcgtgcagcaacaggcggaaaccgtggctccgcgccaccttgcgcatgagcgacatgatgagcatgttatggtctaccgccaagttgcattcttcgaaaatgggagccagctcaaattggttgggagccacttcgttatggcgggtcttgacgggtatgcccagttccagcgcctgtatttcaaggtctttcataaaggcagccacacgggtggggatggctccgaagtaatggtcttccaattgctggttcttgctggcttcgtgtcccatcagggtgcgcccggtcagcagcaggtcgggacgggcggcatacagtccttcgtctaccaagaagtattcctgttcccagcccaggtaggccaccactttcttcacttccgggttgaagtaacggcacacgtccacggcggctttgcccacagcactcaaggctttcagcagtggcgttttgtagtccagcgactcgccggtgtaagcaatgaaaacggtagggatgcacagggtgtcgtccaccacgaagacaggcgatgaggggtcccatgcactgtagccgcgtgcctcgaaggtgtttcggatgccgccgttggggaagctggaagcatcaggctcctgctgtacgaggagcttgccggagaattcttccatcattccacccttgccgtcgtgttccacaaaggcgtcgtgcttttcggctgtgccttccgtcaggggttggaaccagtgggtgtagtgggttacacctagctcggttgcccagcgtttcatgcctgccgccacttcgtcggctatggcacgctccaggggggcgccgttgtccatggcgtccgtcagtttggcatagacggcgccgggcagatacttgaacattttctcgcggttgaaaacgtatttggcgaaatattcactgggcctttcggctggtgtctccaccgttgctgctttcttcttgaaagccgtttcgactactctgaatcttaattttgacataatacctaaatttgtttagttgttaattagtagaatgaatggaaaaaacttttgtgattaattgtatgccgactcgccatgctcatagatatcgagtccttcctcttcaatgcgtttcggaacacgcaagccatgtatcttgtccagcactttaaagacaatgaagcccatgcctgccgcccacactcctactacggccgcgccgaagagctgtgccagcaggaagctgcttccgccgccatagaacagcccctcttctgtagcgaagagtcccgtaagaatcgttcccaggcaaccgcaaacaccgtgtacggacgatgcgcctacggggtcgtcaattttcagcacatggtcgataaagtcgactgcaaatatcattaccacgccgcaaatggcaccgataagtacagacccgaaaggcgataccaggtcacatcccgccgtgatgcccaccagtcctgccagcacaccgttcagtgtgagggacaaggaaggtttgccatacttcatccaactcgccaccagtgcgaagaaacctcctgcacaagctgccaggttggtggtgaggaacacatgcgaaatggtcgtctggtctccacttgtcgccgctgccaactgcgaaccggggttgaacccgaaccagccgaaccaaaggataaacacgcccaggcaggcaagcgtcaaactatgaccggggatggcccttgatttgccgtctttcccgtatttgccaatacgcggccccagaatggcggcgcccaccaaggcaatccatccgcctacggagtgaaccaccgtagaaccggcaaagtcatgaaaagtagtgccgaacgtcctcatcataaaggagccttcgtctccgttcatcagccatccgccgccccaggtccagtggccggaaaccggataaatgagtacgctgataaagacagtatagaccagatacatggagaacttggtacgttccgccatggctccggacacgatggtggccgccgtggcgcagaatacagtctggaaaatcaggaagccttcgatgggcaatccgttgtcgatgattttgtccatcgcctccaagttgaaaaaatggggggcacccacaaaaccgcctatgccgaacatcagcccgaagccgatgaaccagaacaggatggagccgaacatgaagtctaccagatttttcatcagcacgttggccgtgttcttggtacggatgaacccggcttctaccagtgcgaatcccggttgcatgaagaataccagcatggcggcaagtagcatccatacggtgttgagtccggtagcaagttcgcctagggccccggcggttgcatcgggcgccgcggtggtggctgccacgcctgcatcttgcgcccaaaggccggcggggagcataaataagagtatagtatccataatttttctcgtttacgttgtagtattgttttattcccgactttacttttgccggtaaagggaagtagcttgcgcttatttttcctgttctgcattatacagggctatgtcaccccgctcgcccgtgcgtatgcggacggcgtcttcaatggggatgacgaaaatacgtccgtcgcctatctcgccggtgtgcgccgccttgatgatggcttgcactgttttctccacattcttttcgcgcaccacgatggaaaccaggattctttcaatcgaactggtatcatacaccacaccacggtagatacgtccctggcgtgctttaccaatgcctcttacatcgtagtaggaaaaccattcgatgtcggcttcgagcaacgcgtcctttacgtcctcgaacttggtcttacggataatagcctcaattttcttcattgttgtacttgtaatttatatgttccaatctttttacctttttaaaaactgatacctctctctactttgtcgttatgtctgaatttgttattgtatctgcattttcagcacttcctgtcagaaactcagtccgaatacgaaataggccccttcggtgcgcggattcaccgtcaccttggcgaaggcggggactgagaatgagtctgtaatcttgatttccttggataccccaaggctgatgtcacatacggcgaacccgtccgaaccgctgcattccggatctgcggacacgttatagaagtcattggcccatggcgtggctcctatttctgccgtccagtccaggcctgccagtttgaagggggcggcgagtgatatgtaagaggagtaagcccggtcgccgtccttgttcaccccgtcggcacctgcaaagttggtgtaccagttcactgccagcggaccgaaatcgtagcctatctgcgcttcgaatacatggctggtatggtgcgtgccatagtggaaatagccggggccgccattgaaccagtagtctgtcaccgaaatgctgaaaccgccggtgctgtagcccagcgtcaggtccagttctttcgtatcagcggactcaatgcctgcggatccccatgcgccgagcgaaaatcctttgtaggcaacggacaatgacggctgtatgcttacgcctcccaaatcctgtccgcgccaaatatagccgcttaccaagtcagctcctacgctggcttccaccttgtcttgagcgatgctcgttgccggcactgtcatggacaggcctaatagcaatgccgtttccttaaaattcatcttcatagctttttaccttttaattaataatagtgagtatgtcatattttatatacctattggcttgattgatgtaagtccgatgcaagcacaaagtgcttcaaggtgttgtcatgtactgtgctcagagcaaccattttctgatccgtttcatggcttcttcgcaatccgcccgctctccgaaagcggtcaagcggatatatccttcaccactggggccgaagcctactcccggcgtgcccactacattggcttcatacagcatctgttcaaagaatttccacgagtttacctcacccggtgtcttcacccacaggtagggggcgttctctccgccgaaaactttgagtcctgtactttccaacgcttctttcatgatgcgggcgttagccatataatactgtataatggctttcacttgctttttgccctcgggggtatagatcgcttcggcaccacgctgggtgatataggatgtgccgttgaacttggtgcactggcggcggttccacatccggttcagcggaatgcgctctccttccagcgtggcggctgtgagttctttcggtacgacggtgtatccgcaacgcaccccggtgaatccggccgtcttcgagaaactgcgaaattctatcgctactttcttcgctccttttatctcataaatggagtgaggaatgtccgggtcttgtatgtaggcctcgtaggcagcatcgtaaaggatgagggtatcattttccaatgcatagttcacccattttttcagttcggccttgctaatgaccgtccccgtagggttattgggatagcagaggtataggatatctatcctgcggtcgggaatttcgggcacgaaattattctcgctcaggcaaggcaagtataccacgttgctccatcgcccgtcttccagtatcccggcacggccgcacattacgttcgaatcgatgtatacggggtagatggggtctgtcacgccgatgctgttgtcgtggcgaaggatgtctccgatatttcccgtatcgctcttggcgccgtcactgataaagacttcgccggattccagatagacgccgcgcggagcgtaatcgttcctgatgacggcatctatcaggaaatcataaccttgttcgggaccgtaaccgtggaatgtctctttgtttgccagctcgtctactgccttatgcatggcttcgatggaagcttgaggcagcgggcgggttacatctccgatacccaggcggataaggtccgttttgggatgagagactttgaatgcatttacctttttggcaatgtccgaaaacaagtaattgtttggtagttttaaaaaatgttcgtttactagtgccatcgttgttattgtttttatcgttgttttaagtttttcaaaatcattatcacatctctatttcgccttcgaaaacctttccggccggaccggtcatgtatacatgtccgtctttctcgtcccagtggatgtggagatcgcctccgtccatccttacccacgattttcgtccggctttatggttcagtacggccgccacggcggtggcgcaagcccctgttccacaagccattgtgatgcctgaacctctttcccacactctcatccgtaaggattggtccggcaatatttctacaaattccacattggtccgctcaggaaaaagcggatgattttccagtttcggaccaaccgccggcaaatccacctcttttatatcatctacgaaaatgacaacatgcggatttcccatgcagacgaatgttcctttgtattcttttccatcggccaagatagtttctgccagcattccgccggttttcgtagctatctgtccggggtttgatagcaggggcgtacccatatctacggttacatccttcaccaccccgttgcctgtatgaagtttcaggattttgattcccgaaagggtttccagtgtgatcacctccttatccgtcaatcctttctcgtatacatatttgcctatgcagcgcgaggcgtttccacacatcatggcttcggagccgtctgcattgaatatacgcatactgaaatccgctttttcggatactccaatcagtaccagaccgtctgcaccgataccggtatgataagcgctccattttctggcggcttttatcggatcttgcagcggagaagacaaggtatttacatagatataatcattgccggttccttgcatcttggtgaacttgatagttgttgccattttgattaatacttatttattgttgtttccttttgcttttaattatatgcaaatatatgtctttttgatattttataagatataatcgtttctattttcttatttattttcactctaataacaaatagaaaccgaaatgtttgttttatctttcaaattacatcagaacaagggaagatagttttgaattataagtcaataggtcgttatatggttgagggatgtaatattcctattattatactccggttgattgactataaaggggggatgccgtcctaaatacaatctatatgaataaaagaaatgcccaaacttacaatttaaaagtatttttcacaatatatctttcaaatattaaataaacacgtcatatatacaacaaactgtaagacaaggacgcaagactgcatctttttatcaaaagaaagcatcagctcttcatcaaaaagaaataaattacctacttttgcagaacaatatgaaatacaaaccaacattattataaaccaaagacagcaataatggcaaaaacagagcaaacaggtctttatgacgcaaccaacgaacatgacgcttgcggcgtaggcatggtagtcaacattcatggcaacaaatcgcatgaattggtagactccgcattaaaggtattggaaaacatgcgccaccgaggcgcagaaggagccgataacaaaaccggcgacggagccggaatcatgctacagattccccacgaattcatcctcctgcaaggcatccccgtacccgaaaaaggaaaatacggaaccggactcgtatttctgcccaaagacgaaaaagagcaagccagcatcctgagcattatgattgaagaaatagaacgcgaaggacttaccttgatgcacctgcgcaatgtgcccaccaaccccgcctgcctgggcaaggacgcacgggccaccgaaccggacatcaaacaggtattcatcaccggagtgacagatgcggacagcctggaacgcaccctctacatcatccgcaagaagatagaaaagcgcgtgcggcacacggacttctacatcgtttcgctatcggcaaaaaacattatatataaaggtatgctctcgtccatgcaagtgcgcgagtacttcccggacctgacgcaaccctattttaccagtggattggcattggtacactcccgtttcagcaccaacacatttcctacatggagcctcgcccaaccgttccgtttgttagcgcacaacggcgaaatcaataccatccgcggtaaccggggttggatggaggcgcgcgaaagtgtcctttcctctccggcattgggggatgtcaaagacatccgtcccattatccagccgggcatgagcgacagcgcctcactggacaatgtgctggaattttttgtaatgtcgggactgagcctgccccatgccatggcgatgctggtacccgaatcgttcaacgacaaaaaccctatcagtgaagagttgaaagcgttttacgaataccattccatcctgatggaaccttgggacgggcctgccgcgctgctgttcagtgacggacggtttgccggaggaatgttggaccgcaacggcctgcgccctgcccgttacctcattaccaataatgacatgatggtagtggccagtgaagtaggcgtgatggatttcgaaccgggagagattaaagagaaagggcgtctgcaaccgggcaaaatactgatgattgataccgaacaaggtaaaatatattatgacggtgaactgaaagaacaactggcgtcggcccgcccctatcgcgcatggctgtctgccaaccgcatcgagctcgataccttaaaaagcggacgcaagatagacaaccggatagacggctatgaccgtatgctgcgtactttcggcttctcgcgcgaggatatagaacgcaccctcatgccgatgtgcaacacaggggccgagcccatcgcctctatgggtaacgacacgccgctggccgtcctttcggacaggccgcagttgctgttcaactatttccggcaacagtttgcccaagtgaccaatcccgccatcgaccctatccgtgaagagttagtcatgtcgctcaccgagtacatcggggccgtgggaatgaatatactggtgcccagcgaaagccattgcaaaatggtacgcctgccccatcccgtgctgaacaacacccaactggacatcctctgcaacatccggtataaaggattcaataccgtgaaactccctatcgtattcgaggtgagcaagggaaaagccggattgcaagaggccctgaacgacctgtgcaaaaaagccgagcaatccgttacggacggagtgaactatatcattctgagcgaccgtttcgtggacgacacccatgccgccatcccgtcgctactggcagttagcactgtccatcatcacctcatctccgttcagaaacgcgtgcaaaccgcattgattgtagaaagtggcgagattcgcgaggtgatgcacgccgccctgttgctgggatatggcgccagtgccatcaatccctacatggccttcgccgtactggatgaactggtgaggaaaggcgatgtgcagatgaattacgaaacggccgagaagaattatatcaaggccatccgcaagggcttgttcaagattatgagcaagatgggcatttcgactatccgttcctaccggggcgcaaagatttttgaagccgtaggggtcagcgaggaattgttgagaagctatttcggcacacagacatccagcatcggaggcatccgtctggaagaagtcgccagagacgccatcgccctgcacgatgccggattcgctgcaaaagaagtgagcgacattttaccgcacaacggactgttctctttccgcaaagacggagaacggcacgcttggaatccggaaaccatctccaccctgcaactggccacccggctgggtagctataagaagttcaaggaattcacctccatggtagatggaaaagagtcacccctcttcctgcgcgacttcttcgggcacaaacgaaaccctatcgatattgaaaaggtggagccggtagaaaacatcgtgaaacatttcgtgacaggagccatgtccttcggcgctatcagcaaggaggcacatgaggcgctggcactggccatgaacaaactgggcgcacgcagcaatacgggtgaaggaggtgaggacagcgaccgcattaccggcacctaccagggtatctcactttgcagcaagaccaagcagatagcatcgggacgcttcggagtcaccgccgaatacctggtccatgccgaagagatccagataaaggtggcccaaggcgccaagccgggagaaggaggacaactgccgggattcaaggtagatgaggtgattgccaaaacccgccactccattccgggcatctcgctcatttcccctccaccccaccatgacatttattccatcgaagatttggcccagttgatattcgacctgaaaaacgtaaacccacaggcacgaatcagtgtgaaactggtagccgaaagcggcgtgggaaccattgccgccggagtggccaaagcgaaagccgacttgattgtcatttcgggagcggaaggaggaaccggcgcgtcgcctgcatcgagtatgcggtatgcaggtatctcgcccgaaataggactgagcgagacgcaacagaccttggtgttgaacggactccgcggacaagtgaaactgcaagtggacggacagttgaaaaccggacgggatattatcaacatggccttgctgggtgcggaagaattcggtttcggtaccaccgcattgattgtactgggatgcgtcatgatgcgcaagtgccacaccaacacctgtcccgtaggcgtggccacccaagaccccgaactccgcaaacatttccgcggacactatgaatatgtagtgaattatttcactttcctagcacaggaagtacgcgaatatttggccgaaatgggattcacccggttggaggatatcattggacggacagacctgattgaaatacaacaagcgccaagtgagaagaaatcctcactattggatttcagcagactgctacaccgggtggacaacggagctgccatacaccatgtcatggaacagaagcacgacattgcccatgtgaaggatgtgaccatactagccgccgccagggatgccatagaaaacggaaaagaaatttccctggaatacaccatcgccaatacggaccgttcggtaggcgccatgctggcaggagcggttgccaagaaatacgggcaggcaggacttccggaacagaccatccacatcaaattcaaaggttcggcaggccaaagtttcggtgcgttcctgacccacggcatcagtttcaagctggaaggcgaagcgaatgactatctgggaaaaggactgagcggcggacgcattgcggtactgccccccgtgcgcagcaatttcgatgcggaaaagaataccatcgccggaaacaccctgctgtatggcgctactgacggcgaggtgtatatcaacggacgggtgggcgaacgcttcgccgtccgcaattccggtgtgacggccgtggtagagggtgtaggcgaccactgttgcgaatacatgaccggaggacgggtcgtggtactgggggaaaccggacggaatttcgctgccggaatgagtggcggcgtggcttacgtgtggaacaagaaccacaacttcgattatttctgcaacatggagatggtggagctctcacttatcgaggaggcatcttaccggaaggagctgcatgaactgatccgtcagcattacctctataccggttccaaactggcacgaacaatgttagatgactggaatcactatgtggatgaatttatccagatagtacctatcgaatataaacgagtattgcaagaagaacaaatgcgcaagctacagcaaaaaatagctgatgtacaaagagattattaatacatcacacaaattatcaacaaagaaatacaacaaagatatgggaaatccaaaagcatttttaactattccgcgtcaggaagcgggctaccgtcccatccacgaccggatatcagattatagcgaggtagaacagactctgaacagccgtgaccggaaacttcaagcctcacgctgcatggactgcggcgttcccttctgccactgggcttgtccgctgggcaacaagcagcccgaatttcaagatgccctctacaaaggcaaatgggaggaagcctacaagatattgaacgaaaccaacgattttcctgagttcactggccgcatctgccccgccctctgcgaaaagagttgcgtgctgaaactgagcatggactctcccgtcaccatccgcgagaacgaagcggccattgccgaagcagccttccgcgaaggttacatcaagccccggaacattgaacgcaacggacggaaagtagccattatcggcgccgggcccgccggactggccgccgccaaccagctcaacggaaaagggtacacagtgaccgtcttcgacaagaatgaggctcccggcggcctgctacgttacggcatccccaacttcaagctgcacaagcccatcatcgaccgccgtatccgggtgatggaagaagaaggcatccacttcaaaatgaacaacgatgtggatgtgcgacaactccccgaaggttttgacgcctactgcatctgcaccggagctccgaccgcccgtgacctccctgtccccggacgcgaactgaaaggcatccacccggcactggacatgctggcgcaacaaaaccgtatccttgccggcatgacgttcccgaaagaacaactggttactgccaaagggaaaaaagtactggtcatcggcggaggggataccggcagcgactgcatagggaccagcaaccggcaaggtgccctaagcgtcacccaaatagaaatcatgccccagccgcccgtaggacagaatcctgccactccatggccccaattccccgtcgtactgaaaaccacctcttctcacgaagaagggtgcagccgcctatggtctctcgccacccgtaagtttttaggcaaaaacggtaaagtgtgcggtgtggaagtggaacaggtggaatggactcccgatcccgacggcggccgccctgtcatgaagcccaccggaaaggtggaagtgattgaagccgacctggttcttctggcaatgggcttcttaaaacccgaacatccccaattcaccgaaaacgtattcgtagccggcgatgcggcaagcggagccagcctggtggtacgcgccattgccagcggacggaaagcggcaacggacatagacagttatctcaataaataaatcaacaaatacaattatgtgtggaatcgtaggaatattcaagataaagcaacaaacgcaagagttgcgtcagaaggcattgaaaatgtcacaaaagctccgccaccgcggaccggactggaacggtatctatgtaggcggctctaccatcctggcccatgaacgcctctccatcgtagaccctcaaagcggagggcagcccctatacagtcccgaccggaaacaaatccttgccgtgaacggagaaatctacaaccatcgggatgttcgtgcaaagtacgccggaaaatatgatttccaaaccggaagcgactgcgaagtcatccttgccctttaccgtgacaaaggtattcacttcctcgaagacctgaacggcatcttcgccttcgccctttatgatgaggagaaagacgatttcctcattgcccgcgaccccatcggagtcatacctttatatataggtaaggataaggacggcaaaatatactgcgccagcgagttgaaagccctcgaagggttctgtgatgaatacgaacccttccttcccggccattactattggggaaaagaaggcaagatgacccgctggtacgtccgcgactggtttgaatacgaagccgtgaaaaacaacaatgcctattcccaggacatacacgacggactggaagaggccgttaaacgccaactgatgagtgatgtgccctacggcgtacttctttccggcggtctggacagttccgtcatctctgccattgccaagaaatatgcaggcaaacgggtagaaaccgacaataaaaaagatgcctggtggcctcagctccattcctttgctatcggtctggaaggtgcgcccgacctaataaaagcccgcgaagtggcccgctttatcggaaccgtgcatcatgaaatccactataccatccaagaaggattggacgctattcgcgacgtcatttactacatcgagacttacgatgtcaccaccgttcgcgcctctaccccgatgtatttgctggcacgcgtcattaaaagcatgggaatcaaaatggtgctgagtggcgaaggagctgatgaagtgttcggcggctatctctatttccacaaagcccctacagcccaagcctttcatgaagaaaccgtgcgtaaactaggcaagctccacctctatgactgcctccgtgccaataaatccctcgcagcatggggagtggaaggccgagtgcctttcctggacaaagattttctggacatagccatgcgcctcaatcccgaggcaaagatgtgccccggaagcaccattgaaaagaaaatcgtccgcaaagcctttgcagacatgttgcccgacagtgtagcatggcgacagaaagagcagttcagcgacggcgtgggctatagttggattgatacactgaaagcccttaccgccgaagccgtcagtgacgagcaaatggcgcacgcaaccgaacggtttcctatcaatacgccacaaaacaaggaagaatactactatcgcagcatcttccaggagcactttcccagtgaaagcgcagcccgcagcgtgccaagcgtgcccagtgtggcatgttctacagccgaagcccttgcgtgggacgccgccttcaagaacatgaacgaaccaagcggacgggccgtgaagggagtgcacgaagaagcatatgattcataatatggcaacgtgagtctgattccaacaatttcatgcatatctttaccgcttctcttacagcatgtattcaaagaagagatgctttgcaccccgaaatcttgcgcggccttgccttcgaaaagaggaaggctgcgcggtgcttttgccaacgttttcgaaatagagtggaaaaaacagccctttccatgccgggtatcagaaaaaaatggtgtagctttgtatagctataaaaaagagaagaagaaagatggaaacaaaaaaagcgcctcaaatcccttacggcatctcggactttgtgcggatgcggactgaaaattattattatgtggacaagaccatgtatttgcccctgattgaagatacagccagctatatctttatgatacgtccgcgccgtttcggaaaaagccttttcctaagcataatgaaagcctactatgacattttgcaaaaagaccgtttcgaaagttattcagcggactatggattggtaagaattccaccgaccagcgcaaccgtttccagatgatttattttgatttctcaaaggcaggggtttcattggaaagactggaaaaatgttttgagacttattgcaatgttgtcctctacctgttcataaaggattacgcttcttattattatgataattttgaagaaaagtgctgtatctggctcaaggaaccacgttacataaagtcctgatacagttcaaaggatgggaagtggtgagaagtgaaaaagatacacattaaaaacacaattaacagataaaataatgaaaacaccttttattcctaaattgattctcctttttatcctattttttctttattctgctggatatgcacaacaacgggattcaataaccatacgcggacaagtaacagattataacggacaacccattgacagttgttccatcttttggcagagcccctcttttgatgacattaaacaagccatcactgacaaaaacggatactacaccacccgtattcctaaaggaaagtatcaaagtatgggagctatcaatatgtctacctacccacataccgtaaaacccggactagcggaaaaagaccaacgtctcgaattttgggcatggaatttcattgccgatcgtgataccactctcaacattcgctatcatcgtatggaagtctatggactacgtattttccacatccctggaggcatgcccacctatcagatatatgttcgacccatgagtctgacccgcaccctgcaatggcaaaaagaagaaaaatcctcacttgtacatgcacaggatcttagcaagattgagcaaacaggtttaagcaaacaagccaaaggcgttttgctggcaccatcggctgacaaactaaaagctatcgtttggataaatggagaagaagtacctgttctgatgaaacaagagataaaagagtacttcgatgctaccgaatacggcaatgcctatctgctgaccgtggatatgcccagacaccagaaaaatattctcccctaccgaatatttaaagtagagttaactgatttagagaatggtgaccgtggagaagggctttattatatggaaaaagagaactatataaaataaaaagaagcggtattctaccgcttcttgagccgaaaccgggactcgaacccgggacctattcattacgaatgaattgctctaccaactgagccatttcggcaactgttttttctgcaatatcgggtgcttttctgaaaaagcgttgcaaatatatatctttctttcgaaataaagaaactaaaagcggataatttttcagttatccgattttgttatgtcaattgatgccggatttattagtaggcttcttcatgtatccctttcatggcccatccgcttggttcgtttatgttcttgaaagcggtatcccacgtaagagcttcaacgatagaattgttttcttttatgtaaagattataacatcaaggcgtaaaaactattttacactaattgctctcctcatcaaacacccgtgatatactgaaatttacccactccatacccaaacaattcaatatccgtcaaagtttgatggtctttaccttacccggaatgatggtcagatgcaccgttccatccttttctatctccaccttctgatatctggcctccaccaccacttttccatccagtgccatcaccccccactggcaggcattcccttcaaaagcacaataaccgcctacaggaatacagatattccggtaacaaggaggcactacgatacgatctccccatttcagcccccacttcatccccatccggaaaggaaggacatcttttatttcctccagcctcttccgccttttctcttcctcattctgttgccgttcccgctgtacgctctccgcacgccgcccggcttccttcctcagaccttccaccacggaggcaaaatccgcctcgcccgccttaggagcattacaagctatataccgcttcccctttcctttctccacatgataatagtttccttccccgtccatcaccacaatgctccgatccgccaaacaaccacaacaccagtacacctcttcatcatccccttccagcacgcaggcgaagacatcaaatatagcagaccacacaggatcaactagccggcaagacttcggaacacggtaatccggtatcttcaagtagaaaccataaaaacaaagactgtctttgt

SEQ ID NO: 4005 - DNA, 294 bp, Unknown
  gut microbiota DNA sequence
tcaggataaaggaggtagtcatgcgcatgttcgagttggtcccagttccggtaatcactgattttctccttgtattgtttacgaagagtctgtccttttacgccataacgttccgcaagcacacagatgctcacaggagtagattcaatctccttcttttaaaaaagaaacgaactcagaattgagccgtgtaccgtcaaattcggataaatcccagtcatagctgaagatttcattggaagacttgtcaagccatttacgtttacggacatggagataagtggcgcgaccacg

SEQ ID NO: 4006 - DNA, 554 bp, Unknown
  gut microbiota DNA sequence
tgtcgtatctgtgcggaagacacggagaacaacttcatgccttcgccgggtatcatcaaacagctgacggagcctaacggcatcggcgtacgcattgacagctacgtttacgaaggttacgagattcccatctattacgacccgatgataggcaagctgattgtatgggctacgacccgccaatatgccatagaacgtatgcgccgggtactttacgagtacaagattacgggcctgaagaccaacctcagttatctgaaacgcatcatgcatacccccgactttgtaaagggtgagtataataccttgttcatagagaagaactcgcgtatgctgctccgtggcaacggtaataatgaggagattgagaatatcaccatgatcgcctcttatattgactatctgatgaatctggaagagaacaagagtccccagctgtctgatgcccgtcccatcagccgctggcgtgagttcggcttgcagaaaggagtattgagaatctgattcttcatttaattaagcaaaagtatggaaatacatattggagaccgcgt

SEQ ID NO: 4007 - DNA, 771 bp, Unknown
  gut microbiota DNA sequence
ttttgattttatttcgaactcacgttaatattatgtgctaaataattaaaatatgaaataccctatcggcatacaaatttttagtcaaatccgtgaaaacggatatgtttatgtggacaagaccgactttatctaccagttggtgggtagaggaagtatctattttctcaaccgtccgcaccgtttcggcaaaagtattatgaagggcggagagaggtgaggtaatatccggacaagcctgaaaatatcctgtagtttggaataagtaagtaatgttataaaatagcctgatacattattttattcatcgttataagcccaaatccaaaaaagttgggagcgttcatgccctcatgctctcactgtatatgtaatatgttggccatgaacgatttgtgtagctgtggtaaaaatagttgctttcacttatgctctcactaatcccttatgccctcactacgttttgaagcatctttccatataacatgcttgttgtcagttatatattcttttttataggatattccggcttgatgtaaagtaggacgttttttggctttttgagaagaaaaagtgtgcgtaaagggtttgtacttctatggaatgtgatcgtaaagttcccggcatttcatgcagggtaaaaagatcaagacgtttttaaaaaagctcgttatcttttaaaaaaacctcttgttcttttttaaaaaggccgttatctttttttgaaagttcttgatctttttatataaagtcggagatttttagaaatag

SEQ ID NO: 4008 - DNA, 6929 bp, Unknown
  gut microbiota DNA sequence
agcttctatttttgtgtaaggtattcctccattgaacgataccggtctttgattgcggcattttcattgaatccattcagacaatggagcaaggctttctccaaagtggtgtatctgcggttaaaacattgcggattgtccaggcaataggcattcaaggcatatctgtatggggcatattcaggattatcctctttggtgattttcacatgccaaggaaagtgtatccgcagagtgaatgaccgtgtttccccttttgtaatccgttcctcttcctccagcatttttttcacgagggacctgtccagcaacggatatccatattccctgtaatgtttgatatggcagcaatactccgttgcgtattgcttcaattcttccggtcttatatcatagtgctccccatagaaaagcagcacttccctgcctgttacgataacgggctttccgtccgcttcatgtttaaatacctgccgttccatcttttccctttctgtcagcaaggcaaaaccgaaacattccgtaagggtgaaactttccctgccgggaacggacagcccaataagcctttccaatgtgtggcagtaaaagaaaataccgtcatcggccataccggtgtccggtgaaagcataattcttacatccttgacctgaccgctgtccctttggacaatccggcaattcgcgtaatgtggctcacaagcattctctttcttgaacctgtggtatttctccaaaatttcgttccggatttccctcttgtcggtcagggcaactcccaatccgcagttttcgcaccatccgtaataaaaagcttcgtccgtgaagtggtcgaacccttttgtgttggggtttaccattgcctcacaccttacattggccgatccgcatctgctgcacactatattattttccattgttcttctgctttacgggcgactcacggccgcccttgtcatacaattcggttgttattctcttaatttatctttacccggttcatcagctgtcccgaaatttcatgcagttcccggcagcgttccggctgctgttcccttgcaaaggcggtgattccctgtgtcagtttccatagcgtggccccgcctgtaactccgtcgtcaggattgttgttcatcagcagtttctcgacctcacgtccctcgtttttcaacaaggctcctttctgcaccagatttttcagttccttgtcgaaatccacgtctatctccgatgctccttgaatttcgatggccttctgcatgatggtgtctttgctgtacagtcctttggtcaggtcggaaacagccgatacggtggtctgcgtgtccagttcgtaggtcttttgggagagggacagggattccggcagtcggcctccaaggtgtatctgccgcatgacggactccctgaccatcccgttcaggcacgccccgttgagcaggaacgaccgcatatcgaccgatccgttgccatagtcggatgtggagaagcgtgctcctgcgaagatgatgaccgttccgttcttacgggtgggtatctctatcggagtgggcaggattgtctcacaccatactttcgtgtcgttcatataggcatcggacacgaccgctccctgtcctctcgcctcacggatgaaagcggtcaggatatccaccgagttcagccgacggtaggagtccgacaatacgccccggacttccattcctaccgcccgtatcagtacccgtgtacgctcggtccatcccgaatgctcgttcaggatggtggcgcacaattgtttctgccaaacatccccggcggaaagctcgcgcaggtatttggcgggaatgcccatcttctccgaaatctggcttatggcgttgccgtgcaggttgaagttcccttcggacattgccatctgtacccttccttccgctttgaaagagataacggggcgttccttgctacgttggcttaccccgatgggagcgatgaaatcctgcgcgatccgtccctcactgagcagacggttgatggtgtccatgacaccgccttgcctgccttctatcatccgctgtaccttgttaatgactacctggttgaggccctgctgcttctgtaccgatgcagctgccggcattactgttgtttccataatactatgtttttaatgttgatgaatcagaatttattcttagaacttgtcttggttgttttagcatatcccatgtatgtttcttctgacaaacggatataatcctcttcgctatatccggtcagcccgaacagttcataatatccggggaaagtttttttttccgcttccggtatatgcatgcaggttcccttgtggcagcagatgatatgccggacaaagcggtaacacttgcaaagatcagccacgacagtatattcgttgtccgtatgaggttcgtaatatccacaggaaagattgatacaggatacttccagaccgtttcttttcaaagccgccacatctgtattcagtccctgtgccggcttgtaaccgtacttccggaaatctatagctgaaatgaactcgttggagcagagcttcatcccattgatttgtgttaccatatccccgttccctttccggtcacactgaatcacgaaacggcaatcggaaaagaaggacatatcggcatggctgctgcctatgcatcccacctcctcctgtacgaagaaggcacatttcaccgtcttgcaatcctccaggcatttcaggcagatccagatgccgttcttgtcatccgcaccgattccggtcatccgtttacgcttgtgatcatagccgacaatcatcgagtccgccacaagatgggctgcataagagcctgtcttgcgccggtgtacctcgtccatgtgcgccacgacacaggggtagcttttccggttgcctttgaccgcatagatgtttccgtacctgtcttgccggaaaggaatctccatccttttgagttcctctatgatgaatttagccatcttcccctctctgccagagggggaagaaatgccgtaaagagccattagtttttccatgataatgatattttaggaaataaacaatttttcgatttgcaggtatcgtctgaattccggtacgggacgccctttacgaaagagaaaagacggatatttctttcctttatattccactgataatcctttcaggactttcccgaatacggtagatacatagtacatatcctgacagttcttgcagaatgccgcatccgggaagatatgtatcttcccgcatttgggacatacatattttttcctgtttgcacacccttccgtgctccggcaggtggctatgctcgtgtcgccctccgtatttctcagttccaggttaccgtccgtcagatggaggctgtagaacgtgtcgaggtaaggtacccctttcttgtgccacctgcaggcgggcactttcaccgtcaaagaaacctgtatattatctccgaccgcccattcctgcccctcaatgggattcagtacggtgaaatccgttgtatgtgtataatcgttgtatctgcgtcgcaacaggatgcctgcctcctgcgcctgcttgcggatcagttcgacgacgaatgcgtgtgaggaatagatacgatccagcagggaggcggcaatcggtgtgtttattgatttccacaatgttatctcgttccatacaatggcccgtccgaccacattgctgctgtcatcccttgccacgagtattttggctcctgcgaaattggcatagaaatccgctgcattacgggccttgtcttcatatctcatacaggagttgtgcaggctggattcgctaccgtcagatatgggactatagttgctttccagataagcctccataaaatcgttcatactgtcatgcagtctgattgtgaccttactgtccagtgagatggcgctgcagaaatagttgatttcatcgggctggtacggccccagatttttgaacagctcgataaacgtggacggttccagatctgtccggttctccggaaaccagggtgcctgcggattgttccggtccgggaaattgggatggcccaagtctttgttgcatgccgtgaacacgatccggattttcttgaacgtgccggcttccgtccgtttgcgtttggtggagaaaaaattgtaggacccccgtatgacttcttccaccggtacgttcttttttacttccgaaaggatatctttggctatcacacttccgttttccgccgcatgggtcaggcgggatttcaattcgttgctaacattcagtttcataatcattcggtttattgtttataaattctgttgtttatatggcaattgtttcttgccaggctgcatttggcgcaatttctctttccgctttctgagcaggtcaacggacatgttcctgcttgtccgatattcctcctcactcatccggcgaatggagggaatgcccgtctgggtcagcgtatggtttaccatccagccgtccatgaagttttcggggcagaggctgtcatggtggatgacctcacctatgcagccatgtacgagcatgttgcaaacggtcatcagacaacaggtacggctgacatcctctgcaaccagataattacccaggtggcgtacatgatatgccagcagcagccttccgcttccgcatgtcgggtcacagatacgttttcctgccgctgtctcccccgaatcggtacataagaccatcaggtcgcagatatccggcggagtgaagaactgtccgttcacctgccgaccgcttttggaggatattgccatgaagaggtcaccgaacgcatcaaaccatccgccggattgcaattcccgctgcatgagccgtatccatccggtaagcatttccataaaatgcctgttctgctgccgtttgtatttccagtctataaggggcggtgcgccgggagagaacccgtgaatgacataacgcaggaaatcgttgaaaacggatatcggatcgtagccgttcgaataggcgaaatcacagaccattttctcaagcggacgtatcgcctgcggtgtgttgtatggtaccatattactctgattttttatagattgttactatatgtcttttatggtcagtctgtatcctgacgggagaaatgccaaggaaagagagatgggtgtccgctttcagcatgttccattcccatgcgggaagttccttccattccatacggtatgcccagagtatgaacagaccgggacggaatccgttgaaaagctttccgtgcagaatcccgaccagccgttccagttcttcccgcgagtaaagggtgaatgcctcattccgatagacaaaggcatcagccggttcaatatccggctgacactcgatgaggtatctcgtccattcttttgtggtgtactttccgtacagaggatcgggttccgtgtatttccatgccctgacgaatgtgtggaagaggacggcaccgttcctgtgccttccggtatgcccccacatccggaactgtttgctgcgtatgccatcgggaatcagcaatttcggaccggttgtaacccaagggcctccttcggtattgtaaccggtacacttttcattttcatggcaaaaaggtgtctgtgggagaaggcagatatgaacttcccggtcatcgcccctttcaatgtgtgcctgcggataatagtcaccgccacgggtgatataagtgacaacgtctcctgcagtcggtaaaccgactctttccctgtcctcccgcatccttgaaatcagccggttcaccttctccacatcacattcctttatggagcaggcacacccttcatgcctgttgagcagagtcagactttccaggtcataaaaattaccgtacttcatattgagatcgtttttgttgatacaatttgacctgacgggcaaccatgtcgcagaacttctgtccgttctccttctcgcttctgaaataggcaatcatgtcccagagattccgattgaagtagccggtccatttttcgtaatagtgacttccatagacctttccgaacgtttcctcgaaaagtgcaggagtcagcccttcatccccgtggtggttgtattgccacagggagacaagcagcagctggttataatccagtgtttccatatctgttcttttttaagtaaaacatcggcctacatgggtaggcatttttatttcttgatgtctttccagtctgttttccggggattgcggcaaggcttggcgaaagaaaataccgcagcgaagcgaggatgattttctttcagccaacccagcccctgaaaggggccgccttgcacaatcagcccggaaaacggctatctttacagcaagaaatgaaaaagcagacctcggattctctgttctgaagtctgcttttcggtcattgtcaagtttcatgtttttcaggtatgtatctgccatccgtggaacggctgtaatgttacggcgaacgacctgtcaggtattccatgatagagcagacctcccacgatacctgtccttccgtcgggatagtgctgtgtgaagccgaacgagtacggggcatggtcatagtagagtgagatttcgcagggatagtcaggattcccttcccaactcttcaaccgttccaagcacttttgaagtgaggtgtcaccgatggattcggcatagtgctttacgttctcgaaatgttcttcattcaggattttcatgacttttgtatttttatcagttaaacacgtccggctccgggagccggtatttttatttctcgcctgcctgacagtcccgtggccgtacccgcaaggtttggcgaaagaaaataccgcagcgaagcgaggatgattttctttcagccaaccccgcaggggcctgaccttgtacgggtacacaggacacgggactacctttgcagggtgggaaataaaatatacg

SEQ ID NO: 4009 - DNA, 1652 bp, Unknown
  gut microbiota DNA sequence
aagaaagcttaccaaccaggaaaatccgctgaccctttattagtccgcagcacgggagaaaagaagggtgtattggcacgcatccgcatgaccgcacgcttgaaactgcatttgggcgaccaaaagattgacgtcatcggtgaccatgaggattcaccggtagtgcaggaagccttgaaaaacggaatacaactgatatgacagaaaagaaaaaagagataacagaacgcctggaacgggaatttgatgtatgcgacaagcatatccttcgtataaatgaagctcttgaagggttaggggtcaatattcccatgtctgcggattgttattccaacctgacaacagaacaagtccgctgcatagaccaattcatatttcgcttttccaaattgcaggattccatgggagcaaaaatattccgatatatattggaatatctggatgaagacatcaccgcacttcctatgcgtgacattctgaaccgtctggaacgttatcttattattccaagtgctgacgaatggacttatatacgtgagttgagaaatgagatctcacacgattatcccttgcttgaaacagatgttgccgccattttgaatgaactgttttccaaaacagatattatatttagcatttacagtaaattgaaaagtgtcttcaataataacagacacgcttaaaccgtgatacaggctattcttttcttccccgatatttttttcggaacacaaacttcgaaacgaaattatcgagaagaaacaaacgctcaggaaattcatgctgaatgctgaatgagattttctctgttgtctaccaattttataagaaagcttaccaaccaggaaaatccgctgaccctttattagtccgcagcacgggagaaaagaagggtgtattggcacgcatccgcatgaccgcacgcttgaaactgcatttgggcgaccaaaagattgacgtcatcggtgaccatgaggattcaccggtagtgcaggaagccttgaaaaacggaatacaactgatatgacagaaaagaaaaaagagataacagaacgcctggaacgggaatttgatgtatgcgacaagcatatccttcgtataaatgaagctcttgaagggttaggggtcaatattcccatgtctgcggattgttattccaacctgacaacagaacaagtccgctgcatagaccaattcatatttcgcttttccaaattgcaggattccatgggagcaaaaatattccgatatatattggaatatctggatgaagacatcaccgcacttcctatgcgtgacattctgaaccgtctggaacgttatcttattattccaagtgctgacgaatggacttatatacgtgagttgagaaatgagatctcacacgattatcccttgcttgaaacagatgttgccgccattttgaatgaactgttttccaaaacagatattatatttagcatttacagtaaattgaaaagtgtcttcaataataacagacacgcttaaaccgtgatacaggctattcttttcttccccgatatttttttcggaacacaaacttcgaaacgaaattatcgagaagaaacaaacgctcaggaaattcatgctgaatgctgaatgagattttctctgttgtctaccaattttat

SEQ ID NO: 4010 - DNA, 836 bp, Unknown
  gut microbiota DNA sequence
tgaagcttttgcagcagcagcctctgtctttgcagcatccaaagcagcctgcaaagtagcgatctgagaagtcatgtcctccttagtcgccagtttgttaatttgttcctgcaaattgtctatgtcatcatcatagtctttacaagatacaaatgttcctgtcgaagaaaccatcaaggctccgaacaggattgcacttaaaaattttttgttcataatagaaaaactttaaatttataaatttaaaaactcaaaatgtttattgttataaaaggacttaattgcgttgaatcataaaaggattccgactctgcgatatatattgcaggggagtcatgccaactacttttctgaacgccacatagaacacgctcttggaggcgaacccgcaacggctgaaaagctcattcaccgggcaatctttaccgtccagcaactccttcgcgcgaaccaccctgtaggaatttattaaccgcttgaaattgcatccgaagtagttgttcaccgcattactcaggtaggtcgtattcgtgccggatactatacagtaatactaattgtttgaacaccagttatatgtgtgacaactttaatgatgtaagggtcgtttcaggtccttttttatttataattgacaataatatccggtaaactatctactgctttttgtttgagttcatctatgatatgaacatatttttcagtgtgccgggtagtagaatgtcctgcaaggctggcggcggtcttgatattagctccatttgccataatgttggtgataaatgagtgccgggcacagtgcacaatttaagcaaaagcaacggaaagtgaatatg

SEQ ID NO: 4011 - DNA, 647 bp, Unknown
  gut microbiota DNA sequence
tcacgcttctttaccacaccatatcccactacaactacctcgtcaagcacctcattatcactctccattttaatagcaaacgcatgctgactacctacttttatgttctgagtcttatatccgatatacgaaataaccaatgtagcatttgcgggaacctccaatacaaacttcccatccaaatccgtaaccgtccctgtagtagttccttgaaccaagactgatactccaatcataggctcacctgtttcatcaataatggttccggtgacacttttcacctgagtaacaagttgagtgccaaagttcctaacatcggaagaaacctcagccatcatcggtgcgacacttatggacattgcggccgacaagctccaaataagaaaagaacggctggctttacaaccgtatgcgcttgcaaacaaacgccttgttttctgaacattttccatactttcctgggttaacaaataatcattttagatttaataattctttttgtgttctctttaagcgtgctccataatcatagtatcttaaatcacacattgcaaaagtagaaacattttcggaaaacaaaagcaatttcgcacttttttctttattttatttcgttttctttcatttacaacaaacaatacaaccta

SEQ ID NO: 4012 - DNA, 6332 bp, Unknown
  gut microbiota DNA sequence
tattgaaaactgttttcccaaacaacctgattttctaatcaatctctgttataatgtatgtttttaccttttagaatgattggcggctgctttagctaaccatcatcctcacttactttttgttttgtttgttacaaatgtagcggtcttataaagcgatttttgagataagaataaaaatataaatgatttagtgctagtgcaaatcatatataattgattcatagtataatatactggttggcttatcttaaaaatataactatatgtgaactgttcaaggctcattcggctacattttatgaggattaatgttaactgtttgtcaaaagatcactttctataacctcttgatgccttttaattctgctttatcttttacctctttaatgctgattgcataaccaccaccgcttgctgcgtgtaagttcagtttgcttttgttggtcacaatgcctttacggatggtatatgcctgtggattatctttccagtcggcatcttttgcgtctgcatatacagttgcgatgtattttttgtccggatcaaggaaatcaaatatcagttttgaagaatgaccgttctcgtctgccgtacagccgatataccagtcgttggttcctttagctttgcgggcaatggtaatatagtctcccggttcggcttccagatatttggtttcatcccagtcaatggctacatcttttatgaattggaaggcatccatgaagcgttcatagttttcaggtatgtcggcagccatttgtaatgggctgtacattgttacatacagggccagttggcgtgccaaagtagaacgtacctgtgaattgttggtaggattcattttgttacagtgggtttcaaagatacccggagtgtagtccatcggaccacctattaatcgtgtgaaaggcaagatggtagtatggtttacgttgttaccgccaaatgattcatattcagttccgcgtgccgattcgttaccgatcaggttgggataggtgcggcatattccggtagggcgtacagcttcgtgggcgtttaccatgattttgtagtccgctgcttttttcaccgcatacagatagtggttatccatccattgtccatagtggtgttcgccacgtggaataatgttgcctacatagccactttttacagaattatatccgttgtctaccatgaattggtatgcctggtccatgtggcgttcatagttacgtacagaagccgaagtttcatgatgcatcatcagttttacgcctttgcttgcagcgtagctttgaagttctttcacattgaagtcgggatagggagttacaaaatcaaacacataatctttgctttttccgaaccagtcttcccaaccttcattccagccttctaccaatacttggtcgaatccatgctctgctgcaaaatcaatgtaacgttttacgttggcagtgttggcagagtgtttgccgttaggttttgttttgttgtaatctgtttcacccagttttacactggataagtcgtccgtgtaagcccatgagccttttcccgtaatcatatcccaccatacgccgatgtatttcacaggcttgatccaggaagtgtctgctattttgcaaggttcgttcaggtttaacgtaatgcgtgaggcaagaatgttgcgggcatcatcactaacgatgacggtacgccatggtgaagtgcagggagtctgcatatatcctttgtcaccttgtgcgtccggagtcagccatgattcgaaaatcatgttcttgtcatccaggttgaggtgcatgcaggcatagtctatcaaagctgcttcgtgcagattgatgtacagaccgtcgtctgttttcatcatcagggcagtttgtacaccggtggggctgaatgcggtttgcgaggagttctccgtataagcctttgaaaacaatcctctgatttccgacaggcgggaaacggtatagtcatattcctgtgtgtcataatctcccggaatccagtaagcggtgtggtcacctgccatggcaaattgtgaatgttcttctttgatcacgaaatagttcaagttcttctgctgcggaaattcatagcggaaacccagaccgtcgttgaacaggcggaaacggatgattataaatctgtcattggcaggctggttcaatgtgaccgccaattcattataatggttacggatttctttttcttctccccataccggctgccatgtttcatcgttggtagatgtccggacatcctttatctcgaaaccgttataaaggtttgtcttgatgtccagtttgtctatgtcttttttatcagtccattcgaagtcggttttggcgtttgcgtcttctttttttaattccaaccccaatttactgggtttgataacttccttttgtttataggtcagttcatacgtgggagtgccctgaccatctagagtaaatgtcatctccagattaccatccggagagttcagtttttgttgtgcatttgcaatgaatgagatacagagaaatgcgataagtgaaagattcttttttaaattcataatatgtactggtattaaattataagcttttactggttgttttaaaattctaaaactagcatttcacgccccggaagtgttaggtttttattcaagtcgatattttgatccgttaaaacatcatgggctgatgttgttggaagtacttctttgtatggagtcaggtttatggtttgcgttttgtctgttccattcatgagaaccgttatcgatttgtttccgtattttcgttcataaacgtaaatccctttgttgggagcgaagtgtttcaatctgcctttggctatgacttcattcccttttctccattggagtaatttctgcatataagtaaaggcttcattttgctgcggagtacggttagcctcattgaaacagttgcgtgggtcatttttccaacctccggggaaatcacaacgtaacagaccgtcgccattggctttatctgcagccatcagaatttctgtcccataataaatctggggaatgccacgtgtggtcagcaggaatacaagtgcttgtttgtagcggtcaatattttgcgtggcttcttcatttaaataaaagcgtgaagtatcatggttatcaaggaaaacgagcagattcatcggatctgcatataccaaatcctgagtaagataatcgtaaagacgatataatccgccgttccagtcagttgtttcttcgtcaaaggctttgttcatttgttccatcagcgggaaatccatcacggtacggagattggagtttctgggagcagccagtctgctgtctttctgccagaaagaaaccagcacattactgttcaaccaagtttcacctactatgttgaaatcagggtactcgtcggtcacggctttacaccattctgacatcatgtcgaaatctgcgtaaggatgtgtgtcttgacggatgccgttaatccctgcatattctatccaccagatactgctttggatcaaatagcgggctacatggcggttgcgttggttcaagtcgggcattgattctgtaaaccatccgtctacggctatcttgcgttcataatcagaagcgtggatatcctgtacactcgctgttttataagaagtttgtgtgtagtttcctttaaaattgaaccagtctttggaaggcatatctttgaaaagatagttttcgctgccacaatggttgaaaatcatgtccataacaactttcattcctttgctgtgtgcttgttctaccagcttgcagaattcttcattgctacctaatctgcggtctacttgataataatcggtaatggcatagccatgataggatccttctttcatgtcattttcctgtatggggttcagccagattgccgtaactcccaagttggagagataatccagattattttcaatacctgcgaggtcgcctccgtgacgggcgaacggatcgttacggtctacctttgcttccaacatttccggtacgacatcgttcgagggatttccgttggcgaagcggtctggcataatcagatataatacgtcacctgagttgaagccttccacgttggaagcatctgccttacgctgttttatttcatatggcacaacagtttgctttttaccttgtttcagtgtaatatgaaaagtctgcggagtagcttccgataaatccatatataagattaagtaattgggattttcttgtttcacaacatctttcagaagaatgtctttagaagagatgcttacatcactggaagaaatattgtcgccatacagtaggacctgtagttcgggattcttcatatccgcccaccagaaggttggggctacttttttaattatggctgcggacactgtgtgttgcaaaccgaataacgcgagtaatgccataagtgcgaatgttcttttcataatatatagaaattagtgtttatatcttcatttcatttggatgttgcaaatgtaggagtggaatagctgagatttgagtactagaataaaaatataaatgttttatagattcaacttattgataattagtcatattcgtctttgatgtattgctgaaaatataaacgtcaatgaaaatattttcgttgaaaaactttattctaattacttatatttatatatttgtgaatctataataagtatataagatgaagaatgtaacctatttctttatattgtttttgttgactttgacaactcctttgtttgctgataaaaacagcaatgaagaagtgttgaaaaggttggatcgggtcatagataataagaccgcttgtcatgtacagaaggaaaaagagattgtggatttaaagcaacgtcttcaccgttctaaagacaatagggagaaatatgaactttgcggttctttgtttaacgcttatctgcattatcaagcagattccgcattgtattatattaatggaaaaatgaatttgttgcctctgttgaatcatccggagttaaagaatgagattgtcattaaccgtgccgaggtgatgggggtgatgggaatgtataacgaggctttggaacaattggagcgggtagacccgttggaattggaacgggagactttggcttattattaccggacctatcgggcttattatggttgggtggccgattataccaccaatgatgccgagaaagtgaaatatttgaaaaagaccgatgcttacagggattctattcttattgctactgatccttgtgtagacaggagcattgtatgggccgagaaaaagattattaatgggagggtggattctgctttggttatattgtcggacctattgaaagaaacgccggatgaacggcaaaaagggtatatttactatactttatccgaggcttacgatatgcggggagatattcagaaagaaatttattatctggccttgaccgctattacagatttgaaatcgtctattcgtgaatatgcatccttacagaaattggctcaactgatgtatgaggtaggtgatttggatcgtgcctataagtatttgaattgttcaatggaggatgcggtagcttgtaatgcccgtttgcggtttattgaggtaacgcagttctttcctattattgataaagcatataaattgaaagaagaaaaagagaggcagatttcccgtactcttttaatcagtgtcagtttactttctttatttttgcttgctgctattttttatctgtaccgatggatgaagaaattgtcagtgatgcgccgtaatctgagtctggctaatcagcagatgcaggaagtaaatgctgagttggcacagacggggaagatcaaggaagtatacattgcccgttatttggacaggtgtgtgatttatctggacaagttggagttttatcgtcgttctttggcgaaactggcaatggcctcccgtatagacgatttgtttaaagcgattaaatccgagcagttcatacgagatgaacggaaggatttttataatgagtttgataagtctttcctggagttatttcctcatttcattacttcttttaatgagttattggtagaggaaggaagaatatatcccaaatcgggcgagttgctgactacggaattgcgtatatttgctttgatccgtctgggagtgactgatagtaatcggattgcccatttcttggggtattctttggcaacgatttataattatcgtagcaagatgcgtaataaggcgataggaaacaaggaaacttttgaacaggaagtgatgaacttgtagagatagggggactttttaattataattgtaatgtgaatt

SEQ ID NO: 4013 - DNA, 8509 bp, Unknown
  gut microbiota DNA sequence
tctaaggttgtttttggagaatagttcacaatgtgaaggtgcggtatgtgtgtgacaactgtatcaatcaggaagctagcagggatggcattcatcttatttggatcataaacaggaacttcgttctgccaatataaattgcgagaaatatcattttcttgcgactcatttgaatgaacacggtatttgtttctattccattcatttatgcgatagatacggtcaatagagatagctccacctacacaaaggatggtatgattacaaacttgtagaatggaataatcgggaacagcaacgaagcgtttgaagttgagcattgcgccatcgaaataagcaggattatcatgattgcctcgcacaaacacaatccaattgttgtcttggttcattcgcttggcgtttcgtctaactatctgctcatagtactctttcttttcgaagccgaagccacaatccccggctacaattagcaaagtgtctgtaagctgatattggatacagagtttgaacaccaactgattaaagtttccatgaatatcaccagaaacaataattgtcttggcttcgggaaaagatagtgagaatatgccgttgtgattcatctttttttaatagactaattccattgtttttttaattgtacaattcgatagttaatgttgcttctttttatagttcgtcaatcaatcgcctaacttcgtccattgaaatttctccttctatatgtttacgaactatgttgtgcatattcttatcatctttttgattttcacgccataagttggggattcatatagctacaaaagtacaataataatccagatattgaatataattcactacatttgcattataaaatcgtaccaaacagtgaagctaaatagaataaaggcggttcttttggaaaaaggtatctctcagacgtggttggcgaaacagcttgataagagtttcagcatggtaaatgcctatgcttgtaatcggattcagcctaatttggatattctacaacagattgcagagatattgcaggtagatttgaaggacttaataattgataaaaaagataggtaataatatacaagcctttctgatgttattattgagtttaattgattagaatataaaaataagcaataagatggcaaacttaaatattgaacagaaaaaggtgaaaagcctttttcaagaatcgaaatacaacttccttatacctgattaccaacgcccatatgcgtggggtgagatggagtgtaaaactttatgggacgatttgttttcgttctctttcccaaatgatgactgtgaccaatttgttgacgatgaagagtattttcttggtcccatagtaacatttaagaatagaaaccaaatggaggtaattgatgggcagcaacgtttaacgacacttatgcttttgttaagggctttttataataaactaggtagtatgaaagactctcgctcaaaacggatgaaggaggatattgaaaaatgtatttggagagctaatgaatttggggagtttgaaacatctgctctgaaaatcaattcacaagttgctacagatgaagataaagaagagtttattgcaatattgaaagatggacaaggaattggcaaaaaaagtcgttacgcaaagaatttcaattttttcgttgaaaagatagatgcttttctaagtaattatccatcttattttgcatatttcccggctcgtgtgttgaataactgtgtccttttaccaatagaggcagaatcacaaaatacggcgttaagaattttctcaaccttgaatgatagagggaaacctctctctgatgcagatatttttaaggcgcaactttataaatattattcatcatttggcaaaaaagatgaatttatagaaacgtggaaaaatctagataagattactagcgaagtgtttcatccaatttatggtacaccattagatgaattgtttacaagatatatgtattatgaacgagcacttgcagagataaaatcatcaacaacagaagctttgcgcaagttttatgaaggagatggcagttatcctcttttgcatcagccaaagacattgagtaatcttgtaagccttgccaaattttggcaagatgttaacaatcaagaaacagaacgtttctcagataaagttctaaagcgtttgttcgtacttagttatgctcctaatggaatgtggacgtatatcacttctgtgtattttatgtaccatcgtgatgaaaatgatgaaatagaagaaaatgctttttgtcgtttcttggactgtataacagctttcatatgggcgtatgctataactaatccaggtgttaattctttgcgtacccctgtgtatgcggaaatggttaaaataatcaaaggcgaagaagtaacattctcagatttcaaattttcagaagaacgttatcgtgcgcaaataacaaattatgtattcaataatagtcgtgcgattacaaaatcaatgattacttggtgggcttttcaacatgataatcaatcattattgtcattggaaactagattcgatatagaacatatatatgcacgaaacagacgggataaagaaaaaagcttatcaaatcctcagaatgtagaaatacttgggaataaagttcttcttgagaaaagattgaatatcagagcttccgactatcgctttgtagataaagtaaaatattataaaggttttaccactgctaatggtcaggaaaagaatggctctcaaattgtagaattggcagagataagtaattcatatagtgattttactgaaactgatattattaatcgtaattctaaaattattgattcgtttgtgaatttccttagagcgaatcaattattgaaagagtaaagttatagctttgaatatcaatttgttttttgacataagcttccgataatttacaatatcaagaacatgactcctgaagaaaaagcaagaataaagatagatcagtggtttgccgatgctggttggaaagtagtcaacagggaggattatgaacctacttgtacggctgtagccataagagaaggtttattgaaaggaaatcttgaggcagattatttccttttcattaatggaaaagcagtaggggtacttgaagctaagcgtgaagaaacggatgcttttgcttcagaggtatgcgagcaagcagccttatatgcaagaagtgttccgaatatctatcaggcatatcaaaagccattgccttttatcttcacttcgaatggtaaggaactatattgctgtgattttcgtgaacaagattcttgtttcaggcagatcatgaatatccctacaccacatgaattggtaaagagactgggaattgaagatgcatttgccggactccctacattgaaaaagaaagggctgcgtgattgccaatatgaggcggtaacagaacttgaaaagagtttccgtgccgggcaaaatcgggcgttgatggttcttgccaccggtgtgggtaaaacatatactgcttgtcttgctgcctaccggatgctttcttatacaccaatgcgtagagtgttgtttcttgtagaccgaaataatcttggaaaacaagcagaaggagaatttggaactttccgtctgacagagaatggggaggctttcaatactatctttacggtcaatcgccttcgctcgtcttctattccttctgatagcaatgtcgttatttctacaatacaacgtctattctcattcttgaaaggagaaactattgaggataatgatgatgacgagaatgaacctatagaggaagtaaccttgcctcctaatcccaacttaccgcacgactactttgatatgattatcatagacgagtgccatcgctccatttatgggaactggcgcaaggtgctggagtatttcgatacggcaagattggttggtctgaccgcaactcctatccctgaaacaatggcattcttcaataataactgcattgttaactacacattggaaaagagtattgttgatggcgtgaatgtggattgtcgggtatatagaataaaaacgcaagtcacagaaacgggtggggctatattagagggtgagaaatttaaagaagaaacaagatatacaggtgaggttaagattgtaagtagtaaggaaaccaaaatctatacaaataaagaacttaatcggagtattatcaatccggcacagataaagttagtcctttcgacctatcgggatgtggtttatacggaattgtttaatgacccgcaacgtgaaccaaatatggactttttgcccaaaacattgatttttgctctcaatgaagctcatgctacaaatatcgtacaaatagctaaagaggtgtttggacggactgatgaccgctttgttcagaaaattacctattcggcaggcgacagtaacgaactgatacgccaattccgtaacgacaaggatttccgtattgctgtcacctgtacgttggttgccaccggaacagatgtaaagccgctggaagtagtgatgttcatgcgtgatgtggagtcattgcctttgtatattcagatgaaagggcgtggagtacgtactattggtgatgagcaacttcgcaatgttaccccgaacgcattcagcaaggattgtttttatttggttgatgcggtaggcgtgacggaacatgcgcaaacagtggcacctatagatgatgctcctacaacaaagacgattactctaaaggagctattagaacgtattagtcatggctatattcctgacgagtatctcaaacggcttgctgcaacgcttgcccgaatatacaacaaggcggatgatccgcaacggaaagagtttgtccgtttgtctcatgatgacatgaaggaactttctgccagaatatacgatgcactggagaaaggcattcttccaccgtttgtaagcactgatgagcctaacaatgaacgtaaggggctagtcgctccgcttgccaatcatgcagatgctcggaaataccttcttatacttgcagccggattcgtcaatacattgatgccgggtgaagatacgcttatctccaaagggttttccattgaggaagcaaaaaatacgacagaggcttttgaagatttttgtaaaaagtactatgacgaaatagaggcactgcgcatcatttacaacaatgagggagagcctataacctattcgatgctaaaggatttggagaacagacttaaaatggcaaacaatcattttacatccaaacaactctggaactcttatgccatagttaaccctaaagtggtaaggcgttccattaccaaagaagaaagcgatgcattgaccaatatcatacaacttgtgcgctttgctttccaccaaatcgaacgattggatagcgtagttactacctctaaacagtttttcaatctttggttagggcaaaaccagcgtgaaataactgacaaacagcgagaggttatcagtcgtattgtggattacatcgcttctaacggagcttgtactatcagagatattcgtgaagatgatgctacccatgcagcccaaatgattagagcgtttggcaatatgcagaaggcagacgaggcacttcattcactttacacatttgtagttttaagaaaagcagcataaagaaatggcaacaaataatacaacagagcaatcgctcaccaaaaaagtatggaatctggcaaccactcttgccggacaaggaattggatttactgattatattacccaactgacctatcttttattcttgaagatggatgccgaaaatgtagaaatgtttggagaagagtcggctattccaactggttatcagtgggcagatttgatagtacttgatggcttggatttggtaaaacaatatgaagagacccttaaattgcttagtgagcaggataatctgataggtacgatttatacgaaggcgcaaaacaagatagacaagcctgtttatctgaaaaaggtcatcaccatgattgatgaggagcaatggctcattatggacggtgatgtgaaaggagctatctacgaaagcattcttgaaaagaacggacaagacaagaaaagcggggcaggacagtattttactcctcgtccacttattcaggcagtggtagattgtatcaatccgcaaatgggggaaacggtttgtgacccggcttgtggaacgggtggattcttgcttacagcttacgattatatgaaaggtcagtcagcaagtaaagaaaaacgtgatttcttgcgtgacaaagctttgcatggtgtggataatacgcctttagtggtgacgcttgcttccatgaatctttatttgcatggtattggtacagaccgtagtccgattgtttgtgaggattctttggaaaaagaaccgtcaactcttgtagatgtgattcttgccaatcctccttttggaactcgtccggctggatcggtggatattaaccgcccggatttttatgtagagaccaagaataaccagttaaatttcctccagcacatgatgcttatgctcaaaacgggaggacgtgcagcagttgtacttcctgataatgttctctttgaggctggagcaggtgagactattcgtaaacgcttattgcaggattttaatttgcatactatcttgcgtttacctacaggtattttctatgcccaaggcgtaaaagccaacgtgttgtttttcagcaaaggacaaccgaccaaggaaatatggttttacgactaccgtacagatataaagcatacgcttgccaccaataaactggaacggcatcatttggatgattttgtttcttgctataataatcgagtagagacatacgatgcagaaaatactccgcaaggtcgttggcgtaaataccctgtagatgaaattcttaccagagacaaaacaagtcttgacattacttggataaagcaaggtggtgaggtggacaaccgttcattggcagagctgatggctgatataaaggataaaagccaaacgataagtgctgctgtggttgaacttgaaaagctacttgcgaatattgaagaaaattgagttatgggaaaagagattttcacaaatgataaatatataaacgacctgttcttgaaggttgttaaccttgtcacgcaggcaagggaacgtgtggcaacagccgtcaatatagctgaggtttatactaagttccatatcggacaatatatagtagaatatgagcaaaagggggaaacaagagccgaatatggaaaggcggtgctgaaagaactctccaaacgtctgactgataggttgggagatggatggtcatattcaactcttaagaatatacggcagttttatattgttttttctaaagggctaaccagtggttgtccaaagccgagtcaaaaggctaaccagtggttagccgattatccgaagtcagaggaatgtatctctgagccgacattcgctctctcatggtctcattatcttatactgatgagggtggaaaatccggatgcccgcagtttctatgaaatagaatgtactcaacaacaatggtctaaaagacaactcagccgtcaagtaggaagctgtctttatgagagattggctttgagccgtaacaaagatgaagtaatgcggttggctaaggaaggacaatctattgggaaaccatcagacattatcaagaatcccatcacattagagtttcttggtctaaaacccgatgcagtttattcagagtctaaattagagaatgccattatcaacaagatgcagcaattcctattaggacttggcaaaggatttctatttgaagcaaggcagaaaaggttcacatttgatgagcagcatttctttgttgacttggtgttttacaatcgtttactacaatgctatgtgcttatagatttgaagatagacaaactaactcaccaagaccttgggcagatgcagatgtatgtcaactattacgaccgctatgtcaaacaagactttgaaaagccgacaattggtattctactgtgtaaggagaagaacgatgcactagtggaacttaccttgcctaaggatgctaacatctatgcttctgcttatcaactctatctccccaacaaggctttattgcaagctaaggtgaaggaatggattgaagagtttgaagaaaatgaggaattaaagaaactggaagaacatgaatagtaattgtgcagccaaaactgcacaattacaaacagaaatataacgatggatacaaaagcgttacgtcaaaagatactcgaccttgcgatacatggaaaacttgtaccccaagatcccaacgatgaaccagcatcagttctgctcgaacgaatcaaggctgaaaaagaacgactgataaaagaaggcaaaattaaacggagtaagaagtctgcaaagtcttccgatacgccccattatgagaatgtgccgtttgaagtgccgagttcgtgggtgtggacaaatattgaagaactgttttt

SEQ ID NO: 4014 - DNA, 455 bp, Unknown
  gut microbiota DNA sequence
caaggtggagaaccagtatggcaggctcgaccgttcatccgtggaagccaacttcgggaaccagtttttcggacggaccaaagacgtggagtcattgaaatattatcccatgatgttcggaaaggaggaaaaggaacggagatcccgcagcgcgggaaaaagcgggggaagcacgaacaggagcgtgaccgtatcgtcccagaaagaggacatctatcagggaaaggattttgcggatctggaacccggggagttcatcggttccgccacgcgtgccaacgtcagctacttcaaggtaaagctggagatgtatgacgacaggaacgaggagcccctgcccgatgttcgggtccttgagccgggagagctgggcaggaacttcgcaaggattcttgaggaggtacgggagctgttcccgtgtgagtgaacggaccggccctcatctttcccttccg

SEQ ID NO: 4015 - DNA, 4371 bp, Unknown
  gut microbiota DNA sequence
tgagtaaccttcattgttttgtcctgataccccaagtatttaaactcaagagtagccttagaagaggtaagtttcaacacaaagttaccgtcaatatccgttacagtacccagtgtcgtaccgctgaccgatacagtggcaccaatcaatggctcattgttctcggcatctactactttaccttttactgttccttgcgcaacagccgtagcagtgaaacagattgtcagaactgccaacaggaggaaatgctttagatgatttctcataattttgtctttgatttaaattaattagttagtatttcattcccaataggaaagacaaagataaaaatttaattcatataaattgaatttatattagattatttaaacgaaaagggtactttttaggcggaatatgacaattatgttaagaaaagaacaaaaagccgcctcaaaagaggggaaaactgtccggaaattccagagcaactgccacatattactgtagaaagaagggcaaatggaaaccgccggaactattttcagcataccttattcccaaagccgtatccactgatccggacaaatccggcccgcccctacgacaaaacgacaggtcactttcattcaggctctctcactttcaaaatgacagagcaaaaagaaaacgaaagaatgtgcatacaaaaagaggcgcaccttcatgggtacgcctttctatcctgttcctgtattgtctgatacaggctatttcatttagttaaagatataacggacactgaactgtatggaatacgtagaattgaaactgttcagattggaatacgtatcagtcagtttctttcctccgttcttctggaactggtaagcgccgcccttatagctcaacaaggaagtattgttcaccgtcttataaattccccagtcgctgttcagcaagttcaggaagttcttgatatccactccgaactgcaaggtattgcgcttgccccctacattgaggaagaaatcctgattgaacttcaaatccagctgatgatgccaaggcatgatggctcctccgcgttcggcatacttgcctttacggcctttcagataactgtcctcattaatgtaagcccagaaatcatcgcgctgctccttggcggaataagtcacctcacccgtcttgctgtcagtataatcggtaaagttccacttatccagcgcctcgcgggatgccggaatgtacagcaagttgtttgagccgtaatcgcctacaatatttccggtgaatgtataggaataacgggcggcggaatatcctccggcatagcccatgttcataccctcataaatcaaagacaaggaggaagcgaaattcttggcgtatttaatacggtaagcggcggaagccagcacacggttgggcgatacatacgtaccatagccggtctccgtgtcattatttccgttgacagagtaacggttgttgtaataagccgagttcacctggtcgccgatgccgtcgccatacgacttggcataagaacgggtgtaggaagcggaaagatgcaggccgaaatcaaatgtcttggccagtgaggcggtgagtgagtaataataagcgctgtttcccgcattggtgatataataagcatccgtcttgttcgcattggagtactcaaacattctgcggacatcacccggagctatctcctgctctcctttaaacttacgtcccaaattggtcactgtagccggattgaactctttgctgaaaataccttccaacgtaaagtcaatgtctccgggaagttttgcatcaaaagccaatgatgacttccaggtggcattcatcttcaagtcgcggtcaatgatggtggctccggaaggtgcggcaggatcggtagccgccggaaggttcaagttaggatctttcaacatatcagccacgctggtgtggaaactcggttgtccgtacttagcgtccttctgctcgttataataataggtgctttgtccgcaattggcattacctactgccgaaactagccatacgaacggcagacggccgatgaagtaaccgctaccgccgcgcaatacatacttacgctcgcctgtaaggtcccagttgaagccgatacggggggaggcggtcagctggtaggatgaaggcaactggtctgtggcgtaatgatatccgtcaaagtcaatctgtgcgaaattcttgttatagttgttcttcagctccggataaatgggcagttcgaaacgcaccccggcagtcagtctgaagttgtctgtgatattcatctggtcctgcagatagaaagaaagctgctggtacttcatgttcgccaggaactgggaaccgtccccggtgttggaataagtgacaccgaaagcagccggagctctgttgttcacaaaatcatcccaagaggaatagacataataaccgctacccgcctgcatgaatccgttcactgccttattggactcaaactggataccgcccataaagttatggataccgctggagaaattgaattcatcggtaatgacaaaggtcttcacctggcgcaagttcccttctgtaaaggggtccggaccgaatgaggcgtacagcgagccttggtcaaggatgtccaccgtagggaatgtccccccttcgtatgtacgcggttcgttctgataagaataagtgaaacgcagggcgttattgatagccccccattttgaattccattcggaagcgatggaggtgaagttctgttcctgcatatagcgtgagctttcaaagtacagaccggtgtttgctgtacggcccgaactgctcttgcccgcactgccgtctactccacccggatagatgattgaatccttaaacggagtggtggaagaggaagggttagaggaatacttggaatgggtatgggtgaaacggaaattaatcttgttgttgttgttgatgttccagtccagacggcccatgatcttgtaagaaggggtttccaaagagtatccttgataacgtcccggattatagttgtatttttccgacaggtattggctgatgttgttcatccccacaaaggtacggccgcctaccgttgtggtgttctcgaacggacggtgcacgatgccgttggtgctccattcgtcattggcgccgctacgcgctatgcccgacggacctgcctgcacattatcctgatattcgccgttcacgaagaagaataacttgtttttaatgatcgcacctcccaaagaagctccgtaggtggtactgtggtcacggttgcgggtcagctcatagtcctctaccttattaccggtaaggtgggtattggaagtatacatataggctgtacctttgaactcattcgtaccactctttgtcacggcgttgatggcacctcctgtaaacccgctctgacggacatcaaagggagtggtggaaacggaaatctgttccaatgcatccagagagataggcgaaccgcctgccggcaagttcgagccgataccgaaggcattattgaaagcggctccgtccacagtgacataagactggcggtagttacctccacccactgagaaaccgctaccgatattggctccctgaggggtcaggcgcatgatatcgttcatgctgcggctcaccgtaggcacttccgacattctggccgcatcgacattggtcaccgctccggcgcggtcagacttcatattgctgctcttggaagcggttatcactacttcatccagcagttcggtagactccttcaagttcgcatccaatacgtaattctctcccaactggagattgatgctcttgtaaaccactgattgataacctacataagaaacttctactttgtaagggccgccggcacgcatgccctggatggaataacggccgtccacattggtaatggccccataatgggtgccggacggctcatgaatagcctgaatcgtcgcgccgataatggcttcattgctttgatcgaccacctttccactcattgacgaggtagtgacctgagcgttaacagtagcagcgattaccaacataaccaccgcaaaaaaagatcgcattctttttaccataaactttttattaattaatattataattaatgtcttaaaagacgttgcaaagatagctaatagaaacgatatacaaactacaaatcggttacaatttacagtggcaggtctatagaaagagaatttatagttttatggtgaaccacattcatcctgccggatgaccccgggacacgggccgacgggaattccatgcggtgcgcgcataataagataggtgtataataaaaaggctcttaacctcaaaaacgtctttatactgaggaagttgccatacatttctgac

SEQ ID NO: 4016 - DNA, 24997 bp, Unknown
  gut microbiota DNA sequence
aattttaaaacttaccaaccagaaatttccgctgagccgaaattagttagttaaaacaagcacttgttttttaaagacaagacgtttcaaaggttactaacatacagaccgacaggttagtaacgtgttgggtaacatgttactaatgtatcaggtgaaagattagtaatgttatgcgtgaaagatatagaatcttacaggtataacatatatatcaaagaatgaacaggcaggcataaaaaaagactggtgttttttatatgagaagcaccagtcttatctaattaaaaagattcctttatcagcattttattttcaattcattcaaaatagcacgcatcttttcaaatgttgtgatacgagtcggtacaagcggcaaacgcaatttgttttcaatcagccccattacattcaacatagccttcaccccagcagggttaccatctacgaacaacaggctgaataattccgtaaacttatgatgaatagtcaatgcatttgcaaaatcaccctgtaatgccaaacgggtcatacggctgaattcacgcggaaatgcattaccgataaccgaaataacccctacagcacccaaagtaatcaaaggaaatgtaataccatcatcacccgaaatcacatcaaaattagccggtttattcttgatgatatcatccatctgagtaatattacccgatgcctccttgatagcgataatattcttgaaatcacgtgccaaacgcaaggtggtctcagcagtcatgttcacaccagtacgtcccggcacattataaagaaccacaggaagatccgttgcttcagcaatcgctttatagtgttggtaaataccttcctgagaaggtttgttataataaggtacagcaacaagcacggcatcaactcctgtcatatcatcatttttcagcgtttccacaacagcacgggtacagttactgctaacccccagcagaataggaatacgtccattcactctttcgattatcaaacgttttatcttgtctttttcttctttagtcaaagttggggtttcagccgtggttcccaacacgcataaaaagtctgttccattttgaagctggtaatcaaccagacgaagtaacgcatcataatcaacgctgtcatcttccttgaaaggagtaatcaacgctactcccatgccttttaatcttgtctgtatcataaatgaattataaattcttatttaatagcctacaaaagtacgaatattttctattttagcgataaaaatcacactatttttactttatactcgctaaaaagtcactctatcatttgcagaaactcctcttcgctcacaatggtcacacccagtttctgcgctttctccagtttactgggccccatattgtcacctgccagaataaagctggtcttggacgaaatacttcccacattcttaccgccatgcttttcaattaactccttatattcgtcacgcgaatgatgggcgaaaaccccactgatcacgatagatttccctgccagtttgtcagtgtgttccgaagtatcctcctcatcggcttccagtctcacacccgccacacgaagacgctctataatgtcacgattcttcggattagcaaaatacaacaagatactctgcgctattttttctccgatttcatcgacatgaatcaaattatccaaactcgcgtctgccaaagcatccatcgacttaaaggattttgccaccttcttcgccacagtttcacccacaaaacggatgcccaatgcaaagagtaccctttcgaacggcacttctttggactgctctataccttttattatattctcggcagatttttctcccatacgttctaggttgatgatatccgatgtttttaaagtatacagatcggcaacatcacgtatcaatccttcctggtaaaactgatctaccgtttccggaccgagaccatcaatattcatagctctacggctgataaaatgttctatttttcccttgatctgtggggggcaagcggcatcattggtacaataataagcagcttcaccttcatagcgtaccaatttactgccacactcgggacaatgagtaataaactttactttgtcacctatcataatacgggcgtctttgtccacacctacaatctttggaataatctcaccgcctttttctacatataccatatcaccaatatgcaaatccaacccttctatgatgtcggcattatggagcgaagcacgctttaccacggttccggacaactgtataggatccagattggccaccggagtcacagcacctgttctccccacttgataggtcaccttgttcaagcgggtaagtgcctgttcggcttgaaacttgtatgcaatggcccatcggggtgattttgccgtaaaacccaaattacgctgctgtcgcaaagaattcactttcaatactattccatccgtagctacaggcagattcttacgctccacatcccagtatttgataaaatcaaaaacttcctgcaatgttttgcatttgcgagtgagatcggaaattttaaatccccatttctcagcttctttcagattttcataatgaccgtcgcacggcaaattatctccaagtaaataataaaggtaggcatccagcttgcgagatgccacaatagcagaattctgcaacttcaatgttcccgaagccgcgttgcggggattggcgaacaacggttcttcgcgggcttcccgttctttgttcaattcctcaaacaccacccaaggcatcaaaatctccccacgaatttcaaatgtttcaggatacccctttccatgcagcaccaaagggatactgcggatggtctttacattgcctgtcacatcatctccctgcacaccatcgccacgcgtcacggcgcgcaccagttttccgttctcataagtcagagagatggaagttccatcatacttcatttcacaacaaatttcaaaatcctcgttcagagacttctttaccctgtcataaaactcggttacttccgtttccgaataggtgttagccaatgaaagcataggatatttatgtaccacctgcgtgaaatttttgtttatatcacttcccacacgcatactgggcgagttctcatctctatgttccggatgtttttcttccagatcctgaagttcacgcatcagcttgtcaaactcctggtctgtaatctcaggcgcattcaatacataataattatagttatgtcgatgaagctcctcgcgcaattggtctattctttctatttctgtcatatataaaaggtagttttcccgcaaaaatagctattttttgaatgaaaaacaccttccgacaaagaggaatttgctacttttgcaaaaaataaccgaatatgagaatagacatcattaccgttttacccgagatgctggaaggcttctttaactgctctatcatgagccgtgcgcagaaaaaaggaattgcagaaatacatatacataacctgcgtgattatgcatacgaccgttatcgcaaagtagacgattatcccttcggtggatttgccggtatggtgatgaagattgaaccgatagaccgatgcatctcagctttgaaagcagaacgcgagtatgacgaaataatatttacatctccagatggagagcagtttaaccagccgatggccaactcactttcactcgcaaagaatttaattattctatgtggccattttaagggtatagactatagaatacgtgaacatttcattacgaaagaaatcagtatcggtgattatgttttgacaggtggagagttggctgccgccgttattgccgatgccgtagttcgtattattcccggggtcatttctgacgaacaatcggcattgtccgattcttttcaagacaatctgttagctgctcctgtatacactcgtcctgcagaatacaaaggatggcaagttcccgatgtgttgttatccggacacgaggcaaagattaaagaatgggaacttcagcagtcattagaaaggacacagcggctaagacccgatttgttgaaataaaaaatatatataaataataaagaggtaaaagccatgttcgtcatagggcttttacctcttttcttttgcttatatcatatccgaaaagatgttctctccttaagtgtaatctaagttcatcttcctttcccttatatattaataaagctttttcaagtgtttttctactccgttttttcaaaaacaagccatttcatcgaaaaaaaataattgaagttatcattttatacccatgtaacaagttgcaacagcaaccattttcatactcattccatctagagaaggttataaaaaaagccctgcaagagatgcttcaatttattcatctacactctcgcagggctataatttaaaagataaaattttcagacttccaaagcacctattatatcttttacagatgtatatccatgacgttccaaatagtcatttattccttctgaaactttgacagtaatagctggatctatgaagttggcagtacctatctgtattgcggtggcacctgctagcataaactccacagcatccttccatcccatgataccccctagtccaatgacaggaatatttactgctttagcgacttgccataccatacgcaatgcaattggttttaccgctgcaccactcatgccgccggtaatagtggaaagtacaggcctacgcttttcagcatcgacagccatccccagcagggtattgatcagagatacactgtccgcaccggaagcctcggccgcacgtgctatttctgtgatgtctgtcacattgggagataattttacgatcagcgtctttttatatacattacgtacagcttttacaacctcggaacatccgcatgcggagaccccgaaggccataccaccctgctttacattagggcatgaaatattcaattctatagcgggaatatgatccagatcattgatgatctcggcagtcttcacataatcctctacagcagatccggatacattaacgatcatattagtatgaatatcccttatctgcggatagatatgttcaacaaaataatccacccctttattctgtaaccctaccgcattaagcatccccataggggtttctgccatgcgtgggtaaggattaccctcacgatgatgaagggtagtcccttttacaatgataccaccaatcttttcgaggtctacaaaatcctcaaactcttttccgtatccaaaggtacccgatgctgtcataaccgggttacaaagctttaaatcgccgatatttacgcttaaatctgccataatagtttctttatattaaatacaggaccctctttacaaacacacaaatgcccttcgtccgtgttctccacacagcataagcatgcaccgacaccacaagccatcctattttccagtgaaacctcacattctattccatgagctttggcgtatttagctaccgaaaccatcatgggttttggaccacaggtgtatatcatatcaaaccggtctgtatgcaagacgctatgctgtgtcacataacctttctcgcccatacttccatcttcagtcgttgtatacacctcacctaatttctcaaaattttccaactgtaacaggtctttggatgaacgtgcgcctagcaggaaagcaggcgtacatcccatttttaccaactctgcaccaagcatcaacatcggggcggtacccacaccaccgccaaccagtaacggctttacctttgtcacgttccgaggcattgtaaatccattgccgagaggcatcaccacattaacaatatctccttgtttcacagtggctagtttgcgagtgccatcgccaactaattgcaccaggaaccaaacttcattggttgttttatccacataattaatagaaataggacggcggagaaaagtagtattggaaccgtctatacgtatctcagcaaactggcccggcagcatctcgggcaatgggttggcatgagtcaattttatcagaacataattggcatgcaatttgatgttctgtgtaaccacaaggtctaaaatatattttttcatgaaataaaattgggtaaattcgttttctatgcaaagatacacgaatttacccaaatcttattctgccaaccggcattttagtggattcccaccctaattttcaggtttgaacgtttcataagtcccattatcaaagaatattcttatttcagtgatttttttggcaggtacttccacatacttaatttcctcacgcacaatctctttaggagaataaagcggtgttttaacctcattttccttgcgatattccggagaagccggacgttcgggcgtaaataatgaattctcgtcaaacaaagaaggcgtataatgaatgttattgtctgaatcaacatccgtttccatttgtccttcaccatagagtaaccagtctaagctgatatagtcacacgccttgtgtattttcatgacgacttctaggctaggattgttcctgccactaagaatatgggaaagagaggaaggtgaaattccaatcttctctgcaaattgagctgcagtcatatcttctttctggattatttgagcgattctttccttcatttacaaaagtataaggcaaaatttacagatacaaaagtaattaatataattcataaatgcaaatttacaatataaaaatgtatatattacaaaagtaaatagacggtgtatcgttggaaataaattaagatttacacacgtaaaccactcctaaaaacaccataattaccactttaactataagtatataaaatactgattatctataatatactcacagaaaaaacaatatatttacaaacaaacatgactatataagcaaataaaatgcatacaagttatcaatagctttatcaataagatgtaaaactttggtttataatatattattgtaataaaataagggataaataattattcatacacatttatatatgtaatattcactcttgaccaccatcctgtttatatttgtaacattcacattactaaatctgtaaaacttataaaaccttctatattaagagggtttacaggtgtaatgttacaaaattaaattataattatttccaacagtaaatttcatctgttttatgatccaacttgatcctatgaatattttgttttcctattttacaagtcaatgtatttttcatggtaaaacccatccaagttttaacccatcttcgctttatggaattcatggatagtgagaatcatggaaggcacgataagagaacaaagtatagattcaaaattttaaaatagcgtatggaacttacaaaaataaatggtagctatttgctcacttcatctgcattctttcacatccccattcttctattcattttactccgaaaaggcaaaatactaccatattcatgtactaacggacattctctttaaaatacacgattctaagaaggcgaaaaatgctctatcaatctaggaataagcgagttaatactatttttctcatcatccatctctcatcatctagaaaaatagagaacaaaagcataacttatagcattaaatgagataataacagaagcatgaatgtaaaatattattctcaattgagccatcaacagaatttctgctgagagaaaggataaaaagaatcccgacacttaaaaaataaaagcatcgggacatcggaatcttacttgaccctgttaattaatgaagaattttatatacaagttcgcgcagcaaatctccatctcccaaagatggattacccactccttttgattttgcatcacagtaacgaatctcaccaataatttgcattacctttactccgctatatttcctcatagcaaccatatagtctttagactgccatgatgatttaagccccagctgattggctataccctgctctgacttatcaggagcataatatgcaagcattaaattagagaagaaattaaataacacagacaaggtcatctgcaaaggatttgttttgggattctcctcaaaatattttattatctgattagccttgaaaacatcctttgccaccaaagcattcctaagctcaaaattattataatccttgcttatgccaatgttacgttctatctgttctggagtaatccgcttttgtcctcttggaagtgtgataattaatttttccaactctccagccatacggcttaaatctgctccaacaaattccgccatcatttctgaagccttaggttctatttctactgatctacgtttcaagtaagaagatataaacccaggaagctgggcatccttaatctttttcgattcgaaaaggacacctactttctctatttcagctgccaatttttttcttctatccaatgtaccatgtttatggcataacaccagaattgtagaatccaaaggtttttggagataataaacaagctcttcaatattctttatattttgagcctcttttactattacaacttgatatttggacatcatgggataacgcttggctgcattgataacagtcgcgatatctgtatcagccccataaacaatagtctgattgaattctttttcattttcatttaacaccgtttgtgctatatactcagatatccggtctatataataagactcttcacccattagataataaacaggcttatagatacggtttttcagctcacgggctatctcttcgtatgttgtttcttttgccatacacagtaaaattaccagtcaaattttaagtgcttgaccgttttcttttcctcaataatcatctgtaatgaagcaataccaatctccacatgctcctctacatattgctgcgttacaatactgtcgcttttctccgtcttcaccccttcaggaatcatcggctggtcggataccaaaagtaatgctccagtaggaatatgattgtaaaaaccagtagtaaacagcgtagccgtttccatatccacacacatggcacgcgttttaaggagatactttttaaactcttcatcatgctcccatatacggcggttggtagtatataccgttccagtccaataatcgcgggcatggtcgcgaatagccgacgaaacggcacgctgcaacatgaatgcaggtaacgcaggtacctcaggcggataataatcattggatgttccttctccacgaatggctgcaatgggtagaatcagatctcccaacttatttttcctatctatgcccccacatttgcctaaaaacaaacatgctttaggctggatggcccctagcaaatccataatgatggcagcattaggacttcccatgccaaaattaataatagtgattccttccgcatgtgccgaagtcatattggcatcacgtcctaataccggcacattgaatttgtcggcaaaaagttccacatatttattgaaattggtcagaaggatgtattctccgaaatcattcaagcttctttttgtgtagcggggaagccagtttgctacaatttcctcttttgttttcataatcttttgtatttttgtatcggttattaccgagttacacttatgcaaatttactaaatgttatcattaaacttaccatcctacgaaattaaaatcgcggagcgaaatggaaaaaatgttattttcgatatgcttcgcaagagatatgtcgcccttactccggaagaatgggtaagacaacattttgttcattatctgacggattataaaggatatccgaagggattactggccaacgaaatacaactggacttaaacggaacaaaaaaacgttgtgatactgtgctctacaacaaagatctaagtgccaaactgattgtggaatacaaagctccacatatagaaatcacgcaaacagtatttgatcagataaccaggtataacatggtcctgaaagttgattatctgattgtcagcaacggattgaaccattactgctgccatattgattacaatacaaaaacatacctttttctaccggagattccccattattcagaactgtagatataaaaacattctaagcaacatcttcttacaagatcttgcttagaatgtgataaaattctttttccacaaagaaaaagatactgcttcaggagatatattatctcttgacagtttccaaatgctgttcagcaatcacacccgccaattcagggtcaatcatgatgcgaccacaatattcacatacgataattttcttacgcatacggatatcaagctgtttctggggcggaatcttgttaaaacaaccaccacatgcatcacgctgaacatatacaattcccaatccatttcgagaattcttacggatacgtttaaatgcctgcaacagacgcggttcgattgttgtctccaatacttttgctttctctctcagcttttcttcttcctgcttggtttcagaaacaatttcttccaattcggatttcttcgcttccaagtccttctttctttcatccaagtcttgattactgtgctctatctcctcgctctttgctttttctgctgcaatatattcctttatgcgtttctcgcaaagttcgatttccaatgactggaattcaatctcctttgtcaacacatcatattcacgattattacgcacattatcctgctgagctttatatttttcaacagaagtcttagctgtctcgatttcaattttcttagttgcaatgtttgatttcaattcctcgatatcagctttaattttctcgatacgagtgctcaaaccggcaacctcatcttcaaggtcttgaacttcaagaggaagttcccctctcagagtcttaattttatcgatttcagacaacatggtttgcaactggtacaaagccttcagcttttcttccactgttaattcgctcgggtctttctttgcttctctagccatagtttttcttacaaatatttaataggatttgtatttacccgggttatctggacttccagctccggaaacatctcctgtatgattgaataaaatatttcttttgtatactgttcactctcataatgccccatttcagctaccaggatatcattctcataattgaaataatcatgatatttcacttcacctgtgataaatacatcagcatcggcacttaccgctttaggcaataaaaatgctccagctccgccacacaacgctactttctgtatcagacgaccggataaacgagtatgtcgcagacagcccacttcgaacgttttcttgatgcgtttcaagaaatccagttcggcttcaggctcttccaattctccgaccactcccgaacctacttgtgtccaggtatttttcaacggataaaaatcaaaagccggttcttcataaggatgtgttgccaataatgcttttatcaccgcagcctttttaaaagccggaagaatcgtttctatacgcacctcggattccttatgcaattcgcctatttctccacagaacggactggttcctctctgcgcacggaaagtcccctcaccttccaaattatagctgcatgaatcataattacctatgcaaccacaaccggcttcaaataaagcttttcttactctgtcagcctgtgcatccggcacaaaagttacaaacttcaataaatattcttctttcgggtctaatatgcgtacattcttgaggcctatcttttcagctattttataattgacacctccgggagcattatccagattggtatgtgccgaataaatgacaatatcatttttaatggctttcaacacacaccgttcaatgtaatcccgaccaataatagatttataacctttaaatataagtggatgatgcgatataatcaggttgtatcccaacatgacagcttcatccacaacagcttcagtaacgtccagacacaacaaagcccctgttgcttccgcttctgtcagtccaacttgcaatccggcattatcaaatccgtcttgcaaaggcagaggcgcgaacctttcaagggcacttactatttccttaattttcattcgttcgcgaaaatttgattgcaaagataatcaatccatttgaatttaaaaagcaaccaagctattttttatactttccccactttatcattttatttttcaaagcataacgctcgtcaacaacacggtctgtcgggaaaaaagtaagatgaatacgccatccgcccgaatgaaacgtaaatttgcgggctgatattcctgtttctatcagagctagtttatcaatgataaatgctttaatatctacgggaaattcctctccttcatacattatatccgcagtgacaaagaaaccgggagttgataattctgctatatatttccaaatttgctcattcatgtttttctattttattgaaagaaatatataaaatgtatacaaagcaagaataaggcccctacttccgtttggtatccttatgaacccgtaacaaccggccataactgtcgaatgatttccgtgaggccagaaaaatggtcatcattagtgaaagcatggatgccaccacagtgataactacaatcataatctgatatttgatagccacatgtggcgaacttcctcccaatatctgcccaatcatagttcccggcaatgcaacaagccctgttactgccatattggcaatgcccgggctgaacgctttaataagagcctgacgcacaaatggagctatcgcctcattacgggtagcgccattccccaacagaaaataataaagttgctgttccctacgcaatccggcatagtaagtatttaatcctatcacattcactcccaacatattccccatgattataccaaaaaccggaataaaatactgggcactgaagatgttatccaactttaatacaaaaccaagaaaataaagtccgacgagcaccactgttacaaaaaaagcgatagagattggaatcatcaaaattccacgttttaaccgcgtacgcgtcaaagccgtttcagcagccaccccaaccatgatgatcacccatagaaaattgataaacggattgttccattcaaacagaaaacgaagataagccccaatcaaaaacaactgtataatcatacgtaccgtgcctatcagaaccggtttaagcaagcccgtcttgaaatgccataaaaaataaaccggaataagcatcagcagcaatcctattcccaaactgccatagtctatatcaattgttcccatcagtcagattataaagtaaataccttgtcgcatccggcggcaaactgtttgtcatgcgaaacagacaagatagtcattcctttactgcacaaggatttaaagaagttaatcacccgtaagcacgattccggatcaagtgccgaagtcggttcgtccactaccagtaaaggtttgtcaagcaaggctgtcactgccaacatgatacgctgacgctgaccacccgacacttcatttacccgtttatcataaagtttctcttccaatcctaatgatacgaaataatccatcagccgctctttgttgaatcccgcctcacggtttgccttcagttcaaaaggcatccgcaccatttcactgacccattccgaaggaagagccaactcctggggaatccatgctattttctttcggatatgatccgccgttctaggtgccagcagtgtgccgtccacctttattgtcccttcacttaaaggtacaaagcccaaaacagctttcagcaatgaagattttccactgccggaaccaccacaaatacatacgctttctccgtaatgaacttgcaggtcgagtcctctgaaaagagtcaggttgccaaaactgatagatatattttctatattaatcatcacataaaaacaaaaagagtcgggagcattcactgctgccgactccacataatgtattaaaataaaataaatgtgtcgaagtttaatatgctctcgcaaagagaacacggcgagcagatggttttccggttaccatacacttgcccggagtcaggctctcttcatcagcatcaaaaggaagacaacgaattgttgccttggtttcctctttaatccggtcttccgtttccggggttccatcccaatgagccagaataaagccgcctttctctatttgttccttgaaatcatcgtatgaatccactttcacgatatgttcgttacgatagttcaatgccttctgataaatattgttctggatatcctccaacaattgttgtacatattcttcgattccgtcgcaagaacgagtttctttctccaatgtatcacgacgcatcacttccattgtattgttttcaagatcacggccacccattaccaagcgaacaggcacacctttcagttcgtaatctgcaaacttgaatcccggacgcttattgtctgcattatcatatttcacagagatacccattgctttcaacttattgacaatgccttctacttttgcatcaatcttcttcagcatttcatcattcttataaataggaacgataactacctgaataggagccaaatgcggtggcaacaccaatccgttatcatcagagtgagtcattatcaaagcacccatcaggcgggtagatactccccaggaagtagcccaaacataatccagtttattgtttttgtcaacaaactgtacattgaacgcttttgcgaaattctgtcccaagaagtgagaagtaccacattgcaatgcctttccatcctgcatcaagccttcgatggtgtaagtatccaatgcaccggcgaaacgttcattagccgattttacccctttgattaccggaacagccatatacttctcagcgaagtcaccatacacatgcaacattttctgtgcttccgcttctgcttcctcgcgggtcgcatgagccgtatgtccttcctgccacaagaactccgcagtacgcaggaacaaacgggtacgcatctcccaccgcataacatttgcccattggttacacaagataggcaagtcacgataggaattaatccagttcttatatgtactccaaatgattgtctcagatgtagggcggataatcaattcttcttccagtttggcagccggatctacgataacacccgaaccgtcctctgcattcttcagacggtagtgagtaactacagcacactctttggcaaatccttctacgtgctcagcttcacggctaaggtaagatttcgggataagcaacgggaaataagcgttcacgtggccggtttccttaaacatatcgtccaactgacgctgcattttctcccaaatggcgtatccgtaaggcttgataaccatacatccacgcacaggtgattgttcagccaaatcggccttcaccaccaaatcattataccactgagaataattctcgcttcttttggtaagttctttcaattctactgccattgctatatcgttatttttgtttttcctttttaagagtttgcaaaattagtaaaaaagcatgggaaagtaccaatgatttagcaaaaatataggatcaaaaagtataaaaataacttattgataacgataataccaccaataggtatcaccatattcccgccgcatatggtttttctcttccaccggtgatgaaaattccttctgacggttaagaaactcatccaaacgccgcaccatcagcgtgtctttgacttctcttccatatccaggatgagtccgtttgtaaagcaccaatgcctcacgataataacgcggcaatgtatcttgctcgaaacaatacatatcaaccgccgatacaaatttgtccaatttcttatccagcagcaatgcactcatataataattcaaagcggtatgtctacctatttcatcacgacagatacgagccaaaaagtctactgtcttttctgcaacatgtggtcttgcaccaagataagcatacaagctatcggcattcaagcgcaaagtttcctgagaatgaggcgcaaataaaagcccttccgcaccataatattgagggtattcaaacaaatgctcccccatggtaccttccaaagacatagcataggctctaagcactgccaatgtatgggttgtttccaaagactttgctcctaccatccgtgcagcttcataatgatgattacggatagcctgctccacagccagttcatgatgaaaattcacattcgtatttcctatacctaccgtcatcaggcataaaagtgtcaaaatagctaagttagagtttattaagcccaatatggacccctcttgattcagccaggaacgaaacacacgccgtaaagtatagaccacacctatatatataagcaaaagcaacggcagcagccaaaaccatttatctcctatgtttcctccgtggaaaatagtccggtccacatccgtcagcactcccagcaacagacaagacgggaaataagaaagtgtccgtacaggcccctttaatcccatcaatccattgattccccaacggaataccaataaaaccactgtaatgataatagctcccaccaacggagaataatgtgtctttccttgtgacaatgaataatgcaatgcacctactacatctttctgaagcacaaaaagatagacaatactaaaaatagagaaaagaagaccgcacgcaaccgtgaggatgcgggcggctcttttataggataagctgttgttgctgctcataaattactctttcacttttttcaataccacagccgaacgggcaggcagatacagtttcagccattcctttttatccttcttataaagagggtcgaaattagtgaaatgacgtatactgtcatcagccagaccattgcctccgaaagctgtcgcatccgtattcagtaccacatcatacgccccgacaggcactaggaaaccatagtctgtaaatgacttggtaggattgaaattaaatacaaaaatcaaattcttacgccggtaagccaacacttggtcaccgtcgttatgccatacttcaatcactggagtttcctgaatatttttcacactctcaatgaggtggaccatagctgaatcaaaatcgcccaagtaatggtaacacaggttcttattatcaaaaagcccccactgacgacgggcatatttatgcgaccatccgttaccttcacgcgggaaatcaatccattcgggatgcccgaattcattacccataaagttcaaatatcctccattgatggtagaggcagtaagcaaacgaatcatcttatgcaatgcgatgccgcgatgcactgtataattttcatcccctttctggaaatgccaatacatgtcagcatctatcagacggaaaattatagtcttatcgcccaccaatgcctggtcatggctttcggcatacgaaatagtcttctcgtccttgcgtctgttggtcacttcccagaacatgctgctcggtttccagtcttcatcaatcttctccttgattgttttaatccaataatccggaatattcatggccatacggtaatcaaacccatatccaccatcttgaatcggtgctgccaacccgggcatacccgaaacttcttccgcaatggtaatcgctttggaatttacctgatgaatcaacttgttggccaatgtcaaataacaaatcgcattatcatcctgattcccgttaaagtaatccccataattacagaacgcctctcccaagccgtggctataatacaacatcgatgtcacaccgtcaaaacgaaaaccgtcaaaacggaactcatccatccaatacttacaattggacagcaagaaatgaatcacctcattcttaccataatcaaagcataaggaatcccatgccggatgttcacgccgcccgcccggatagaagtattgattaggatcaccggcaaaattgccaagtccctccacttcattcttcacggcatgagagtgaacaatatccataatgacggcaattcccattctatgtgccgtatcaatcaattccttcaattcatccggtgtaccgaaacgggatgacggagcaaagaaactggaaacatgatacccgaaactcccataataaggatgctcctgaatagccataatctgaatacagttatatccggcttccgctatacgcggcaatattttctcacggaactcattataagtccctaccctttcttcttcctgagccataccgatatgacattcataaatcatcaaaggatcagtctttgcacggaacaccttctttctgaaccggtaaggattctccggttcccagacctgtgcactgaatatctttgtctgctcatcctgtaccacacggttggcccatgccggtatgcgttctccttcaccgccattccaacggactttcagtttatacaaatcaccatgctttatagcaccgctttgtaattccacctcccatacaccaggagagttctttacatggtacatcctataatcgccatgttctttccagtcgttgaaatctccgataagataaatttccttcgcattcggagcccattcacggaacacccaccctcttctggtacgatgcaagccgaaatataaatatccggtggcaaagtccgataaagttcctttgcctccggtcagttccaattctttgtctagtgcatgctgatggcgtccttcaatcgctgccgaatacggttccagccaaggatcactttctattatgcctaatttaggagtggtattttccataatatgattacttgttagttattctctttcaaaccaaaactttaacgatcacttttttcacaccgtcaggagacactcccggagcgtgagcatcctgtggaaaaaagatggcaaacattcccggctttacaggaatatagctttcggcaagtcccggatagaacgagatatccttatctgcatcatagtctgcttcgggaagatcttcacgggccgtataacccatcacttccacccctgacagaggaatctgtatatcaataaactgattatgagtttctaattttgcttcttctttagttttaggcttggtctgagaaaagtttactaccagatcatcaccctgtaattttacttttcctaattcctgagcgttcaagtctgtagtcttcagatattccattgctttagcgaacaaaggattcaatgaagcgtacttttctaagttttctaatctgtctactaccataattatttcattttaatggttaaaatattgcttttatcattcaaagtcgtctattgtgaaatttgtaaaatcagcaaaacgcttcagttgcttgaaaacatcctctactttgtccaacaggtcaggggcaaggaaaaacgcatcaggcaccatataagcacaggtataatccttacattttaaataatcaatatattcaaaatctttcggaaatcctttgggagccgtttttaagtgattttctccgataacaggaaagtattgcttgaacgcaggatcttccacaatttccctgtattcgtctatgttgtcataaacggactggcggacagctttcagcactttaggttccagacaccagcttccaccagcaagcatacagttatcaggctctatatgaacataatatccacaatgttccgatttctttccacgagcgttgatatagccgcccaagtgtatcttataaggagtcttatcactggaaaaacgcgtgtcgcgataaattcggtatgtacagtccttggcttgaataccgacaatactttcgtcaaacaacgaaatgcgggcgatgattgctgtcagtaattcctcaaactctttttgagctttcagatattcatccttatgcccctgaaaccactcccggttattgtttgcggccaggtcttttaaaaattgaaagataacagatacatccatgttacattatgttcatgtgttcacttgacaaacttacaaaatatatttgtaacgaactagaaaaaagcgaagtatttatttttttcccaagaccttgagaaactcatcatgcaactttccattagtagccaacacttcacgaccggaataaaagtctccccctccgctgtaatctgtcacttttccaccggcattcatcaagattatcgaaccggcagcaatatcccacggtcccagcagcccttctatacgggcttcaaagcgaccggcagctacatagcaaagttctgccgcagcagctccttgcaggcgcatgcctcccacatttccatataactcgtgcacgatatgctccgccaaaggcttatacttttgcgaatcgtatggaaaacctaacgccacaaacgcttcgtccatatcagaaacatctgatacatgtatttctttgttgttcagataagaaggcgctcctttataagtccagtaaagttcatcgcggcatacctcatacaccaccccaaccagcagttcttctttattgcgaagggcgatactcacacaataaggagcattattatggataaaattggtggttccgtccagcgggtctaccagccagcaatagttttccgtagtcaggctgcccgaaccttcttcggcaatgaatcctgcttcgggaagcaattcccgaagttgggccacaatacggcgttccgattccttatctacatacgacacatagtcgtgagcatttttcttctctaccttgctacggtcaaaaccgctacgctcattacgaagaaaagcacccgcccggagtgctatttcacgtacattcaacgttatcttctctaaatccaacattatattcttatttttgttccgcatccagcgctccaaacttataaacacctttacggattacatttccattcttatcagtctccacaaaagcgccgtgtttcttcccttgtttgaaaaatccgtcatagcgtactccgttcttatcttcaagcacacctttgccgtcttcctttccttttacgaaatgccccttgtatttggttccgtcagccgtgcgcagagtgccttcaccgtcggccatgttgtttttccattcaccttcatagtcatcgccgttcgcccaaatatagtgtcctttaccgctgcgctggttattcacccactgcccttcatacacagcaccgttggcccatgtaaaggttccggtcccatgctgctcgccgttcttgaactgccctacatacttgtcgccattcttatgtatataaataccctgcccggtacgttcaccgttcacgtagtcaccttcgtaacggtcaccgctatgaaagtaataaatgcctttaccgtgctgcacgtcatccttccagtcacccacatacttgtcaccgttgacatagtaaaacgtcccctttccgtcacgtgcgtcatctttccactcgccttcatattttgactggtcgggccataccataacaccctgtccgtttttcttgtcttctttccattcgccctcatatttggctcctgctttccaggtataagtaccctttccgctacgtttgtcctgaaaccagttacctatataaacatctccgttataataatacatagtgccttcaccctgctgataatcggtaaaccacataccctcataccggttgttattcataaaataataggttccgctgccgtgttgctggtcctggaaccattgccccacatacttttctccatcgtgaaacgtatatgtcccgttcccctcgcgtttaccttttatatattccccttcgtaggtatttccgttcttgtagattgtttttcctttaccgtttggttttctgcctttcagttctccggtatattcgcccccgtctttaaaagtataattcccgatttttatctgggcggtggccaatgtactgaccgatgccaaaagcaataatatatatacgtatttcttcattggttcgttacttataatagataagatttatgccaaagatacgattttctatctttggacatgataggttattacacttttttacccgcaatgacctctattaagttttctttgcagaaatacttttgagccaatatgcgtatttcttctctggtgattccccggatggcatccagcgaacggataaagaagcgttcgtccagccctgccgtttctatataaatccaggcatcagacaaagaaaaaggtccctcgtacgaccggcataaatcgcccagcatatagttcttcaccatttccaattcttcttgaggaacgagatcattacacaatttgtccatctcccgataaacttctgttatgatagaatccacatattcattggccgcctcggtactgacagtcagtattcccgttcccggataggacacaatgcctgcgccgataccgtatgtatatcccttgtcttcacggatattggacatcagacggctcccgaaataccctccgaacaaagtgaccatgacacgtgccttcaaaaagtccggatgatgacggtccattacgaaacatcccattttcaaggaactttgaagtgcatcctcacgttctataaagatacgcttttctttggtggtaaccggaggaacaagcgttgtctttgctttttccgtcacttccccccattgtccacttcccaagttatcttctatacaacggataatttccgatgtgacctttcccgaaatatataccgaacaattgcccgaatgataatatttccgataaaacgaacggagcacctccggggtaatccggtcataatcctccgctaccgcatagcgcccgaaaggatgctccggaccgaacaaggctgtattcagctgctttcgggcaatcatttccacccgggtgctgttcaccaggaattgctgtttgttcgtatcggccaccacggaaagttcctttgccggaaacgtaggagcctttatcatctcggatatgacggtcagcgtgcgggcaaaatatttattcagagagtaaagtgttatgaatccatagttcacggaagaagataactccagccaggctccataataatccaatcgctccgcaatctgtgaagacgttaaattcccagctccctcacgcagcatcctgttggcaaacatagcctgcaacggctgttcctgattccattgtccgcctcctatcagaagatcgaaacgtacaacatcctcggttcccgcatgaatgatattcaaaggcatcccgttcttcatcgtcctcctgtcgggacgggttatactgaattcgcttagttggcggattggcggtggggtggttctgtccagcatttactccccctccctttgttttaaaaatgcttcggcacgtgccagatcctgaggcgtatcaatgcctattgtctccacttcactgattcccaccttaatagtataaccattttccagccaacgaagctgctccaacgattcagccagctccagcgaagattgtggaagcgaagttatttctttcagtacatcggcccgataagcatacagaccgatatgtttatagtaagtatgccctttcagccagccttccttctccacattacgctggaaaggaatgatggaacggctgaaatacaaagcattcatattcttaccgactactactttgggagagtttacattttccaaggcttcaagcccgtcatccgggatgaaaggtttcaccaaagtcgcaatctgtgtggcaggatcttcaaagcaagctttcacggcttcaagctgtgatttttgaataaaaggttcatcaccctggatatttacaaccacatcatatcctcgtcctactttggtatacgcttcatagcaacggtctgtgccgcttttatggtgaacggaggtcatgaccacttttccgccaaaagcttttacggcggattcaatgcgttcatcgtccgtcgctacatacgcttcatccaatataccggacacttgttcatagactctctgaatcacaggcttgcctcccaagacggccagaggtttggcaggaaaacgtgtagaggcatatcttgcaggaataattccaataaatttcatggtaccatttcttttatatattcatgcaaaagtaacaaaaacatttcatacatttgcaccattaatgcaataaatgttatggacgaacaccattgtttgctttgtatgggctctaataccaaccgttacgcgcaactctcggttgcacgggaagcattgcgcaccacgtttcccgacattcatttcggcgagatgatggaaacggaagctgttggcagcggctttcactcccctttcagcaatcaactggcaaaattcagcactacgctttcacccgattccgttcgtgatttgtttaaagaattggaacgacgcagcggacggattcccgaagacaaggctcaaggggtggtaaaactggatattgacttgctggtctttgacaataagatattgaaaccggaagatatggaaagagaatatatccgccgtggaatgtctgtgctcttttagagcttataccttattatatattaatcattatcaccttgtgataccccgcctccacccccctatggcaaacgatagtgttactgagagccctaacctgacaggtgggaaaacagctaagtattttcattggcagacctaaggctttctaccaggaaggctaaggctttccggccgttctatttctatctccataggctttggagttatctccataacctttggagttatctccataacctttggagttatctccgcagcctttggagttaactccaaagcctatggagatagaacacaacagaaagaaaagccttaacctgcccccaaaaagagattagctttccttgaaaaaaacatttcataagaacagaaagcacttttttttatctcatctgtttgttgtttccaatgattccttatacatttgcgtttactaacaatcctgttaaacaagattgctaatcccgaactacctttatttatat

SEQ ID NO: 4017 - DNA, 335 bp, Unknown
  gut microbiota DNA sequence
tccgggcacggaaagaggtaacccgtgccacatccgaagtagacaaacagaaactggaagtggacatgtatgccatcaacgaacgggtaacccaactttttttggcatcctgttattgaaagagcaattgaagcaaaaccagcttatgcaggaagaattacaaaggaattatgacaacgttacagcgtatgtaaagaatggcattgccaatcaagccgatttggatgctgtaaaagtggaacaattgaacaacatacagcaacgtcatactctggaagctacctatcgtgcttacggcaagatgttgagtcttgggccgcaaacttcgaaatcaa

SEQ ID NO: 4018 - DNA, 2171 bp, Unknown
  gut microbiota DNA sequence
gaccgcagcccctattctacccgattagtacagaaagtgggagcttccgaatattttcatctgatagatgtatcaaacaactatcaggaagcaatgcaatgcattgaaaaaggagatgccgacctcattttggaaatcccgccacactttgaacgcgatttgcagaaaaccggtgtagcaaaagtactggtttcagccaacaccgtaaacggaacgaaaggaacgttgggaagttcctacctcagtaatatagtgaatgcctatgccactgaaatccggatttcccattccggctctatttctccctccccagtgataaaaatagatacccaaggacgtttcaacccctatctggattataaggtatttatggttccggcactgatggcgcaattgttgatgatgttatgcggctttctgcctgctcttaatattgtgagtgaaaaagaattcggaaccatcgaacaaatcaatgtgactcctgtaagcaagttcactttcattctggccaagctgattccttactgggtagccgacatgctgatcctcacaatcagtatcattctggcatggttagtctatggtctggttccggccggtcatttatggctgctttatttcttcgcattgctgttcattatcgtcatttcgggtatgggactggtagtttccaactattcccgaaccatgcagcagaccatgtttgtcatgtttttctttgtgattatcatcatgctgatgagcggattattcacccccatcaacagtatgcccgagtgggctcaagccatcaccatagccaatcccttgaaatattttatacaagtgacacgtatggtctatttgaaaggaagcggattcgatgacttgatcatgcaatttattgccttgctttttatggctatcatgttgaacggttgggccgtgttcagttataaaaagaactcataacagataaatcggaacatttgcttgtttatcattgttaatatcagtagcttagcagcctattgctaacctgattttaattatctaaaagaaaaagttatgaaattctttattgacacagctaatctggaacaaattcgcgaagcaaacgcattgggcgtactggacggtgtaactactaatccctctttaatggctaaagaaggtattaagggagttgagaaccaacataagcattacatcgagatatgtaatattgtggatggagatgtcagcgccgaagtcattgccaccaattacgaaggaatgatcaaagagggtgaagaactggcagcccttaatccacacattgtagtaaaagttccttgtattgaggacggcatcaaagctatcaaatatttcagtaataaagaaatccgtaccaattgtacactggttttctctgccggacaggcattacttgcggcaaaggcgggggctacctatgtatctccgtttgtcggcagactggatgatatttgcaatgacggtgtaggactggttgcacaaattgtagaattgtaccaaacttatgactacaagacacaagttcttgccgcctccatccgaaacaccttacatatattacaatgtgcggaagtgggagcagatgtagtaacctgcccgttatccgccattaaaggccttctaaaccatccattgacagatataggattagaaaagttcctggccgattacaaaaaggttaacggataataaaaagccttctctcgccatgagggaaggctttttacaaccataacacagaactaataattttctgaatgtcgcttattattagcaaatagtcgaatggtgttgtttcattccaattaaatttattcttttactttaaataacatcaagaatgataaaaggacataccgacatagacatctggaataccggctttttcattaacgcagattatttttccgatgatttcattatttataataatacgggaaaagatcttacccgcaagactcttgcccatcctttctttcacaacaattcatataaaacaacctatacttcatttatactgtgcctttccggaacttctgaaatagaaatagactccatcaactattctactaaagagaatacattactaatgatggtgcctaatcaaataattaaatataataaaataagcgaggattacaaagcacatctcatca

SEQ ID NO: 4019 - DNA, 1092 bp, Unknown
  gut microbiota DNA sequence
ggaagccgccaatatgacggttgccggatgggaaaagcccgtctatctctcgaagccgaccgaatccgtttttgaggatgtggaggtcgctccgctgctccgctcactgctgacggagtatttagaggaacggggcatcccttacgccatcgcatcccgtcactgctgccgcttgaactacggtgtgcgtgggaaacggtattttgccgttggctttccgaacatggcaggtggctatgaagtcagaagccgatatttcaagggttgcatacctccgaagtctgtatcactggtaaaggcgaatgacatcccggctgacgagtgcctcgtgttcgagggcttcatggactttctctctgccgtgacgcttggtgtaaccggtaacgctgactgtcttgtgctgaactcagtcgccaacgtggagaaggcggcgggattgctggacggatacgggcgcatcggctgcttcctcgaccgtgacgaagccggacggcggacgcttgccgcacttaccatgcgatacggggaacgtgtcaccgaccgttcctccctctatgacggttgcaaggacttgaacgagtacctgcaactgacaacgaaaaaacagaaaaacaaccatctaaaaatcgaagaacaatgaacatactgaacaacagaaacaagagaacatcaatattcaaggcagtggcgttatgcctgatagccgccatgtcattcaccctcgtgtcatgtgacgatgacatggacatccagcagtcctatcccttcacggtggaggtcatgcccgtgccgaacaaggtagtaaaggggcagacagtggaaatccgctgtgaactgaaaaaggagggcgacttttcgggtacgctctataccatccgctatttccagttcgagggggaaggctcgctcaaaatggataacggcatcaccttcctgcctaacgaccgctacctgctggagaacgaaaaattccgcctgtactacacggcggcgggtgatgaggcgcataatttcatcgtggtggtggaggataactttagcaactcctacgaactggaatttgacttcaacaacaggaatgtaaaggacgac

SEQ ID NO: 4020 - DNA, 1347 bp, Unknown
  gut microbiota DNA sequence
agaccgtccacgtcatttttccggcggaggtgcgctatgtcgatttaggctcgcccgacctgattgccgggaaagccgacggagcggagaacatcatccgtgtgaaggctaccgtaaggaattttcccaacgaaacgaatatgtccgtcatcacggaggacggcagtttctacaccttcaacgtgaagtacgccgccgaaccgctgttgctcaacgtggagatgtgcgacttcatccatgacggcagcacggtgaaccgcccgaacaacgcgcaggaaatctatctgaaagagctgggcagcgaaagcccgatgctggtgcgccttatcatgaagtccatccacaaacagaacaagcgcgaggtgaagcatatcggctgcaagcgtttcggcatccaatacctgttgaaaggcatctacacgcacaacggcttgctttatttccacacggagataaagaaccagagcaacgtgcctttcgatgtggactacatcacttggaaaatcgtggacaagaaggttgcgaagcgtactgccgtgcaggagcagattattctgccgctccgcgcgcagaactacgccaccctcgtgccgggcaaaaagagcgagcgcacggtcttcacgatggcgaagttcaccatccccgatgacaagtgcctcgtggtggaattgaacgagaagaacggcggccgtcaccagtccttcgtgattgagaacgaggatttggtacgcgcgggtaccatcaacgaacttcaagtacgctgaccatgagaaagtacatcgcaataatcatcgcgtcgcttgccctttttacagggcaggcgcacgcccagcggtgtctgccgaagatgcagggcatcgaggtgagggcggacatggcggacggcttcaatctcggcggcaaggacggcgggtacagcttcggggcggctctctccacctacacgaagaaggggaacaagtgggtgttcggtggcgaatacctgttgaagaacaatccctacaaggacaccaagatacccgtggcgcagttcacggcggagggcggctattacttcaagatactgtcggacgcccgaaagattgttttcgtctatgccggggcttcggctctcgccggatatgaggcggtaaattgggggaagaaggtgctgcatgacggctccacgctgcacgaccgggacgccttcatctacggcggtgcgctgacgctcgatgtggagtgttacgtggcagaccgtatcgccctgcttgccaacctgcgggagcgttgcctttggggtggcgacacacggaagttccacacgcagttcggggtcggtatcaagttcatcatcaactgacacgg

SEQ ID NO: 4021 - DNA, 3182 bp, Unknown
  gut microbiota DNA sequence
gtcgtgacgacagccagcgtttttgccatatcttcggttttcatgcaggcgatgtcgtgcccgtcgagaatgatttttccggaataacaccggttcagaccggctatggcgcggagcaacgtcgattttcctgtcccgtttcttccgataagggctgtcagttgacctttttttatcgtggcatttacctcgtggagcaacgagttttctttgtaacctatggaaaaatgctgtaattctatcatgcggtgatggatttgttgcgtaaaaccacccatacgacgattgggattcccaatagagctgtaatggcgttgatcggcaaggtgaatattttagaaatgatgtcgcaaagaagcaatatcgatgctcccgaaagaattgttccgggcagaaggacatgatgatcgctattttggaaaagcattcttgtgacatgaggcatagcgagacctatgaaacctatcggaccgcaaaaagcggttatcgttccggcgagcagcgttgtcgagagaaacaacaggctgcgtgaacgccgaatattcagtcccattgttacggcatattcctctccgaacagcaggaggttaagcggtttgatggtcagtacagccaacagcagtccggcaaacaccgatggaacaagaatcagaagttgtccggaggtgacgtcacccaaagcccccatcgtccaaatgacaaaggctttcagcgattcctctttgctgaggtactgcaatatctgcacgacagcacctacgcccgatgagaacatcatgcccagaatcaggattaccatgatgtcttttattcgctgtccgacggcagttatcacgagcaacacgacagccgcacccacccacgctgctccggcaatgcctattgatgaaccgatcccggcaagtaccacaagtgccacaccgagacttgcaccggaactgatgccaaggacatagggaccggcaagaggattacggaagagggtctgcatctgaagaccgctgaccgataaggcagccccggccaacagtgccactatagcttttatgaggcgtatgttgagtacgattttttccgtggcacgggaacaatttcccccggtcagtgctgcccatacatcgcggatcggaatgttgacagctcccacggccaagtccagtaaaaaaagaccgaccgtgagcgtaatcaatatggagaataatatagtcgaacgggaacgcatctatttcagttgcttgtaatacacacactcttcctgcaccagttcaggatggaatatcttcacgaggtcgcggagcacgatgtcaggattcacgacggcagactcgtaatagtcgttacccccggctgtgttggtacgggcgttgttgttatacacctctccatttttgaaacatcgggtatcggtgaatttcggacatgatgccttcaagtcgtcaagggagttcgccattcccacgttcaaccacatgtccgcatccgacgcgagcagatatgcttcttctaagtcaatggggatagaagcgtttcccgtgttcttctggtagatatagcggcctcccgcatcagtaatcaagcgggctacataactttgggttgaaggcatgaaccacgagtcgccatagggaacattaagcataaccgaaggagtgccgagggtactgtcggccactttctttttcaaggcgttgtatctgaccgggattgcggcaaaggctttttcacccttctcacgttttcctgtgacttctgaaagcactaccatccattcggccttgccgagaggcgactcttcaagataatcgccgacatacatgaacggtatgtcgagttcttcgagtttgctttccattgcgcttgcgccgttcaccccatagagcagaacgaggtcgggatcgagcgagagcagcaactcgtagttgatgttcccttcatagccgacatcgccaatactgtcgcggcgggcttggatgtctgggttggaaatgtagtcgattcccgaaacgccggttatacaccggacttcaccgattgcgtcaagcatggcgatatgagtggaagacatcgccacgatacgtttggcgtctcctttgagtacctgtcctgcaaacccttcgggaacctcttcaccgttgcggacgataaacagccatgtggttacactgtccgctccctgccagggattcctgacggttatcagtacgctttccttcccgcccgcccctttgatgtcgaagccggaggcatattcgggagcataaagcagcaggttgaaatcattgatttttgagcttttgttgtggcagcctgtaaatgccagagaaagcaacaaaatcaggcttaaattctttaatgcgttcatattgatgcagattatcgtttactatttttgttttttccgaacttgggtgttatgccgatgaatatctcgaaattgatgcccggcatgggacgggacaatacggaaaggtattcttcatcgaacaggttgttgatgctgccctttagcgacagatcggcccatcggaaagagagctgtttttccagtgtcacgttattcatgaagtaagggggcagatagcccgtcagggtatagtcattactcgacatggtataacgctggctgtaataacaccatttgtaaagcaggctccatgtccgccatgacagacgtccggtcaccgttgcggaaaactccggcacgtatggcaactgtttgccgacggattggtctgccggactcatcggttcgctctcgttgatcgagggagtccacgagaaagttccgttcatatccagtttccagtcctttccgagcattatatcaaggtgggcgttggtctctgccccgtaagcatgtacctttttgaggtttctgggggagaagaatcccttggttgtgggtagccagatgatccagtcgtcgatgtgcgaatcgaaccagttgataccaccgctcaaagcatatacattttctttccccaccgagaacgacaaccccacgtcgtatgtgaagccgtgctcgcttttcaggtcgggattaccgcccggcagaaaatagaggtcgttcagcgtgggaaaacggtagttccgggagatggatgctttcgccacgatattgccttttttcgacagtaccccgtcgatgaagaaagccgggataaccggggcccattccgtac

SEQ ID NO: 4022 - DNA, 8362 bp, Unknown
  gut microbiota DNA sequence
caccggccgtgaacagccatttctctgaaggagcataatccccgtccgcacttccgtagaacgtgttaatcttactgcgtgagcgggtcatcgaagccatttcgccgtttcccttgtcccgcttgtaatcataggccatccatgtgtgtatatagccgccttttacaccgaccttccatttctcccgcacgcgatcccacgagaggacgccgcgaaacgtctgctccctttggcggttctcgaagtccatgtcgttcccgtaatccgtgctgagcatcgccagttcccggttggaattgatataccaggcgtttagcccgaacttgtcgccttcgcccgtgttataataaatttcctgcaagacgtgcagatccttataagccccgctgcggttgcgttccgtcgggtaataggaaccgatgatgttcttgtcctcgtcatagatgttttccttcttgtcccggtttcggtatttgtagtcgttgggggaagaggaatacaccacacgggtggaggactgccagtgtttgtcaccgtaggtcaggcggagaaactcgtcgaacgtgctgaacgaccccactccctgcacgtactgcaacccgaacccttcatggttggccggagaagtggagagcctgaccagaccacccaagccgccgcccgtttcgtttaccgatgacgttccgtgcagcagcgaggcatcatcgataaagtaagaagggatggtggaaaaatccgtcatgcccagcatcgggttgttaatgcgcataccattccacgtcacttgggtatgcgagggagaggtaccccggaaagccacggtggataacgtggcgcgtccgtagttcttgacaaaaacggatgagttgaatgtcagcacatcggccatagacaaggcgatgttctctttcatggcgatggaatcgaaacgggttcgttgcacgcctatatccttcataggtcgtttgcccaccaccgtaacctccggaatacgtagtacccttttggtaatgctgacggaatttttctgctgggcggcaagcagaaagggcaggcttacccccacgaacaatagaataagatgtcttttcatttttgtcctccttcctcgttatttccagcagaaagctcccggaatgattcccacgtaaaattcatcgatcagcttgccttgcggcgaatagcgatacacgataccttgttgctggtaatcaatagcgtcggccacatatacctccccgttgttgggattgaccgtaaggccgtagtatttggtgtcccgaaactccagaaaaggccggacgggaacacggtcggcttccaccggcattcgccaaatatcgttgttgatccagtaaagtgtatcccgtgtaccgttgagctggacttccgaaggccagtcgcccagcttaaacttgaactgtttctctacggtgaaagtctcggcgtctatacgatagagagacggtgcctcgtaaccgtatgggctgccctcgtaaccgccatccgtgatggtccacatcttgttgtatttgtccatgaccagcgaagtaggttgtatgccgatggtcagttcgtccacgaccttgtccgtctccgtgtcgattttcaggatgcggttctggtacgaccagcagttcacatagacgtacttgccgtattgtaccatttgttcggtggaacccgattccatgtccatgtctggacattcgatatagccggtaatctcgtatgtcttggggttgatgatgaagatacggtagtcccatatctgcgtcacataggctttctcatccgacagaaaatggatataccggggtgaggtgaaacctgtgatacggcccacttccttgaaagtattgatgtcgatggcgaaaatcacatgcgagttgttcaccacgatccagcctataccgtcccggataaccatagactgggccacatcgcccaacttgaacccgttggcacggtaaaacacttcattctccacttcgcacgtggcgggatcgtagtaggaaagcgtggcattgctgtactggaaattcccctcgttggtaatgaaaagaccagaggccgatacagagaaatcttccatctctccgtaatcccatttcatgcaactgccgaaaactggcaggcagaaaagaaaaaggcaaatccgttgtattgttctgctcattgtcattcggataaaaaagagtacccgaatcattacgggtactctggttaaggtataaggtttaatcctgctgcgtatattgtttgtccttcatattttggaaggttgggttatacccacatttcgtcacgctccaactttcccccgtaatcattccgttttctataaacttgccgaagaaagtgtagtcggtaaatttcgtcaaaccgtcaaaaacaaccccatgcaaggtctccaacttctccatggaaagtgtttcctgagaaagagaagtcgcactttttatctgtagcgtaccatctatagtctgtaatttatcacaagtaatgcctgttgctttattaacgaacaacccttcacctcctacgtgaagcaattccggaatatccagcgatttactttgtaaagatattgctaacgaaccctctccctctttataatatacaggagaagctgaacaacaaactttggatagtaagggcaagttacaactggtaaaatttccagataaatagaactgtcctcccacttctttcaagactggcattgtgattgaagcaaacatgggtatttggatatatccatatccatctatgatttccaagtcgggaaatttggcattgcttcgcatttggcctgtcacatttagatttccatatacatgttgaattgtcgatatggtataatcggtattgttggtggttggcttacaagtgaagtctttgatattcttgaacgtgatttcagggaacttattattcgtgagactggtgatgacaaaatttacatttgacaaatcttcggctgtttcaattttggagagctgcaccttgtttataatttcaatctggggcgctgtttctccgaaggtttcaaatcgggcgttcggcaacagcagtgttccgctcacatcttcaagataatccagcgtgatgcttccaagtgtggtgatcttgctccagtcgggaagttgtttgagtgccgtgaaattctttatctttatctgtccctttatcgttgtcagtttgtccattccaccgaaagcctgaagcacgtcatttcgttggggaacaaaactaccggtaggaggagcttccatattggcttccataataatacttccgtttactgtttcgatttccggaaggttgatggtttccaacatcacggggacggtatggaaatcaaggccaccggtctctttcagcttaaggaagctcatggaagtcagcttggcaagattgtttacggacaagacccctccgacacttgtcagttccggtatttccaaagacgcaatcgaaccggctgctgtgttctcttcattgagtccttgaagattcagatcctgacctacagtagtcagaaccggaaactcaaaactctgtaacgacgacgcattgaacatcacgcttccttcaatagttgccagtttctcgaataggacatacgtcacttggtcgttatataccgatatgtctccggagagcgtttccaatgctttcatggaaatcatgtgaagttccgtagctttcgaggcgacatcggtcgaacctacctgtaaacctccggcagaaacgatattatccaaccctgtcaagtctgcaccgttgtaactgttacgaatgacaatgttgccagtaacctctttcaaagatgccaatgcagatatgtcagtgattttttctgcctcttccgcatcagagccgataatcaggttccctttgacaacggttgttttggttgcggcaaaagaagctacctcctcggtggtcttcaactccacatctccgtcagattctatctcgcttttcacgaccttataggtatattcgcgggcatctccgttataggatgtcacccggaaggttcgttcgttatcccagtccgttaccgtttcaggatcaggtatgattgttgcagaagttgtgtacttgaattccacttcggcgttgttcagcgataccgtatagggaacggttattgttactgtattgtccgtaatgtcggccgtgtacgatttcccgtccacggtcatcacgaccgatgtgatgaaattttcatctgcatcttcaggtataatttcatcgtttttgtcacacgctcccaaaaagaacaaggataggagcatgggaagaaaataaattttcatacttgtaatttttattatttggttagatcctcaaaagaaaatacctccgtagaaacttcgcccagccagccgcttttggccagaacaccgcattgtattttgataaagtcaatatattgcagattggcttccgttccatcggcatggatggcattggaaattttgaaaccgttcctttgtccgcttccatccaccgtactgccgccttctatctggtcgtttccgaaattatccacgtacccccagtcataactctgattatcccaataaccggtttgagaatcttgggtgttgcgggcggccagacaagtgcctgtcagggtataactgttttccgaaatccaagccggataataatagtcttgtgtatgataagcggacagatagtctacccagccgtttctaccgtcggaactgatccattggacatccatttttttgccttccggacggtaataggtcacttcaaaattctgtattgtttcttccttgcctgcttcagatcctttcagttcgtaccactcgtcatccggcaatccgtttccgtttatatcttgcatgacccatacgatacccggttcggaactgccgtcaaaggcgttcccctgaacacagaaatcatattggttacccgaattgggaatactgtggtcgaagccgacgatgatataacccccgaaagaacctaaagagacgtgcagtttgtctttcaaacgctgtgttgcccatgcgacagccgcttcaggggatgtttcgttgccggtcataccgcctatcgtgctcgtctcgttgataaattggccgggagctggggtatattcatagactttattccagagcttggaacttcccgaagcccggaagccgtcttgttcctttttgtccacacaaacgacttttacggtggcagtgacagccgttttccctttgtcgatattcctgcttattttttccgtcggtgtgtcttccgacacagtacaggagacggtgtattctccgggtgcggacggcgtgaacttgaacatgcgttccacttctccttccatgacctgaccgtccacactccactcaaaacggggattgtcgaaatactccaacaacggacgcaggaaaacaggacggtcggcaaaagtgtacctgtccgtggatgtttgcaggtaagacggggtcgggaatttgacaacgtagggcatcgtttccacgacctctacgcttacgtctttcgttgttgtcccatctatattggaagcgttgattgtcaccgtataaacaccgagttctttttcattgaaagtataagtattctcggtggaaacgatttttccttcccgtacccattcgattttgaacccttcgacatccgaatgctgaatatcgggagtaaatgtgtaatcggtattccggacgacttttagcccctgcgaaggtagtgccagtgagatgaccggaggggtgagttctttcacttctactttcagttcctcttcggcatagccttccgcattgtctactcttagtttgacataaaaatccccgcattcattccatgtacgttgaagagacggacccgaagaaaccagcgtaccgtctatcgtccaagcaaaaagagcatcttcaacattctggtatgtcggggcgatagtcaattcgtgatcgaccttgaccgtgtaaataccggtctcgctgtcaagttctattataggttgtcctcctacttcttcggtaatgacttcatccttgttgcaggaggtgaacagcatacaggcagaaataataaaatagtgaaaacgatgcatgatgtgtggattttagaaaaataacagggatacccccgacagaagggatatccttgtattctttttattgtatggtgatatcatcaatacagatataagccggagtattcaaaccgtatgctcccgaatccgaaccctcgaagttgaatttcacactttgcaccccttcggcattgatttcccaataatcccatgtcgtgataggatcaacctgttgttggccgttacgataatcggctaaaagacgtttgtaagtgcggatcagaccgccattcgcatcataacattccagattcacttggaaataccctttcatctctttcagaggagtcgctacccccgtagaaccgaactgattaccataagtaatgacaccataagtgtatgaggtgttgcagatccacaggccgaccaatttccggggaacattgaaataaaattctggtttagccatccatgcctgattgtaagcatccacatatccgtaaacgacaccgaaattggaaccgctgtgcccggcttccttattctgtccttccgcttccaccgcagtgttatagacagaacattggtttagataagaataccaccagtctccggtatttcccgactgattggagcggatgttccagttggaaagtgcgatgccgccgctggaatactctgtgcttccacctacagtattaaacattgaaaggaagagatattcttccggagtattgtcgtaaatggtggttacttgaggatacccttggtacgaataaagattttctccggccgaggtaggtcctgctaacatgccgggatcgaaatcatcgaaagtgatagttaaagtaccgtccgaatttgtcacagcacgggtttgcgaagttccggaatcaaccgggtccatcaaaaagtcatcgtccgagctacagccagagaacaaggcggttgcggtaaatagacaggcacctgccagaaagcgtaattttcttttcataggtcactcattttaatgtaaaacatattattaacaaacacaaaaaattcccgttcgtgcggacttacacgaacgggaatatgtctgtcttcaaatattgaatggccgatgagctattccttatttgattacgacccgtatatcccgcaggtgtaaatctcattccggtcatggcaggtcttctgactcgtcccggtcatcgtgccttcccggtattacaccagtggcaaaagttcgatgtccgtttttgtggactcacagcagcgggtactgtcccggattttcaccgggttcccttttcattcggaaggcgtaaacctcccgaaaccatttcccgactgcaaaattatctatattacatatcaattccaaataattcataatatttataataaaacacacaaagcatgacaaccgtactgttttaattagagcattcaagtttacgacaaacgaagacggtaattatcatacacaatatccataaaccaacaaaacagcttgccattttccataacaatgcgttctggaatagataactgttagctgcaattatgcaagcaaaaaaagcagacagaataatgactattaatatcatgcaccagaaattaatcctataaatttatggaaaacaagtaagggaatggaagttccgttgccgcatggatgcaggtgaaggaccttctcttttaacgttggatacgccaatgcacgccaacggaagactctgatattatctgtttggaaaggatataggatgtgcgttactttgtcgcatattcagaatcttaaaaagaattttagtatggaactgacaattattgaaacaagcgcgtattaggagttgagaaagctggtcagcacgctggtcgtacagatgggcgacttccagaaaaagattgccccgcctgcgccggacaagtgaatggatgcgcaggacgtatgtgatggacttatgcccaaacactttctgaagagtttccagcagcatccccttgagtatggccagaacggcaaatgcgtggcgtccgatgtgcggggtgacctcgccccggagttgcatttcctgcctatgattccaagactgagccgcatggcattgtattcacctaccggaaagacacattcggggagtctttcttttcatccgtacccctatatttttcaatcagttcgatagcaatgggcaataattttacgacatacgccactcccgtttttatacggttgcccatcagccatgtaccgccgtc

SEQ ID NO: 4023 - DNA, 2646 bp, Unknown
  gut microbiota DNA sequence
atgttcatgcagtaagttttttgatcagactcatgttcttctccaccagccggataatgcagtcatgatactccgatgttccgttgcatacggctcttgactgtactatctgaaaagatttaagattcacttcgatggtttccacatgtttttctccgactatggctgtcatgatcaggcattcactgcgtctgtaatacctgttggcgtatacacaatggtgcatggctttgccctccttgtagaactgggttacgctttcaagcggacggatgactatgccgtcgcctttgatttccatgccgaagaatctttccatccggttgtagaatgatgctatatcctccttgagctgcttttctttttggatagcctttattctgtccctttcccttctttgccttgcctcaatttcatttttctttcttagtaatctgtcgtgctcggcttttaaatttttgggacatacgtatttggcgttatgcagatccttgtggaaataggacagcaggcttatatagtcattccacatgcttgcatctctgattatataacggttgcggttgcagatgttgaaggacggtttatatcggagttggtaatagcccgttttgtacatgtgctttaacatatccgtctgtccggtcttgatacataattccgcatcattgccacctttcagaaggtctcgtacaagttttgaggggggtacatcggggaaccgtttcccgattccccgctttctcaattccgggattagtttctttcttggatatatccatccccatatcgcatataggtctccacgataattccagctgtaactgccgtattcaccctttatgctcagtggttccgaatatatccatccgctgcttcccatattcatcggttttgccatgatggtgcgtttcccctcgacggtgatccattcctgaaccacttcaaagaaagcatagtgaatataatcctgtctgctgttcaaatcaaaattcctttttctgacgtacttgcagcatagtatatgccttatgatctggaactctccggcggtctgtaagatggacatgtacttttcttcctcgacttttcgtttccggctgatctttacgtccagtttgtggtggcagtacgggcattcggtcgtatcactgagcagggtagtccccagctcgctattgcttgtgtctatccatgttccgccgcactcggaacaccatagctcatccttgcacctatatgcttcgtgggtgaatatatgttctttcgcccattctttttgtacttcggtaacggcggacagtttgccgcttagtccggttacacgtttctcaagtttcgttctcggtttcatgattagaacaggctcatttgttggacattatcatccgctttctttcggacgtttttcttcctgagtgtctggtattgttcttccgccagccgtgcgattgctttgtcacgtgccgctttcttatcttcttcggtgagttccacaggtttggcggaggatgatacggacgttttctctccggcaggcagccggtttattttgatatcgtcctcatcatagtagtgcactgccatcccgtagacctcctcgtctgaaatcgctacggcgttaccacgcttcctggcttcacccatgatataactacagcattcatcaatgcttttcttctcattcgcatattggggggcgaacagtgaatcttcttccgcccgtttgtccagataggctttgattgcctgtttgaaactttcattacttgccatggttacttaattttgaagtggttgataatatttatttgtgattgattctgatgttatactcgcataagaattttcctatatcgtcgcttgctatattgggaggtggtgcattatctccgtatatagcccgtattgtatcctcatttcccccgtatgccttccaataggtgtaggcagtatggttattgggaacgttaggaaaaagttctgtgaaggcgctgaaatcgtttttagccttttttttgagctcctgaatgttttttactccctcaatcatggcgcacgctgcatcttctatccgggtgaaacctttttgggattgtttcatggcggtttcattggacagtttgacgtgctcgtctcttctatccctgcaaaagtccgatagggctaccataatggactggttgtttatcctgtttccccagacgaactgtccacggcttccgtttttaagctgtgtgaagaatatgcaaagctcggccagattgagaaaataatagctggccaatatgcttagcgccgtttcggcaagttgttgaggtgcgatatcaatgcctgcgtatcggaggattgattgcaggtgctctgtgataatcctgactgatgtggcgttgccgaagacaacattgatgtccgcaagggtgggaataccctcaatcctgattgcttgtgctaatgtcaggttacaattcagctgggcttgcgtgccggaccagttgtcaaccaattgggaggctgttgatccatttctcaaggtctgctggagcggtgtcagtgtctccggctttttcctggattgaggtatctgtcctggggacattatcacagtgatctgtttttgtaggcttgtttccattttgaagtctt

SEQ ID NO: 4024 - DNA, 1094 bp, Unknown
  gut microbiota DNA sequence
tctattgttatttccacaataatcccaaatgctcccggacttttatagtagaacttttaaaaaaagctggttggcggttttctctttgatgaaataaaaaaagttaaaaggatgaacttttcttcttttaaagctaacatgaactctttataagaggaaatcttctgtttttcagtttgttatgcttcgcttttacatgaaccgatttatatatctcttgataagagatatatattttctgtgcaaaaataagcaaagttttgagaactaatacatttttggcaaaaaaaataggaatttatataaaaaaatagttttctcatttatttatattcttctttatttcgtttcaacagctctgtaatatgttgatataatgtgtgttaataccttttgtagatctcttatcaagagatctacaaaaatgtcgtttttaagacctttttatatatggaatatatctggtctttgaagcggtataattaaatgaaaacaacataaagcagatggaatatctatttctgagacgtaaacgcacgaccgctacttccgagcgacagaagactttgcttttcaaggctgccgagcggcaatggaaagaggagtttgccggaaaggaaacagacattcgcaaggtggattgtaatatatataaaggtatattgtaccagcttgagatacgtcaggtatttcttgacacctcgctttctctgaagaaactgagtgcactgcttgaaacaaaccagacctatctgagcaatgtggtgaacaaatacttcggttgtaatttgaaggaacttgtgaacacgtatcgtgtggaatatgccaaagaacttctctgttcccgacgttgtgcgctgactgagctgccttgcagttgtggctttgcttcgaaaagtgctttctactctgctttcagccgtattgtcggggtatcacctttgtcatatcagactcaagaaagaaggaggcatcatttgcaggcagtaaactagctaagctattaataatgaaattaatatgtataaccaattttagttttttaaatttataaatttaaagtttttctattatgaacaaaaagtttttaagtg

SEQ ID NO: 4025 - DNA, 19459 bp, Unknown
  gut microbiota DNA sequence
gacctcgacaggaacatttgtgtcttgtaaggactatgatgatgacattgaccgcatcgacaaggaattgagcgaagtcaaggaaaccattgcaagtcttgactcggcaattaaggcaggtaaattcgttcagtcatgtaatgaggttaccggtggatatgaactggttttcactgacggttccaaaattactatcaagaacggtacgaatggaacagatggagcagccggtactactgttatccctgaattccgtgtggaaggcaattactggcaggtcagcacagacaaaggtgctacttgggtggatgtgaaagataccgaaggtaacaaagttccggccagaggtcaggatggtgaagctgccggttcaaacgtgtcttgggtgacagtggacggtgtggaatacatcaagatcggtgacaaagttactgatttgaagcagaacaatgaatttcctaacattgctgtagatgctgaaagcaagactgtaatcgtgactatcgacggtcagaactatactttgctgcaggaaggttctgcattcaaagggttgcagactgtagtttacagaaaacaggctgttgatgatctcaaggatatttgtaaagcttatgatatctattggctggaaaatgaaggaacttttgactcagataaggatgttttgtttgcatctgttcctgcttatgcttcattcaaagtatatccgggtgatttctcattgaataatgcgaaattctcctttgttgatacgtatcaggttcgtagtgtcgctcctgctttgacctatatggaaggttctgcaaaattagaaaacggtattttgagccttgctattttgccgaatgaaggtattgaaacctatagtaattatgcgacctcattggatgtaactatgtatggtcaatatacatcagcttccgattatttcacggtaagaagaacaaaggcatctgtaaagagcattgttaatgcttttacttcaactaatatggatgaaaatgattatccggcaattattactgaggatggtgaatcttatgatggtaaatcttatggatgctttgactatcaaggtgtttataatgtaaatgattctattgacgcttacatttccggagctgcaacagtatggttgaagtcaaccaatatttcatataccagagtgttcagattgttggatcagaatgaggattatacatttaatggacaacctattaaaactcgtcagggtatctttgaatttaaagataatgttttgtctgtaaaatcgactaaccaggcgtctgctattgatgaatacgctgcgatagaagtgactactacagttaagccacaggaagaaggtgttaaagaatacgaggtgaagaatgtagtcttcatcaaggctgttcgtcctgctgttaatcctgtatttggaactgttgctttgaaaccgttggatgctaaggaaaactttacatttgcatacaatagctcacaggcccggatcattactttggatgtccgtaactttgaggctgctattgaaggtcgtgatgttattgctaatgataataatgaatattgtacattcattacattgaacaagcctgtatatgatgctggtggcagcaagttagtgagatatgaatcaatatctgatgattgtaatcaatattatcaaaataacaatttgtcgactactattcctgcaaaggttacagacttggcaaaagctcttgaaacggttaaaaatgaggctgtcttgtattataagaacggtggaaacaatgccgataaggactctttgttcttgattttgacaccgggtgctaactttgcacaattcaagaatatgtcattgctagccggagcttcttcttatggactctttggttggggagctactgagaagatgactaacggagtgaacacaccgtatgcagtttacaacagcttcgtaaacaagctgtttaaggtttctgtagataacttctctgtaacctataactttgattgtcctatcaaggatgaatataagagtcgtactattatcggtacatggacaaaaactgccggtgcttatagcaaattcatcatggagtctaataacttcgacaagatgtacaatgttgttcctgaagatgcgacagttgagtttgaattggattataagaagcagaatgcttatgttcaggaaatgatgaaagaaaataacattgaatggactaacactaatcagattgcctttactccgcgtgtagatttggctaaggttggaactttgaaagttgatatctatgatgctactgccggttctgctaagcgtgtattgtttgcgactgaagactggaaggtggaacaacctatcttggcattcactgatgttgttgatttgaagtataataatccggcattggctacaaacgatcagattaagattattgatttgattaatgcattgaatgttaaggcaacagaagcttcttataaaaaatggacaaacttgacattgaaagatgctgttggcaatacattggtaaaatacaatgccactacgattgctgctgaagaaaccatagctgaaacattgtatagaaaagatgctgccggtaatgctgttgctgaagctacaggattggaaatttctttggatgagaatgaaaaagactttacttatgatgcagctactgcaactcttacttggaagggaactccggaaggtacagtatatactcatgatgtaaacttgaatattacttatactcataactggggtgttgtaaccaagacattcaaggtaactgtaacaagaaaagtacagtaaacattcgggctaagatagaaagtatagcttaaatttgatatgctttcttcttgatgacttcaagcgaggaggggatatgaatctgattacagaagaatatcctctccttttttattataaaaatatattcttgatataatgacgaaattagttcgatgcggtataaacttttatgcggatgtagataataaaaaagcggtaaatgatagggatgccttgcagaacactaaattaatggaacattatactcaccttcttggtcaattacagtatgaaggagctggtatctggagccgttttaatattatgttcggaataaatgtttctttattcggattggaaaccgtcttgtttaactctatatgtcaaacttctgaatatctgacatttattattgcatttggcggattgtcattttcaatatggtctatttacgtaatgcagagattatggagttatcatgagcactggaagaatatgttatgtgaagcggaaaaggcttttccggatgagtatgtgaaacttttcacaaagattccttctaatttgaaaagagagaaaaagtcttgggagttatggctgaaatcatacacccaacctttttttgccatattgtctcttatttggttgcttattatggtgttaaaccatgctatttatactgatatgctgaataaggaaaatattattcatcacgtgggtgtggtgaaaatacaacagaatgaaaatttaaaaaataatgaagatgaaaaagatgatggattcgactactgtgattattactacaacagataatagagtattgttgcaaaaaagagatgagaacccggatatagagtactccggatattattctcttgtttctggctaccttgaggaggaggaaacccctctagatggcattatcagagaactgaaggaagaatttgaacacaagaaatcccaaaaggtgcattttagttctataacctatttggggtctgagtatagagcagactatgatagatgggaatatattcatcatacttatttgatggacgatgcagcggatatccgtattttggaaggtgaatcttttgtcttgctggatatggatgagtgtttgagattggagaaccttgctcctcatcataagttgtttttattaaaatatcgtgccggattatgtaaaattgacgtgcgtgagcaatcaaaaaaaatgtttgatgaaataactgtcagggatttgataaaagtggaatccgtaggggatgtgaaaaattatagcttgctggaggcgggaactggttttgtaattggcgaggatactactttgagtgcttcaattccagcggtggaagccgctaaatatataggattcttgcaattcgtcccaaaggttcttagaggcaatcattatcattttagaaaggtggaatatatgcttattttacaggggcgtatgcatgccacttttcagaaatatgatgatagtgaggctgtaatagaagagatttgggaaaagggggatttggtacggactttaccggggtgcgtccatacattaacagctttaggagagtcgaatgtgttgactattgagttttctccacagccttatgttgcgagggatgtgttgatgaatgataaaaaatagcttgagtatgggaaccattgcagtaacgggggctaccggttatttggctgagaaattgatagaacggttgattacccaaggacatactattcatgcgatagccaggaatgaaggaaaactgattgctctgagggagaaatttaaaagcgttcaaatctttccatgccccgttgaagattatcttttattgaaaaaggcattgaatggttgtgatgggatatttcatttggctgcgtttaaagatgtcattttggcaaaagaacatcctctgaaagctgttcagactaatattcttggtacattgaatcttcttaaaataactgttgaggaacagaacataaaatttattctggcaacaagcactgataaagctgttcaagtttcaggaacgtatggggctactaaattgcttatggagaatctttttggggattttgagcaaataaacggatcgaattgcgcttataggatagttcgttatggaaatgtattgcattctacagggtctgttttggtaaaatggaagtatgcattagaaaataggaaggagcttatattgacagatcctgaagctacccggttttttattacgtgggaacaggcaatagatgttattttttcctgtttaaatgacgctcaaagtgcggaaccgttttatccgcctaatatgaaatcgataagcttaggaattttattggaactcacaataagaaagtatgctaaaactgttcctgacatcagagttatcggtttacaaaaaggggaaaataagcacgaatgtatcacggcagacttaagcagtgaatatgctgaaagatggaataatgaggaattattaaaccttatctagaaaatactatgaatgatagatagttaaatctttcttttaagacggggaattgcagtatattgattacttttgtcctgtatcataacttattaaacctcggatagatatgggaacagaaggcatacaggataaatacatcaacccttatgccgatttcggcttcaagctgcttttcggcacggcaatgaacaaggaacttttcgaggctgccgggatagctaagtcaatcctaaggaattaggcgagtattgggaaagtttgaagaatttccgcgactggtacagcgtgatgtccacccagttgaaaaaagggcgtgaggaaggtcttaaagagggtattgaaaaaggtcttaaagaaggtcttgagcaaggtcgtaaggaagaatgcttcaagaatgcaaaaaaaatgaaacaggccggtattgcatttgatgtaattgcacaggttaccggtctgtctataggggaaatagcgtctttgtaagttgtttacagcaccagtccgtccagcatctcgatataaagccttattgcttcctcaatttccgaaaccatgatatattcatcagccgtatgtgaacgggaggactttcccggaccgattttgacagacgggaacttcatcaacgcctgatcggacaaagtaggagagccgaaaggtacacgtcctagttttaccgcgcgtttcacaaagggatgctcggcactgatatgagatgagttcaagcggaaagaacgggctttcgcctcgctttttagacgggcgcttatttctttgaatagttcttcgttagagtaacattcattactgcggatatccacaacgaaagtacaagtatcggggatgacattatgctgcgtgccggcatttatttgtgtcacgctcattttgacggggcctagcagggaggattccttcgggaatttataatcacggaaccactgaatgtcttccagtactttgtaaatagcattcactccttcattgcgtgcggcatgtccggcttttccgtatgcggtaacatccagcaccatcaatcccttttcggcaatggcaggctgcatttctgtcggttcacccactatgcccaaggtgatgggaggtagttggggcaatacgctttctattccgttttttccggaaacttcttcttcacatgaggcaagaaagatcagattgtatgcctgctcggttgtagagagatggcggtacacctgaaataaggatactacactggcgccggcgtcattacttcccaaaccgtaaatctttccgttttcggctttcggagtgaaaggatgtttccgccatccgtttaccggttttacggtatcgatgtgggaatttagtaaaatagtcggtttgttgaggtcgaacatcggactgatacaccaaatgttgttgcccgaacgaccggtcatgatacctgtttcttcaatatagttctgcagaaagtcggcggcagcttcttcttcccggctcaatgaggggataccgattaacgaattcagcaatgtggttgcttcggaagtgtaatattctatatcaatcatcttgattttaataatttaatgtgttgcaaagatactatttttgcgtggtaaacggtgatgaaaaaagtaggtaattaagttagatatgcaactaaaactttcggctgatttcttctaactctttgactggttgggaaaattaatgcctatttatagaggataattccaaattaaacgataactttgccgatgaattaaaaataaatctttggaatgagtagttctttcttatctgtcctgatacaacgtcaggcagggaaatatggtgatcgtgtagcgttgcgttaccgcgattataaaacagaaacatggattccggtttcttggaaccagtttgccgcaactgtaaaaacagtttcgaatgcattgatagaattaggtataggcatacaggaaaatatagcagttttttctcaaaataaaccggaatgtctgtatgtggactttggagcttttggggtacgggctgttactgtaccattttatgctaccagttccgaggcgcaggtacattatatggtaggtgatgccgaaatacgttatatctttgtaggtgaacagttgcaatatgatgtggcattccgggttatgcaactgggaagccaactgaaacagattataattttcgacaaggaggtaaaacgtgatgagcgggaccagacttccatttattttgatgactttttgaaattgggcgaggcgcatccgcatcaagctgaggtagacaagcgtacttcagagtcgggtaatggtgatcttgccaatattctttataccagtggaacaaccggagacagcaagggggtgatgttgcatcattcttgctatgaggcggccattccggcacacgatgaacgtttccctcaattgggtgatcaggatgtaattatgaatttccttccttttactcatgtgtttgagcgtgcatggacttgctggtgtctttcgatggggtgtactttgtctatcaacttgcgtcctgctgatatccagaagacaataaaggagatccgtcctacggctatgtgcagtgttccccgtttctgggagaaagtgtatgccggcgtgcaagaaaaaatcaatgagacaaccggattgaaaaagaagttgatgctggatgctattaaagtggggcgtgaacataatttggaatatgtgtacaaagggctgactcctccgcctgtattgcacatgaaatataaattttatgagaaaacgatctatagcttgttgaaaaagactattggcattgaaaacgggcgtttcttccctactgccggtgcggctattccgccggctgtacaggagtttgttttgtcggtgggaattaatatggtagccggttatggattgacggaatctactgcaacggttgcttgtgagaatgataatgaccatgtggttggttcggtggggcgtatcatgcctcatgtgcaggtcagaataggggagaataacgaaataatgctacgtggtgagggaatcactcatggctattataaaaaggaagctgctacgaaagcggcgtttactgaagacggatggttccataccggtgatgcgggttatataaaagatgggcatttgttccttacagagcgtatcaaggacttgtttaaaacttcaaacgggaagtatatcgctcctcaagccattgaagccaaattggtggtagaccgttatatcgatcagatttctattattgccgatgaacgtaaatttgtttctgctttgataattcctgaatataaactggtgaaagagtatgccgcaaaaaaaggtattcgctatgaaagtatggaggaactgttgcagaaaccggaaattatcgatttgtttagagagcggattgatacactgcagcagcagtttgcacattatgaacagatcaagaggtttaccttgttgccccatcctttcagtatggaacgtggtgagctgaccaatacgttgaaaataaaacgtaatgtgctgaacaagaactatgctgccgaaatagaaaagatgtacgaagaataatgggaaaatgaatagatttccactatctttgcaccttgaaatgcaaaaattctcaagatgataacaatagagcaactgaaagacgtaaaagaacgtactgcggcacttgaaagatatctggacatagaaaataaactggttcaggtggaagaagaacaactgcgtacgcaggcgcccggtttttgggatgatgccaagaaagcagaagcacaaatgaggaaggtgaaagatctgcaaaaatggatcgacggttaccgtgaggtaaagacgatggcagatgaactggaattggcttttgacttttgtaaagatgatttggttaccgaagaagaagtggatgcagcgtatcaaaaggctgtcactgcggtggaggcattggaactgaagaatatgcttcgccaggaggccgaccaaatggattgtgtattgaaaattaattgcggtgccggtggtactgaaagtcaggattgggcttccatgctgatgcgtatgtatatgcgttgggcggagaccaatggctataaagtgagcgtggctaaccttcaggatggggatgaggccggaatcaagacggtgactatgaatattgagggcagttttgcatatggttatctgaaaggtgagaatggagtccaccgcttggtgcgcgtgtctccttataatgctcaggggaaacggatgacttcttttgcttctgtgtttgtaacgccgttggtggatgatagtattgaagtgacaattgaacctgcccgtatgtcttgggatactttccgttcgggaggggccggcggacagaatgtgaacaaggtggaatcaggagtacgtctgcgttatcaatataaagatccgtataccggtgaggaagaggaaatcttgattgagaatactgaaacccgtgaccagccgaagaataaggaaaatgcgatgagacagttgcgttcaattttatatgataaggaattgcagcaccgcatggaagaacaggccaaggtggaggcaggcaagaagaagattgaatggggatcacagatacgcagttatgtctttgatgaccgtcgtgtgaaggatcatcgtactaattttcaaacttcggatgtgaacggagtgatggatggaaagattgatggctttatcaaggcatacttgatggagttttccggttcggagaattagtaaattcttcgtaatttatttgttttcttctagaaactttgtacttttgggatattcaaaagagatggtttaatcttaaaaatgaaatacttatgggaaagaataagaaagctgcttatagtaagcgggaagaagagaaagcaaataggattgtaaaaggtctgttcatcggattaattgtattagcccttgttattatggtaggctatgccatgtatggataaaaacggaaaataaatagtgaagtcctgctgaggttattctctgcggggcttttttatatattaaaacgctatgggacaagaaatagaacgaaaatttttagtaaaggacgacagttataaactagaggcttatgcacatagtcatattgtgcaaggttatatctgtagtgctcgtggaagaactgtccgggtgcgtattcgggataataaagggtatcttactatcaaaggggcttccaatgactccggtacaagtcgttatgagtgggagaaggagatcagtttgcaagaggccgaagagttgatgaaactgtgtgagcctggggtgattgataaaatccggtatttggtgaaaagtggagagcatatctttgaagtggatgagttttatggtgagaatgaaggcttgactgtagcggaagtggaattgaatagtgaggacgaattgttcaaaaagccccatttcatcgaaaaagaggtaacgggagatattcgttattataattcttttttgatgaagaatccttatactcgctggtagataatatataggcttctttaacgtctgaaaataaactacttgctatcgtttacctacctttgcaacaaacacaaactcattattgatatatgaaacacaacattttatggggcattatcttgcttgtggcaagtttgtcatttacggcgaaggcgcaaaaggctgtccaaggccagttctcagtcaagggagtcttattagattctttgtctaatgaaggggaaccgtattctacaatccgtatttcattgaagaacaatcctgcaaagccggtgaaactggctgtgacaggagcggacggcaggtttgacgaacggcttgccgtgccggggacttatctcattcattttacttctgtaggaaagtctcctgtacagaaggagttctcgatatcggcaaatcgtaggaatgttgatttgggtaagattctgatagcagaagcgactgaaatgttgaaaggagtggaggtggtagcgcagaaacctttggtaaaggcggaaatagacaaagtgacgtatagtatagaggatgatccggattctaaaaccaatacgactcttgaaatgctccgtaaagttccgctggtgactgtagatggagaggataaaattcaagtaaacggtagcagtaagtttaaagtgcatgttaatggcaagccgaataacatgatgagcaataatcctaccgagatattgcggagtatgccggccaattccattaaatctatagaggttatcaccgagcctggggctaaatatgacgcggaaggggtggcgggcatcttgaatattatcactataggagctggaatggaaggatatacggtgacattgaatggtggtgcaagcaatatgcgtgtgtatggtggcggttatggtacggtgcagtcgggcaagttcactgttaccggtaattattcttataactaccagggatctcaaaagggatttgaagattcatatcgtgaggatttcacgtctcaggaaaataaatttttggagtcgcatcgaagaagcaagagctatggcaattttcaatttggcagtctggaaggaagttatgagattgacactttgaatctgattagtttttctatgaatctgatgactggcaattttacgaataagaggattggaaatacccagatgacgaatcatgccggtaatccggtttacggttacggttctttgggaaataatgaatcgggctttggcgaagtggggggcaacatggattatcagcattcgtttaaaaagaaaggggaacttcttactttctcttatcgttttagccattcccccaataacagtgaagcgaatacggattatgaggatacgttgaatgttccttatcttttgcaaaaccaatattttaaaaatgatgccagcacacaagagcatacggctcaattggactataccaatccgataaattcgatacacagcattgaaactggtataaagtatatttttcgtagaagtaaaagtgatggtaaatattatctggccgataaaaccggagaatataagtatgatcaggatatgagtacgcaatatgatcataagcaggatattctggctgcttatttgggctatcagctgaagtacaaaaaactcggtggaaaggcgggaattcgctatgagcatacatttatggatgcggattataaaaataaggatgagaagtttgatgctcagtttgatgatttggttccatccttgatgttctcttaccaattggctcctactcaaagtttgagggcatcttataatatgcgtatcagccggccgggtatttggtttttgaatccgtttactgacaccagcaaccctactgcgatcagttacggtaatcctgatttggaaagtgaaaaggcccattcgcttagtgttactttcggtagtttctcgcagaaatttaatgtaaatgtcagtgctaattattcttttgtcaataatggtatagagcaatactcttttataaaagatggtgtgatgaattctacctatgataatataggaaaaagtaagaatattaatttgtctttgttcttgaactggaatatgtctcctaaaacccgctttaatatcaatggacggggagcttatgtggattatagaagttcagggcttgatttaaagaatcatggctgggaaggaaatgtcttcggaagcttccagcagactctgccttgggatctgcgtctgagtctgaacggagggggtggtactccgcatatctctttgcaaggtaaaagttcctctttctattattatgcgatagggctcagtcgttctttcttgaaggaaaagaggctgactatatctcttaactcgtccaatttatttaataaatatattacttttaagaataacatcaatactcctactttctgctcttctactgctaccagaattccgatgcgttattatggatttaatatcagttggcgttttggggagttgaaggctcaggtaaaaaaagctgcgcgaagcattaataatgatgatttgaaaagtggaggaggtaatgctggaaccggtggagggataccggctaattaaaagttaaaacgaaaccacctgttaactgttaatttagggggtaaaaactgttatttgatagtttataccccctttgttgttagtttttctgtcgtgacttttgcgagaagtcgttaatattgcagcagaaagcaaaaacagaaaataacaatttaaaaatagattaatatgaagacagtcgactttacacagcatttactaagtatacaaaccgaattatttcgctttgcatttaaattgacagctgacagagaagaggctaatgatttgttgcaggaaacttcacttaaagctttggacaacgaagagaagtttactccagatacgaattttaaaggatggatgtacaccatcatgcgtaatatatttataaataattatcgtaaaacagtgcgtgatcagactttcgtcgatcagacagataacttgttccatttgaatcttccacaggactcaggattcgattctacagaaggtgcttatgatttgaaagagatacatcgtatcgtgaatgcgttgcctaaagattaccgtgtgccgtttgctatgtatgtatcaggatttaaatatagggaaattgccgaaaaactgggacttccgttgggaacagtgaaaagccgtatctttttcactcgtcagaggttgcagaatgatctgaaagatttccgttaagttgactctctatctttattatataactttgacttttatcatcacgccgactgttcgcgaagaatcgtcggcgtttctttttaggatttacgccatataagggggcgaagtaagtaatatcctattaaggcggctagtccgactccaatgctgtttgccagaaaatccagccagtcaccgctgcgggtatctgtgcaataagcttgcatcagttcgatacacccgctcatagctacaggagctatgatgcctccccatattacatgattccaattgatagccttatgattcctcaggtattctatccataaaatgaaacagagtcctccatacatgcatatatgcactattttgtctatgtaggggatttcttccacatctgttttaggaggagtgaaaaaggaaagataaaagatgatagctacaatgatcaaggataccggatattttctaaaataatatagcatactttaatttttttgtgattcgtcgcaaaagtacgattaattttatacttttgcaggctaaccagtgttgatttataataatttgatagttttttatgcaaaaaagcgaaagagtaaatttcggaagtaagattggggctgttctggcggcggcaggttcggctgtaggacttggtaatatatggaggtttccctatgaaacgggaaatcatggaggtgcggcatttatcttagtatacttggcgtgtgtttttatgttgggaatgcctattatgattgccgaattcacagtaggtcgtcattcaaaagcaagtacgggacgtgcttataaggttttggcacccggaactcattggaagtggttgggatatttgggggttttggccggttttcttattctaggatattattcggtagtggcaggatggactttggaatatatattggaagcgggaatgaatggttttgcagataagaagccggaagattttgtggttgctttccagagtttttcgaaggaccctgttcgtccgcttatctggctggtcatctttttattggccacccattttgttatagtaaagggagtgaaagatggaatagagaaatcttcgaaggtgctgatgcctgttttgtttatactgatagtagttttggtggggtgctcattgtcgcttcccaatgcggaaaaaggtttggagtttctgctgaagcctgatttcagtaaagtgaacggagatgttttcttaggggctatggggcaggcgttcttttccttgagtttgggaatgggatgtctttcaacctatgcttcttattttgggaaagaaaccaaactgggaaatacggctctgagtgtcggtgtgattgatacttttgtggctgtcttggccggattgattatttttccggcggccttttctgtaggtatccagccggatgcgggaccatcattaatttttattacattgcctaatgtttttcagcaagcttttagcggtgtgccgatattagcttatattttctcggtgatgttctatgtcttgttggctttggctgcattgacttctactatttctctacatgaagtggtgacggcttttctgcacgaggaattcaatttaactcgtggccgtgctgctagattggtcactttcgggtgcattataattggaatcatttcttccttgtcattgggagttatgcagaaatatacgctgtttgataagggattctttgacttacttgattttgtcactgcaaaaataatgcttcctttgggtggcttgctggtatgtatctttgtaggatggtatttgaaacgttccgtttcttatgaagaattgaccaatgggggaaaactgaaagcaggtcttttcaatttgtatatcttcttgttgagatacgtggcacctgtggctatcattttgatttttatcaatgaattagggctaatttagaattgtaatgtggaaagacttcttctatttttcgaaaagcgaacgcagagctatactttttttgttgactttgcttttcatatttatgtgtatatgggttctgtttccagtaaaggaagagtctttggaacaggatcaagaggggatagaagaaataaaaaactttctggccggagtacatgagatggaggagaaggaatctctgcgatattcctatgataagcctaaaagaagagaggtggtattggctgcttttgatccaaattcagccgattccatcgaatttttgcaacgtggattgcctccttttattgcacatactattttgcaataccggagagccggcggtaaattcaggacagcggatgatttctctcgtgtttatggcttgtcgtccgagaaatttaatatgttaaaaccttatatccagatatcagaggcttttcggcggaaacaggatacattgcactttatcaaaaaggcggagaaagatacgttggcggtttataaatatccggaaggaactttagtcgatttgaatgaagcggacactaccgagttgaaaaagattccgggaataggcagtggcattgcacgcatgattgtggcttaccggaaacgtttgggaggtttttatgatatggctcaattgaaggaagtgaactatgtagatgaggatatgttgagatggtttaaactcggaaatgcaccaattcatcggataaatgccaataaggccgggcttgacaaacttcgctctcatccttatatgaatttttatcaggcaaaggtaattatagaatataggaggaaaaagggaaaattaaaaagtctttcccagttatccttgtatgaggaattcactgagaaagacttggaacgtttgtcgcactatcttgcttttgattaattgttgggataaccagcagcttctgctatttttaccggaatttcggtattgtcaatgcgaccttggaatagttgggcgccggctccgatagcgaatacgggtacataacctccagagtgcccaccactggtccaacctaccagagcgatgtcatccagaattcttttggcctcagctgccaaaggttcgtcttgttgatattcacttttggttaaatctatctctttaccgctaaatgattcatcatatactttcttcagggatgcttcttgcttttcattcaattgaatactatcccaaaatccgaaattatccttcaatgattgcttgataacttcccaaggtacttgattcttgtatttttttcttaattcgtttacaattttagtatatccgctttcacttactttttgtgattttaaagcttgcaggttcaaagtatacggaccttttcctaaaacgattcctccggtttcgtggtcggctgttactacaatcagggtttcatcaggatgttgttcatagaattcgtaagcaacttttatggcattgtccatatccatcacttcgtggaatacggtagcggcgtcgttgctgtggcaagcccagtctattttacctccttcaaccatcaggaagaacccttttgatagatctttagacaggaaattgattccggcacgggtgatttcagttaaagtcatatcgcctttttttcgatcgatagcataggggatagcactattgtctgttgctgttgcaggttgtaagagaatcagtttgtccgatttttttgcttttttctgatagtccttgtagccacgggctatggtatatccggctttgtccaccagtgtgtacagactttctgaatttgaaccggcggcttttttgttggtgggatctaaaaagtctgatcctgcatagaaatcgaagttggcatcaatcaaatccagacccacgttgtaatagctgcttctttgtccttggtgtgcgtaaaaagcagccggtgtggcatggtctacgctgacactggtactgatacctacacggcaacctttattttttgcccaagaagcaacactgttaactttggtttccagatcctttttcacacctaatgcgccattttttgttttgtttcccgtagcaagtgctgttcctgcagcggccgaatctgtcactccgttggttgccgagaaagtagtggctatggttgcataaggaaattgggtgaataataacggagtcacaccaattttgccttccaactctccacgatacatctctgttcctaaaacttggttaacacccattccatctccgatgaaataaaatacatactttgcttgctgtgcctgtacaaaaagaatggacaggaatacaaatacaataataaacgatagttttttcatattaattgagttaatgacatttttttcagcctagcaaatatagggaaaaaagactttttatcggtacttctttcttgaataattgagatttaatggccaaatactttttttgcaataagtttgtaaatgaaatgtttttggggtgtaatataaaaaatctgtttgggagtagggaatcccgtgctttatactatgcatctgtttgctttcgacatggatattgcatacagataattgctttaatattagtgattattaattataaatcttatatttgtctaatctagagtcagtaaataaagtatgggagaatttataaatgtattagtgtcaaaagggaaaagcaatttgataccggaaaaagataacctgtatggacagtttgtcggtgaatgggattttgaatgggttgataaccaaggtacaacaggcgaaagacatgttcagggagagtggatattcgcttgggtgctggaagggactgcaattcaagatgtgtttatttgcccttcgcgtaaggcacggattaaagattatcaaccggatgcagcttatgcgactgcggtacgtatgtataatcctaatacagaggcatgggatattttatatacggaattaggaggggctacacaactggaaggaaaaagagaaggaaacaggattgttcagacggaaattaatgagaagaatatacagtgggtgttttcagaaattacaacgacttcattccgttggcaacgtatggtaaaacgtccggatggtacttgggaaactgaagctgaactttttgccgttcgtcgatgattaagatgtatattatataagtttgagaatattgcagcctaaaatagacttgttgtagtagaagcttagaggtgatttgacgagtttataaagaaagaatgtgtgaatgataaacaacttcagaaccgctttcttgcatttagcggagaaaatgtattcaaactaaatcctgctagctatacgcaggaaaagatgtgggcaggtatatggaatctttgcgtaagaatctttctgcttatactcttgatgatgctcccgaagatgttcgggaactctataaagatgaattcatccagctttatgcttcaagtataaagtgtttttttagggacattcattaaatattacaaaatcagcca

SEQ ID NO: 4026 - DNA, 32913 bp, Unknown
  gut microbiota DNA sequence
ggggacctcatgattatgaatcatgcgctctaaccagctgagctatcccgccatcatttctcaattgcgggtgcaaagatagaaagttattttgaactttgcaacatttcagagaactttttcttgtaaaattcgtttttaaagagaaaaacagcttagtatatggcaaataaatatttcaaaaaacatagcatttattatggcaaataagaaaatttggcttaatttgccaccgaaactttaaaaagctaacctatgagaaaagaaaaaattcgcttggagtacatgttgaaagccggatccggtaacatcgtatggtctattatcagtactccatccggcctggaaacatggtttgcagacaaggtgacattcaaagacaaagtattcaccttttattggggaaaaacagaaacacggcaagctgaagttacaaacttccgggttaacagttttatacgctttcgatggctggatgatgaagatcctaaagcctattttgaattgaaaatggtctataacgaactaacctctgactatatgctggaagtgattgactgggcagcccccgatgaagtagaagatacgaaagaactttgggattccgaaatagagaagctaaaaagggtaagtggactgtaattctataaaaatatgcaaaacttgtctttgctctccgttttttatgctatttttgtgccttgatagttgcacaaaatgaaataatgctacgcataaaaaaattagatatatttatcctaaagagctttttgatgctctttataggtacttttttcatctgtctcttcatcttcatgatgcaatttttatggagatatgtagacgagttggttggaaaaggattggaaatgagtgttttagcacaattcttcttttattctgctctgaccttaatacctttgtccctacctttggcaattttattagctgccttaatgacattcggtaactttggtgaaagatatgaattgctgtcaatgaaagcagcgggtattcccttattgaggatcatacgtccactgattattttttgtactttcctgtgttgtacctcgttttattttcaaaatgtcatagctcccaaagcgcagatcaaactgcttactttacttgtatccatgaagcaaacttcaccagaactggatattccggaaggtgcattttacgacgaaattgaggggtataatatatatgtaaaacagaaagaccgtgaaacaggaatgctaaaagatgtactgatctacaacttttcagatgggtttgaaaacgctcacattatatgggcttccgaaggaaaaatggagatgacagcagacaaacaacatctttatctacatctgtataacggagaacagttcgaaaatctgaaatcgcagaccatttcatccaataatgtcccctatcgacgtgaaaccttcagagagaaacataccattatcgaatttgacggtggattcaatatggtagatggaagctttttaagtgaccgttcggacagcaaaaacatgattgaaatcagccagtccatcgactcactgaaccaccgtgccgacagcttgggaagaagtatgtataatgaaataaaagcctcgacttatcgcaatatcgtattatcgaaaacagactccgcaaaaatagttgaaacaaacaacaaaatcaatgtggacagcctgttcaattcctatactttagctgaaaaagataagacactgggtagtgcggcggatcgtaccgaggcactggccagcgaatggagcatgaaaagctatcaaactacagatgcggacaacaatatccggaaacacgaagccgactggcacaaaaaaatcaccctctctctcagttgtttgattttctttttcatcggtgcgcctttgggagccatcatccgcaaaggaggtttaggaatgcccgtagtggtatccgtcttaattttcgtaatttattatatcattgattccggagctacccgagtagcaaaaagcggtgaaatgaatatggtattgggcgtgtggatgagtaccattgtattggcacctatcggagccttctttacttataagtcaaataatgactctgtggtattcaatgccgaagtatacatcaatttcttccgtatgctgctaggtctgcgcccctcgcgccatgtattcaaaaaagaagttattatagaagatccggactatccacgtatacaaacggaattggagaaactatgcaacatctgtaacgaatatgccatcaagcatagactggccgatgcacctaattatatccgcatcttcaccaataaaggacatgacgacgtcatagccgatatcagtgccaaaatggaactactcatagaagaattatccaacagcaaagatggagtattactggaatacttaaataaatatcccattttgtccaccaaagctcacaaaagtccgtttgacaaccaatggcttaatttacttgcaggaatcattgtaccaataggcctgttcttctatttccgcatttggcggttcagtatccggctggataaagatttaaaaaacataatcaagaccaaccgtgaaattcaagaaagaataaacaataaatcatttataatttgactatggaagaattaaaactaaataccatcgaagaagcgatagctgacttccgtgaaggtaagtttgtcattgtagtggacgacgaagatcgtgaaaatgaaggcgatttaattgttgctgcggaaaaaattactcccgaacaagtcaatttcatgttgaaacatgcacgtggcgtgctttgtgcacctattaccatttctcgttgcaaagaattggaattacctcatcaagtagatacaaacacgtcagttctaggtactcctttcactgtaactgtagataagctggaaggttgcagtaccggagtttctatccacgaccgggccgctaccatccgtgctcttgccgatcccacctccactcccgaaacattcggacgtccggggcatgtcaatccattatatgcacaagacaaaggggtgctgagacgtgcaggccatacagaagcctgtatcgacatggcgcgtctggcaggactataccctgccgccgcactgatggaaatcatgagtgaggacggaaccatggcacgtctgcccgaactaagaaaaatggccgatgaatgggggctgaaactaatttcaatccgtgacttgatcgcctatcgtctgaagcaagagtcattagtagaaaaaggggtggaagtggacatgccgactgaatacggccatttccgtctgatacctttccgccagaaaagcaatggtttagaacatatcgctattataaaaggtgacataaaagaaggagaacccgttttggtacgtgtacattcttcttgcgccaccggtgatattttcggatccatgcgttgtgactgtggagaacaactgcacaaagcattgcaaatgatcgaaaaagaaggaaaaggtgctgttgtttacttaaaccaagaaggaagaggcataggactaatggaaaagatgaaagcctacaaattgcaagaaaatggtgtggatactgtagaagcaaatatccttttagggcatcaggcagatgaacgtgattacggagtcggagcacagatactacgcagtataggcgtcacccaaatgcgtttgctgacaaataatcctgtcaaacgtgtaggattggaatcatacggtttgtccatagttgaaaacgttcccattgaaatcacgcctaacaaatataacgagcgttatttaaaaaccaaaaaagacagaatgggacacacattgcactttaacaaataaaaaagctataactcagacgaaatcacatcattttttatgcgatttcgtctgttttactttcataattaagatattatcctttattttgcagcaagtaaacttaaacacattaaaaaataatagcaatgaatcaattatcagatcgtctgaatcgtttgtctccttcagcaacattggccatgtcccaaaaaagtaatgagttaaaagcccaaggagttgatgtcattaatttaagcgtaggtgaaccggacttcaataccccggaccacatcaaagaagcagcaaaaaaggcagtagatgataacttttccagatattctccagttccgggatatcctgtacttcgcaatgcaatcgtagccaaactgaagaatgaaaacggattagactatacagctgcacaaatctcctgtgcaaacggtgccaagcaatctgtttgtaatacgattatggctctagttaacgacggtgacgaagtaatagttcctgctccctattgggtaagctatcctgaaatggtaaaactagcagacggaactcctgttattatcactgcgggtattgatcaggatttcaaaatcacccctgcacaactagaagcagcgatcactcctaaaaccaaagcattgattctttgctcaccgtcaaatcccaccggttccgtttataccaaagaagagttggccggcttggccgctgttttggcaaagcacccgcaagtatatgttatagccgatgagatttacgaacatatcacatacagtggcaaacatgaaagcattgcccagttccctgagattcatgacaatgtaattattgtaaacggagtttcaaaagcatatgctatgacaggatggagaatcgggttcattgccggtccggaatggattgtaaaagctgtaaataagctgcaaggacaatatacctcaggtccgtgctctgtttctcagaaagctgccgaagctgcctatacaggtactcaggctcccgtagaggaaatgcgccaagcattccagcgccgccgtgaccttattgtaaaattagcaaaagaaattccaggatttgaagtaaacaatcctcaaggagcattctatttattcccgaaatgtgattccttttttggcaaatcagcaggtgaccgcaacatcaataacgctgacgatttagcaatgtatctgcttgaagtaggtcatgtggcatgtgtaggtggtacttcattcggttcccccgaatgcatccgtatgagttatgcaacttccgatgagaatattatagaagctatgcgccgcatcaaagaagcattagccctattaaaataaaatattctttctctataaaaagaacaggcatccgtttttttctgtgatgcctgtttttttattcataaagcagacatacgagcttccaatcaaaacaaaatttagataaacaaaaaaacgaccgtttccatcaacggaaacgatcgttattaactttaaagaacaaaattgtactgcttagccaaggtgaatagcttcagaaggacaagcatcagcacaagttccgcactctgtacacagatccggattgatagaatacttatcaccttcagaaattgcttctaccgggcattcatcgatacaagtaccgcaagcgatacaatcgtcactaattacgtaagccattttcgttaattattaaattattagtactaattgatggaacaaatatacagcttttctctattagttgtcacatagagattacaaaaatgcactaatttgtatttaatctaaatatgatcatttcatcaaagcctgatacataacctgttgcatacgaggacggatatttaaccgcatcaactgtttatggtcaaaaggacgcggataaatccgattactcagaaaaacaaaaaccaaatgatttttcggatctgcccaagcgcaagttccggtaaaaccagtatgtcctaccacctcttcgggcgcttcctccgcacacggacttttcacactattattcacatccggtttgtcaaatcccaatcctctcctactgatttttgaggtatgggttaaaaataaatcacaagtttccctactcagataacgcttttcattataaactcctccatcaatcaataactgatacacttttgccacatcacgagccgtggaaaataaaccggcatttcctgatacccctcccatgaaagcagctgattcatcgtgtacataaccctgcaacacttttcctttacgcaaataatccgctttcactgtaggaacaatttcctcctttttgaactgccgaagcggcaaataagccgtacggttcatctccatcggtttatagaattccttatctaaaaaaagattcataggcattttactgatattctctaccatttccttcaataacataaagttcaggcaactgtaacgatatctcctgtcttttaatggaatacgtcctatttgtaccataatggaatcacgaaaagaacgatgaagaaacatactgtcagctacttgtaaaggataatcagcagagaaagtttttgccatcaactcttttctataatcaaacttatcaatgacatacagccgtgtatctatttgcgtatgatgactagcgtccggtcttgctctgtaaaaactccccttataactgtctttatctatagtctccttataaaaaggccaaaaagcaggaatgcccgactgatgtaaaagtaactcctcaatagtgacacgttccttgtccgtaccttttaaagctggaatgtattgagatatgcgatcggtcaaaccaaattttccttcatcgtaaagtttcataacagccaacagcgtcgccgtggtcttggttaacgaagccaaatcatacaaatcatccttttccacctttcggtcactttcataagtgaaagtgccgaaagacttatcatatactggtttcccatcttttaaaattagaatctgacaaccaggataagccttcgccttgattccttccatggctatcctgtctatcttttccagtattttggaatccataccataatcctcaggtctataaatacgagacactttaggagttatagtcactccatcacccggtttgaacaaatcggcgacagccaccgacaaacgcccgtctgccactgcctttcctaccaagacatcagccacatactcctgaataacagattcatcagtatgccccaatactacagccgctgctttcttccaatagccctccatatccaacatagactttaatggcatcagaaacacataaataacaggcaaatcagccggaagcgaatcaagcattgttttatactttttgtaatcatccgaagtaaccaccacaattacacgctgactacccaacaatcgttttctgatagcttccatcgaatccggacgagcaacaacacgtgtgagagaaagtgtattttgcaaacgattataaaaagcaagcccagcaccgggagttttcccaatattcagaaccaccgttcccctcaattttgaatccaagggcaagattccatttacattggcaggaaccgttatagcagctttctgcaagcggagaatcaactccttcgtttccggacggttcaatcgtttctccagcccggaaagttggatgtgaggtttattcttcaaccctaaaacatatttataagtcaataccttacgacatttttccgtaatcagttcttctgatagttttccactttttacagcatttaaaacaccatccaattctctcttcaaattacggggagccaataataaatcattacctgctatcaaggcttgagcgcatatattctcattttgcgaaatacctttcatctccaaagcatctgtaaaagccaagccttgaaagcccaattcccgacaaagcagattataaataatatgtgaagaaatcgaagccggatttttacccaattcaggtacctccaaatgtcctaccatcatacctcccaatcctgctttaacagcctctttaaacggaaaaagctcaatgctgtccaaacgcgcacgatcaaaattcaaaaccggtaacgccttatgagaatccacttccgtatctccatgtcccggaaaatgtttacagacagacaatacccctccatcctccaaaccacgagcataagctaccactttttgagccacattccgaggatcaccaccaaaagaacgggtattaataaccggattccgaggattaacatctacatcggccaccggagcaaaattgatctgcacacctatctccttacattgccgggctacttccttaccatattcataaagcagttcattatcctgtatacatcccaagactctgtttcttggaaaacgaggggttcccttcaagcgcatagccagcccccattcaccatcaaaagttatgagcaaaggcacttccgccagactctgcgcataattagtcaataaaacctgatcagacaactgaccgcccgaaaaaagtaatcctcctactttatattcttttatagctgcatatatattgtttttatttcgttgtgtctgaagaggagccactgtgtgtataaacagttgtcctatcttttccttcaaactcatttcagaaagctgttcatccacccatgccttacaatcctgagtatccgccttccccttttgtaacagcccaggcatctgctgtgcatacgtcatcacacatccgacgacacataaacttataaataacaatacgtttctcttcatctaatttcttcaattatatcagatttccttatacaacagcaactatcagttcttttccatccttactttcatttttcccacataaacagcattttttcccatttgttgcaatggaatctccttgccatccaaattcttataaaacaaagtcttatcaaaataagaatgcgaatgacctcccaagacaatatcaatattacgagtattaagaatcaaagtttcatcagaataaggttttccttgccaccctaaatgagacaaacaaaccactaaatcacatttttcccgattcttcaatatatccgccacacgctgagcagcctctattggattttcaaaaaccactccttcacagttttttgcctgtactagcccctccaatgcaggactcagtccgaacacacctacctttatccccttacgttccaaaataacatacggtttgacaagcccctccaaaacagttccctgtacaccataattagcacaaacaacaggaaaatccgccattttaaaaagacgtgccatattatccaatcccaaatcaaactcatgatttccaataatcccggcatcatatcccatttcattcatcagcttcacttcaacttcaccaccaaacatattataaaaaggagagccttgtgaaaagtcaccacaatcaaacaataacaaatccttatcctgtttccgcatttctttgattaaggtaacacgacgtacaaaacccgcttttcctgcaaactccggattcgggtcagtaatggggataggttccacacggctgtgggtatcattagtatgaagtatcaaaagttctttgatatcctgtgctgccagcgcacaacatacacacaaagcagtaaataatacatatattcgtttcatgacggttctgtttattctttaacggtaattcttccttctatctttgagtctattttcttccctgctttagtctgctcattcacatagttcagaaacaactgacgcacagtggccttttcaggcagcaatttatccgcatcgcccactttggcaaaagcagtcatatggtcatttccctcagccaaataatccaaggtggccactttatactctttggagtcttcaatttcttttccggccactgtagcatccaataattttccatctccagaaatttcaagacaagcgccacttaatccctcaccatgcacagctgctatattttcaaaaagttcgcgcagcaaagaaccattcatagtaacaatgcacaatgtattttcaaagggagttatttcataaatattaccataagttatatccccctcgggcaaagccgtacgtagtccgcccatattcgtcactcccacgtcggccatgcgacctatatatgcagaagcagaataacgtaaaatatccgctaccaagttggataactcactttcaggacgaaagcgatccataaaacgagcgctttgtcctatgaccggtgacataatactatcaaccgttttttgatacggagccaaaacagcgattgcagcggaatccggattagcatccaaagctgctgtcacttctatcctgcttccctcaactgacgccagagaatagcctgaatgacagcttgaaaacataaaaatcccggctactattcctgccggaatgatacacataattcggtttggtttcatgtttattagttgtttattgcccaaatgtagttaaaaaagaagttgcaaccaacgatatcagatgaaaaatagttgaatttaatttggctgtatgacaaaaatctagtaattttgcaccgctttcgcgcaatcgctgtcaaagaagagttacttgatatgttgcgttggtaacgataaacaatttaaaatcaaaaaaaatggatttaattaaaattgctgaagaagcatttgctactggcaaacagcatccttcattcaaagctggtgatactattacagtggcataccgtatcgttgaaggtagcaaggaacgtgtacagttgtaccgtggtgttgttatcaaaatcgctggacatggtgacaaaaaacgtttcaccgttcgtaaaatgtctggaactgtaggtgttgaacgtattttccctatcgaatctccggctatcgacagtatcactgttaataaagttggtaaagttcgtcgtgctaaattgtactatttacgtgctcttactggcaagaaagctagaattcaggaaaaaagagttaatcagtaagatttatcattcctacataaaaaaggagtattctcttcccgagaatactccttttttaatttacatcccctttaccacgattttttatataatcatgaacaaacagacttgaaatagcatttatatttaatattgaatcaaacttaaaccatttatgaaaagaataatgttcattttaggagtaagcatcattatggccttacttactgttaccgcagccttggcaggttggtggctcggagcgtctctgcctctagatatatctgataccactcgacaaatagcagcattactcaccgcttctgcttgtacatggatactctatattgtaagtcgcaaagtactgacaaaaatcagtctcaaaccatactaaatatatagtccattaaaacaaaaaggtcaaccgattctatatcattctcgattgaccttcttatttaaaatcttgttttcatcattccttattttctgtttcctgtatcccggactcttcctttccacgtaaataaacagaaggtgccacaccgaattgttgcttaaaacatttactaaaatagaacggatcattaatacctactttataagaaacttcggctaccgtataacgattttccaacaacagttccgccgctttcttcatacgaataatccggatatattcattgggtgaatatcccgtcaccccacgtaccttacgataaaaaacggttcgtcccaatcccatcatcgaagcaaactcatcaatcgtaaactgagcattaccaatctgttgatccataaccatctgtaatctgtcagcaaattctttatccttatcagaggtacaaatagccggtcgtaccatattcggatcattcgaaaatttctcacgtaatttctcacgttgctctattagtttgaaagcgcgtgccaacagtagtttcgggctaaaaggcttagtaatatatgcatccgcaccactttccacgccttccaaatgactttcggcagaactcatagctgtcaataaaataataggtatatgacttgtatcaaaatcattcttcaattttcgggttacctcaaatcctgtcatccccggcatcagcacatcacagattatcaaatcagcatcatacgtacgtgcacgttccaatccagacggaccatccgcctcggccacaacttcaaaatattgtcccacttcttctttcaaaaactcacgtacatcgttatcatcttctataataagtactttacgcttattaagtggtgcagatgaaagttccacgcccccttcttgcgccgatatttcttctgcaagaacagctgcatgatgtacttcctcctcttccaacaacacattatggggaatcagaaaatctttttcctcataaacagaaatatcagtaggcaaactgaccgtaaatatagacccaccaccttcattttcagtatatactatcgtacctttatgtacacacaccagttcatgtgtcaaatgcaggccgactccgacactactacccgaaaagctactttgcataaaacgcttaaataactcattacgtttctctttaggaatgcctacaccggaatcggctaccgatatgaccaactgtttctttgtttcatccaccgtcacggaaaaagtcacttttccaccgctgggtgtatatttgaaagcattagacaacaaattataagtcactttgtccaaataacccttatcgataaacatcttataagaagctacagatggcaagaacttgaaatccatattcttagactcagcagcatcattgaaactcaagaagatttcatacaagaaagccatgacatccgtttcctccaaagaaagggccagtttattattctgcatcttacggaattccagcaactgattgataagacgcaacatacgctgagtgcttttatccatgaccttcaatgaataagccatttctttagggattttaccaccacgctgcatcttttccaatgctccttgtatcaaagtcaagggagtacggaactcatgagagatattcgtgaaaaaaactaatttatactctgtcagctgtttctccacctgtatacgattacgcaaagtattaaagtcacgcatcagtctgaaagtgatatatagtgccacccctatcaaaatagcataaataaagaaagcccaagtagttttccaaaaaggaggaacaacaataatcttcaaaaccgtttctttatctccccacacaccaactccattgcaagctttcacccgcaatttataagtaccgggtgccaggttcttataagctgcaaaattcaacgaagacggtatactccactctttatcataattatccaaccgatacgtatatttagtactattcgttccggaataatcaaatgtagagaaatctatgacaaaagaattttgaaaatatttcaactcgatttcatctgtataaatcaacgaacggtctaacggagaatccacatcgcccgggcgcatggcaataccattaattcgaagattggtaaaagctgccataggagttacagtggaattattcacaattttgccgggagtgataacaaccaatccataattagaaccaaacatcagtttgccatccttactcacacaaccactgttctcactatagacattccccaacgcatatgccgagaaaaagaaattttcaaaggcatgtgtatccggatcaaaacgagaaataccatattccgttgcaacccaaagcttaccctccctgtcttcaacaatagattgcaccatactatttaccaacccgtcacttccatcataatgctcaaaagtcaagtttctgtaatcaccttctggcatacacatactgaagccttttcctgaagtacctacccatatccggcctttactatcttgatggatacattttatttcattactacgtaacttaccgttattataattataagtaatatagttatccgggtcattcattaacgaatcaggattaaatatgtaaactccggcactggtgcccacccatatccatccattattgtcttcctgtatcacacgaatctggcgctggctataaaaattgttcaaaaaccgcttgaatacatacttatccttttccttcaccgccaaattcaatccaccgccaaaagtacctatccacattctattcttccggtcccggtaaagagtaaaaatattattattcccaatagacagaggatcatccgagtgataagtgtaccattttccgtcaatactcaatccgtttccacggctacccaaccaaatactaccatcagccccttcctcaacagcataaatgttagaatcaaaataacgactgctctctatcgttttcaaatgagggtcataaatatacaatcctccacgacgggtccccagccaaatcttatcatcaggcatacggttgatcatacgcacggtatttgaacggtctgataaagtttcatcttcaggaaaaacacgctcagctccttcattcaagaccgaaagacgagaaatacccgtatattccgaactgacccaaataccaccggctcgatcctccataatatattgcaagaaatttgaagtgatatgactgaatccattaatattggattcgaaatgctgcaattcatcagtagccaaatcataagcaaacaaaccgttaccataagtggaaatccaaacaatatcacgagaatcatgaacgatgtggtaacgttcctcatctatataatttactttatcagccggaatcagttggaaagacttgacaaatctggtcttggcgttgacataccataccttacctgtatgattataaatccagaaattcccccggttgtcaatctgaacttgtcctcttgctatattcagttccgtatcccggctcacctgatgagttctcaaattaaagacataactgccatcttccgtaaaaacgatccaatcgttttgcaaacgcatggtactatatactttactaccttcacctaaacgggtaacaatacggctatcctctccttctctcttcaacgaaattgttcctgttcccgaaagaaaaaaaacatctttaccaaaagacatcatcttgaaggcatcatgattttcttccaccaatactgccttgtcccctaccacttgagctataccgtcatggctaccaatccatattcttccttgctcatcctcagatatataagtaatattattagaagggagattattattttctttcttgaaaaccacagatgtaaattcaccattcatataagtcactttacgacacccgtttccatcctgccacaaccagacattaccttcacggtcagtcatcttgtaactatacagttgctcatattccccacaaccggtaaaatcaacaaaacaatctttcttcagatcataacaactaaacaactcggcagaagtcgcaatccataagaaaccatttttatcttcttccaaatcgcgaatccgatggtctatcaacgaaattttatttccaccctcaggacgataagtcacaaacgaattcccgtcataacgactaagtccattcagcgttcccatccaaataaaacctttgctatcctgatatatataccgaattgagttattggcgaccccatctcccgtagtcatatgagtagaacgcacctcgactgatgcggcaatactctgactgaaaagaataaagaatgcccatagagcatagatgtgttttttcatatcatttatcacagtgtttttgtcttgcaaaggtataaaaaaagagtgtatcagaatgaatcgatacactcttttttattttaatccatatggaagacctcaggcagcggaatagtaaccggagagttatccggattcacttccatgatatccgccatatagtcccaccatttctgcacgataggattggctcccatatcttgcgaagactcctctcctttagttttctgacaagcaaacagaatatttgtatccttgtcccaataaatggagtaatcatatactcctccatcggacaacattttttttaattccggccaaatggctgcatgtctcttctcatactctttctcgaagcccggcttcaagaacattttaaaagcttcacgtttcatggtattttcctcctttttataaagtccttgtttttacttatttagtttctccatccattacatggaaaattggttcggaagtcttttgttccgtacggtaatattgcacggcactatcattcattttaggatgctgcttgttcagcaaattaatcatctcagcacccgcccaaagtaccggtccatagccgtgggcagcatacacattgaccggacgataataataaaaagccggatcaaaagccatacctgtacctacacaagttccgtccacctgaccttccgcattgatttgggtggtaacggcatgccatcccaactgtgccaccggaccgtatgccatagcgtcaatccatcctttattgatagcatgggcaaagcaatatacataaatagccgtggccgaggtttccagataagaatcgttacgatccagcaactgatgccagaaaccttcaccactctggcaggcagcaagaccacgtacatgagcacggaacagctccagtattttatcgcgctgaggataatcctccggcaacacatccaagacctcacacatagtcaacaacgcccaaccattggcacgtccccaatggaaagcaggatgatcctgcataccttccacccatccatgacggaaaaggtttttcccgggtacccacatacggtccgcaaattgaaatatctgacgtacagcttcgctcaaatacatttgctttttatcaccggcaatacatgaataccaagctaccggcggaatacccataaacatatcgtccaaccacagcgtattatgttgtggacgggtacgggcaaatgttccatcagcaagacgatactccttattcacaataaaatccatataattatcaatcaacggcttaagttccggtgaattttccttcatctgcaccttgaccatagccgcacacaccgccccggcatcatccaatgcatgaggagtcagaatttgtttcatctgcggatctacagttccatacttttccaataccttacggaagtgcggagcaacctcggccagaaactgaaaacgatctgttacatatttataataagcctgatcccccgtagcctcagcagcagccaacatagctgaataagtcaccccccattcataacttgccagacggaaagcacctcgttccagctgtgcatcagccgtcatattggcataatccgtaataaccttacctgtattcttatcaacgacacgagtcggagtattcttttccaaataacgaaggacacgatccatatcggcctttatctcctctgtagtgagcataccgtaaggcactttgtatgcaggttgcaacaaatgtaacggcgtattcgaatcattcagtacttctttcttcttttgcgcattcgcacccgttccagccagcagcaacagagcgcccatcatgcttaatgttttcagattcatggtatatagtctttattcatttttaaattcataacctctaaatatcccctctttcaaatccggtccgaaataaaaaccaggctgggtaggctggttgtatgccacattttgagtagcgatactgatacgatacaccggatcttccaagaaagtatgaaaacggtattcagtcggtatccgcgacacatacagacgaagtgccgaattatcttccgtacggagcagcacctcctcacgccaatcacctattatatctccctgcaaacaaggatgggacttcgtaccattatttgaatccgttccatcaaatatcattaacggacgacatacatcgtcttcccaatcatacttggttatcctgtttttatccagcaactcacgaagcaaatctccatcccaccatacagccatattaactgaaaagctcttgaggtcaggacgaatcacttcaccttttatattacgtactccttttgaatcggatgaccacatctccactcccggattgcgcggatcaacatcagcagccatacaccggcctacatctatactacttttcacctgaaacagcacttcacccgtagccgcattacggaaagtggaaccatctttcttattttcatgacaatcccaaacctgcaagccttttaatccgggagcaaattgtgtcagatgcatagcgtctccatgccccatacgggtagaatacaatccttttccatcatgatcaatggcacaagaaccatacattatttcatcacatccgtcaccgtccacatcgcctacacgaagattatggttaccctgcccggcatagtcttcacaccccggattattgctgtcgaacacccaatgttgtttcaagttcttgccatcccagtcgaatgccgccagcacagtgcgggtataatatccacggcacatcaccacactgggatgtaccccatccagataagctacacaagcaagaaaacggtcactgcggttggcacggttgtctccccagtcggtcagcttaccacgagccggaacataatcaattgttttcatcgcttctcctgtcagtccgttgaatacggtcaagtattcgttaccagtcaggatacgtccttggttacgaggtgtatttccgtgggaatttccgtctgtgatacccggttcacggtaatcagccttggcatcacctattatctttccttttccatcctttgttccatcagaagtcttcatgactacttctgctttaccatctccatccaaatcaaacaccataaactgggtatagtgtgctccggcgcggacattatgccccaagtcaatacgccatagtttttctccggtcaggcgataacagtcaaaataaacatttcctgtataaccgtcatgtgcattatcatgtgcattggaggggtcccacttcaagataatttcatattcaccgtcgccgtccacatcacctatagatgcgtcattaggactataggtgtatttttgtcccgaaggagtcacaccttccgccggtctgtccagaggaatatcgatataacctgacggagcattagccggcaaagtataatttccattcaacttacctgtttcaaccccatttatcaccggttttacagtatataccgctttttcattacctgagtaagtatcccggtaaaaagtacctgtagaatgggggacttccgctattttctctccatttctatatacattgaaagaagtattgatcggatcggaagacaggtaacgccacgacaccactacgtccgatggattttcacgaatggccacaacgccacgccccaactgctctttttgcagtttggaataattgtaggccggttgggcaaccgtaccggttgccacacacagagctgctaaagcactccatagttttttttgtgttttcattgtttatcttgtttctccttgtaaattatattttcctccaccacattctccgcatttaccacattcttcacaaactttgtcacttcccccacagtcacattccttatttccacgtttttgataggaaggcgggcatcgcctttcaaatcataaacagcctcggtacggtcgcaagtcacactatccatataaagtccgttgatgaatgtaatgctatcctgataggtaggtaccaaatcacgccactggtaaagcacatccgtatccacttcgagtacacgttgcatctttcccgccttcacatttttcatccagatattttcaataaatccaccacggcgatgattggttttagcaaagaaaagacggaatacagaatcgggagccgtacaattgtgcatgtacacattccgtacaccaccagacatttcactaccgattcccagtaacgtatgtcctttcaatatatcacaatggcgtatcacaatattctcacaaggagtattcagacgccatgcatcctggttacgccctgcctttataaccacagcatcatccccctgatcgaacacacagttctctatcaggaagttacggctcatttccaagtcaattccatcattattatggccatgagcctttacatccagattacgtacgataccaccatcacacatataaagatgtatcgtccaaaaaggactctggcgaatcttgaattcatccagcagcacatttttacaccggttgaaatgaatcagatgaggacgaagatggttttctccttttgccatctgacgctgttctacaggtacatcggtagaagccatcgtatataactctttcaaagcatccatgtgaggtttaggacgtttgaaccagattttccaagtatccatgataggagccagtgtcccttttccggtaatagcaatattctcacaatccatagcatacagcaacggagaatagttataacattccataccttcccatgaagtcatcacagcaggcagataatcagagggattatctgtaaagcgtaatatggcattttcttccaaatgaagatttacattacttttaaaatgaacaggtcctgtcagccattccccttcaggaataaccacacggcctcctccggccttattacaagctgctatggctttggcgatggcctccgtattcactgtttccccacctttcaccgcgccataatccacaatggaaaaatcttgttcgggaaaaacacattctttgatgggttccatagcaaaaggagcatcgacaaccaccgttttatactttggagccggtgccgtacatgatacggcaaaagctacggccgcaataccagccaaggatttaaaaaaagtcttcttcattttatcagttatttttcattgtaatttccgtatgcacaaatatcctgaatatcttcgttcagcctattttatccgaggtgtataaaggtatatctgatccaataccacaccttcatccaatgcagtaaaaattaaacgatgggaagctttccgtgcaacaggaagaaccatccggcggacagcctgattacacaaaacattctccttccattcttcactgcgtcctttggtttcatacgaaacagcctccgtggcacttccatccaatgaaatggtaaaacgcaaccgttctccttccaccggatgattaggcaacaatcgtacttccacctctacagaatccgtttcccatgcagtaaattcaaaagtcagttctttattctttgacacggctaccgccttcccttcatagcctagcccctcgcaaattgccgataccccttcagcgcaatcagcgccattccatgtatagacagcctgacgtttttcaggcaacccggacgatagtgcctttctttccacccggttgaaaaccggaagtctgcgtggttggaaatccatcatacggttccattttgttgtgttatagcgttttgtcaatgaaactatactgtcatatgccctgtcactatccgcccaatcagcttttccacgacgcgccaactgggctgtcagcagtttgttattcatctgagcagccgcctggacaggatacttcaccaactgaaaataagtttcttttttctgtgcaggaagcgcacgccattcctgctccaccttatctgacaattgtctatatgctgccagacgttcattgatttcctgttcactccaaggcaaatcactgatcactttaaacttaggatccttctcttccgtgcgggtattccccataaattccggcttacggatataagccaaacgataagcttcctgcatgacgggctgtaaccggtcagccctattttttccaaactcacgctccaggaaatgacgctgatgagcaacgactccctgccgcttcaccgcttccaggttccatgccatatccagaaaaagttctacctgatattcagccggtttaatatctccgacattcaatatccacattttctgtataccccgttcgtatgccagggacatttgctggtataccaaggaaggatggacagtccccaaccaaagataatcatgcggacgcccccaataggatacatgataatacactccgtttcctcccttacgggcacgctctgccgctgtagggaaatgacggatataaccataattatcatcacaccacatcagcgtcacttcatcggacacttgcagcccggcatggtacacatccaacacttccttataaggaataaagacttgaggtacttgagtcacatccttatttacatatttagtcaacaaatcgcgctgatcccttagcactttagtcagaacggctttttgttcttctatggtcttagcaccattcatcgcaccgtcgtgcacgccacgcatacctaaagtatacagattatccaaccctgcaacctcctttacgcgttgttcccaaaaggacaagacatgagcactgttgtgaacatagtcatactctcccactccatcccgtttccactcaccattggtattccgcatcatcggttcacaatgagaagttccaatgaaaataccaaacttatcagccacttctttgttgcccagtgtaaaataaaaaggtacagaacagccatgcatagccggccagaaggtattggcacgcagacgaagcaataactcaaaaatccgctcatgtgttttcggaccgatttgtcctttcacatcacttggctcgtatgtctgccagctccaaggggtaagcccccagtcctcatcgttgataaaaatcccccgatattctacggaaggagactgcatattccgataagaagccggtagttgaaaaatctctttctttgcaggggtcgcatctgcccaccactcccatggagaaacgcctatcaaccgtgaaagttccatgacgccgtacgcagtaccacgcttgtcactgccggctataactaatttaccagtggaagaaacagccagcagaaaagcttcttttttattttttataggagataaatcaacacctgccttatcgatcaaatcactttgtccgatggttccgactataatcattccttttttactttccggagtaacgattatgcgggtagaaaaaacagactccacatcacgattgagcaaattcaaagctgtatgtacaacttcttcctctgaattaccacaggcaatagtcaccggttcacctgatttcaagataaaagggttctgtccatatactgacaaaacagctaaaaagaaagctagaaaagaaatgagttttttgtatttcatagtttttattttcaatattgcaaaaataagacgaaatggaattagattccatagaataagatacaataatatggaaattcgtccataaagcctgtattatttatcgtatttacggtgctttttacacttacaataaatttataaaaatatagggaagagcatataagaattttctcttccccacattaagtatcaattttcgtatccgggattctgttttaaattactattttcattcaaggctttttgtggaatcgggaataaaatatgataatcttttgcatccatcccatccttacgggcatattctatatattttccatgtctgattaaatcatcccgtctatgtccttcacaatatagttcacgtccccgttcatctaaaataaaatcacgaaacgtatccttattaaaatcgaccagttttatttctgttgcatttgcccgacgacgtatttgattaacccattctatagcctcctctgacggaccattcaactcattcatagcttcagcttttgccaataaaacgtccgcatagcggaacataataaaatcattggactgcctttcacctttctgttccgggtcttccgaatatttcatcggagcagcacctgtcgctttgggatgatccacttgtctataatccactttattcccatccgtatccgtataataccgaactatcgtttctaaacgtttgtcttgttcttcatatttatcataaaaagtccaaggcattttcaaacctccccaaatcgttttcaaataagttcccgcatataatggactcgatggcataacacaagcaaaccatgtccaagcatacttggcatttgaagtagtctgccctattacaaatatagcttccttatgagttacaccttcattatttatatcaaaaacagctttataatcaggcaataattcataagtgcctaagcctataatctcatcagccacctgattgactttgtcaaactgtttggcacccatatatatcttcatcaataacgtcaatgccgctccctgtgtaaaatgcccccaatcagcagccgatgggacaacagccaaatcccgataggactcttcaatttcctttaccatataagaaagcatctcatcttctgtcggacgagaaggtttccactctacagaaacatcattcgccactttcggatctatgacaacaggaacaggaccgaataaagaatgcaacaattgcatatataatactctaagtactctcaattcagccattcctcttttctttttagcttcggctatatcagctttttccaaagcatcaatgattcgagtggctttagttacccctctttgatatttgaaataaacattttccggagctgtacaatcatttgccgtccataagaatcgatcctgctgcctccaagtatgttcccacgaagtattcatttcatcagtcggcaacatattcagaatagctccacaattatccattcccgactgtatataactatcagccaatgtattatatacacctacaatagatgcatccagttccgcctccgattttgggaaaccatccgcatcgatattataaaattcttcatggtccagatcgaaacatccggtcatacaacttgcgacagctacagataaaatatattttacaaatttatttttcatgacttttactatttagaaagttaaatcaataccaaatgagaatgtcctttgattaggataagaagaataactattatccgtctcaggatccgctcccgtataattggttatacaaaacaagttttgagcatctacaaacagacgcgcattgctaaaaatacccccaaaagcttttttaggaaaagtgtatcccaatgtaatatttttcaagcggacaaaatcagcaggttccacccaaaaatcagtatcattataatacttagtatacaaacctgacggatacttaccttcaggattagtacttgaccaacggtctcgtgcatcagtcgggacattatcactataacggaaacgttctgccttcaaaaactgcgaacgagtattattgtacagttcacggcctatttcaccataaaagaagaaacttaaatcccagtttttgtaatttaatgtattgccaataccgaaactcaaatctggagtttcacggcaaattataactttatcagcatcatcaatcattccatcagactcaccggataactgcttgcgcccatctttatctaaaatataatcaccattagcatctttcaaccaaccattcaaatcttttatttttatgctaccaggtgctgcatcagacatgtgggggacattctcacctatctgaataattccatcactcacatatccccatttcacatgtaaaggatctgttgtcgtattatacactgacaagatagtatatggatttctctttctccaacgatctttataactggacaaattcaaatcagtactccactgaaaatctttagtacggatatttacggaacttaattgcaattctacacctgagctttgtgtttcacccaaattatcagctacttcagataccggataataagatcccacattacgtttatcaagcaaatcactaacaattttattgaaatattcaaatgaaccggtcaaacgattattaaaaaatccaaagtcaagccccacattccattccgttgtagtttcccattttaatttacgattagcaagttgcttttctgccaccccattaaccactgcatttccaaacacgtagttataaccagttccataataaccataagtgttacctccgatttctgcattacccgtctgaccaatacttaaacgtaatttcaaattagacaatacactttgtcttttcataaattcttcctcgataacacgccaagcaaaagctccggatgggaagaaaccaaaacgattatctttaccgaaacgatcactaccatcagcacgaagagtaaatgtaaacaaatatttatcagaaatatcataattaatacgtccgaaataagacaaatacttagtaactgtcttagaactaccgacagtctttgtaagatcaccaccagcattcaaattgttaactccaaaagcatcagtcaaaaaatcagaattaccggcctcaatatattcttctataaatttctgataggcataacctgccattactttcaaagtatgtcccttgaacaaatcttttgtataagtcaaagtagcatccaacaaataatcatttttccgtaactctttcgtataagcctttgaattagcctcataaccggtcaacattgttttaggataatattgattagtacgggcaaagcttgaattgactccccaactcattctgaataccaactcctttgtcaatgttacattccaaaaattatttatcagataacgattagttattgtttcattcgtaatttctttccatgataccggattggcatgattaggatgatccggattaatcagatacttaccttcatcatcaaagattgaaagatatttaggatataacaatgcatcagaaataactcctgcctgactatcagaagaagccgatactaatttatcatttgaaatttgagtccctgaaacagacatacctgttgtcaaccatttggcgagatcaacttccatacttaatctccccataaatttttcggaaccactattatatacaactcctttttgtccaaaatgccccaaagaaagcaaataacgagaattatcagagcctccattaatagacaagctttcattattaatgataccggtacgggtcacttcatcaaaccagtcggttacatttcgcgcattctttaactggtcatctgtaaatgctattttaggtttactagttaccgtattaggatcaacattgccatatggataaatcttattattatacttccaatcttcaataaaaaaatcattagacatttgcatatattcctttgcatccatcatatcataaggattagccatagtctggaaagaagcatttgctttaaaattaatattcactttaccttgctttccacgtttcgtagtaaccaaaatcaccccattggcagcacgagcaccataaatggaagtagaactagcatccttcaaaacctcaattgattctatatcatttggattaaccgcattaatatcccctccaggaaaaccatcaataacatacaatggaatattttctgcattcgttgaagcagaaccacgaataaccattttataatcgccatcgggagctgctgaattctgacgaatagacaatccgggaacacgtcctatcagtaaattagaaacctcagtagtagctgtttgtggaacttcttccatttttacggaagcaacagctcctgtcagattagatttcttgacactaccatagccaatcacaacgacatcttccaacacttcagtatcctctttcaatataaaagagaactgagtcttgtcggcaacatgaactgtctgactttcataaccgatataactaacttccaatattgcattttccggaacatccaaagaaaaaactccatccaaatccgttatagtccccaaagtgctaccttttacacgaacattggcaccaataataggctctccttttgcatcgaacaccgttccattaattttcttattttcaagcccaacatttatatttgcttttctatttgaaagtataatacttttatctagaattgaataagaaatacctgtatctttgaaaattttatccaatactttaaaaatcgtttcctttgtaacggtgacagataccaaacgatttacatttatctgtttatcattataaaagaaagtaaactcagactgtttttcaatctcccccaagaccttttctatggtttggttctgaacttcaatatcaagcaacacattttgtgaatagctatccgccgccctcattactccgacggcaaataaaaacataataataaatagtcgcataaataatggaattttttttaaggttaaccaatgtgtttttacaacccaaaacaattgggtacatagataattttgcataaatttgtatcgatttaaagtttacaatttctgctcatcgtcaaataagcagggatttctgaaaagactttgttttatacgggagaatacgccattattttcccgtatttttcttttggtggatgtttgtttctcatattagcttcagatggattaataaatttctattttactcttttcttgtgtactatctgttgtttcaatataacggaaacgaagcccggaagatattctaaaatgctccaaaatacgatccaaacgttgatgtataaaagttccagtaaacgaattttctttcaatgccggatctgttatcacaaaatccacattgaaccgtttgcttagcatacgtaacgctttttcaataggagttttataaagtataatcttaccctctttccaagaaatatccgacagaacagccgcccgtgaaacaaaaacctcccctgatatagaattataggtaatcttctcaccaggcaacagatccattcgtttttttcctctttctgaatcatattggaactgtacttttccagataccaaggtggtatttacttcatcctctttttcataagcttctacattaaactcagtacccagcacttgaatctgagtgtgatgaggagtctgaacggtaaaacggctatccacattttttctaacagaaaaatatccttctccttgtaatattacatttcgttcatttttagcaaaacgaacgggatatttcaaataagattccgaattcagccatacgcgggaactatctggcaaaacaatagttgtaatcattcccggattagtgcggacttcaataaagctcatctcatcctgtctatcggcattataatataaatataaagtagacagcaacaaaggtatggcaagaatagcagcggcacgctgtgcccatcgcccccattgtagctgtcgttcccttcttatcctgcctctgacttccttcaaggcagcccgtgcatcagtccgttttaaggtatccattgtttttgtggcaaaagaaagataataaatctgtttggccagctttttatttgcttcggaagagataatccatttttcaatctcatctttctcacttagagtcacttctccttcaaaataacggagtaaaagcgcttcatctattcgggtatctgaatttatcataatgtccttttataataagtctaaccaagatcaaaagttcctaaaccaaaaactgttttttttgaattatttttcgaataggtactttcatgattaaaattatatatttttgcaataacattttcttctataatctatggaaaccacaaatgataatttgatagacaagcaactgtatatatccatgcaacagggcaataagaaggcatttgatactttattcatcaaatattatgcaatgctttgtgcttttgcccgcagttttgtttcattagaagatgcagaagaagtggttcaagataccatgttacagatatgggaaaatagaaaaacaaatcatatagattcttctgttcatcattatttgttcaaggcagtaaaaaacaaatgttataccttaatgaccagaaattctcttcgattccaaatagaaaatatactcactccggacatacaggaactattcgaagatcctgatttttatattatagaagaattaacacaaaaaatagaaaaagcaatacttaatcttccagaatcttatcggatagcttttgaaatgcaccgtttccaaaacaagacctaccaggaaattgcagaagaattacacatatcttccaaaacggtagattacagaattcaacaggcactaaaacaattacggaaagaattaaaagactacttacccttacttctattcttttttgccccttaataggaacccgtacatcctattatatccttgtaccctatcacttcataactgatatgatgataagaagtgtttttgccgggaatatatgcctctccaaaagttgtgtcaatgttcccaacgcttcactccgaaacagaatagtaggttcttatctttctgattatgttcttcatacaaaacgctcctttttacaaaaatacaaaataggtgcgataaaatattaccctatccgtctaaagacatctataacctaagaatacagtaatttttctaactctatagatttcaaagaggcatatttcttatacagatttacagaacaagttggaagacaatatgctctcatgccctcattaacgatgataatcatctcattaacaatgcactatattatgagtgtatcatctttatgctctcataaatgccctcatgccctcactgtgtttactttctcacacagacatatattacttattatcagatatatacattaacatttatctatttcccgaaaatcaagaaacagccgtttttcaggctttttctcttccatgtcatgcccaatgcagcctttacggatttataccgatagcacaaagcatatctcccgattatacgatacaaacatagggatgtagttacgcaaggataggaacaggtttacatcaaagttccttcatgattgctcaaccaaactacagggccgacgcattaaaaattattgtcctgcaaaagttgtgacaaatagttttcatcccatcccgcttttagtcttttcagattcatacttccttttgttgttttctcattcttaagtgtggtaagcgccatctttgttgccaccgaaaagtttccggcagcatttttcacctttttactgtagtcttctcgaaaggtaacatccagttgccaatgaagattattcccaatagaccaatgctgcctgatggcagatgcaatcttctcaggtcgggtattatcaagtgaagttacatagtatctgacctcttgagtatattcccctattgcgactattgttctttccgactttatccttacaacagacttcaaccccacaagtttctccttgaacattttctccattatagatccataactgactacagtacagtttcttttctcaatccttccatgtccggcatttttccgacacatgcctgatgactctattgattatttcatctctatcctgataatcatcaatgatttgtttagccggttgataatttttttcttattctcctttatagcgataatataatttgcatcatgctcaataatggtctgggttatatctttctggcatcccatcgcgtcaattgtaacaatacaaccacttagttccaaagagttaatcaacaatggaatagctgtaatctcactgcttttgtcatctactttcacctgacctaaagaaattccattagcggcagaccaggcggaaaccatccataatttgaatccttcttttcccctagtatgttctccatcacattggcttggaccacgcatgagcttgccatctatagctacaacgcctttcacctcctgacagacttgttttcccaattacggaagatcaactcaaaataatcgggctttatcatactgaagaatctgttaaaagtatcatgactggggatgaactccaggctaggtatgcgactcttgaaaaaagcaattttcgcattgccaaattcctcaatctcattccaggattgggcgccacagattacagcagcaatggatatatagataatagtttccattttatggacttttttgcggttcatcctaggatcttctatttgtttacaaaggtcaattataccaattttcatgttagtttatgttttaatatatcttataaagacaagaaaaacaatcgacataatcaaataataacacattaataatcaacaatataacaaataaataacaaggaataatatagtaaaaaatataatgcatccgccataaccacggatgtgattaagtctagtcacctttgtggttaactttaaccactcttgtggttagacttaaccacctaggtagataagcaattacaaacatataaaaagtaggaaaagaaaagaaagaaaagaaataagagacagggaaatatgcacacatagactaccaccaactcgattcacaagccatgcagctgctttataagaacgaacgttagggggtgaatgatgaaaaagagtagggtattgtggcaaaacaacaccgaatttgagcaaattttgcctttggagcagtttttcaaatatcacttttcttctgctacttcagagaagaaggaagaagggagaccgctcatgaagattttcaattacccgaaaggacatacgcataaaaagaactataaatcaacaatataaattattccagacgcattctctgcaagctgagcattcccccaaaagccagcaataaaagtactttgtatcatgcgataaagtctgaataatttatttttaagcatcggtgttagtgagggcattgccctcactaacaccgatgctaccaccactaataagcagttcattataaataagttatggcaaaaatgagggcatgagggcattttcgcgtccaactttctattattttttgccatgttccaataaatttcttcagatgaacccatttttgcctgttactgattatttctaataaggtatctcataaattatactttatccacatcaaccatcgacataaattaacctgaataattcatagtctccacaaaaaagagaac

SEQ ID NO: 4027 - DNA, 1510 bp, Unknown
  gut microbiota DNA sequence
aaatgctacacaaatatagagaatatattggctcagttgtaattcttggggggtggattaacatttgttaatttctctttatgcatacacctttgctaatctatacagaaagaacctcttatctactactccacgaaatgaagccctaaatgctttaatttttgcattaaaagcttccgcagcagcatttgtgcttctgttcacaaagtagtttaatatccgttcgtaatgattctcaatggaattggcaacagtagtgaatgtatcataaccaaactcctcaatttcattataccaaagtgccagtttggcacgagccacatctttatctgtatagtctgaaaatatcttccctaatcgtagtgcgtaatagtacacggattttatatccgggaattgttcaaagagtagtttggctcttaccttctggctttgcagccacttgtccggagccttaaacagcaggtaccggcttctggccaacaactgtctgagtgtatctccattgctaaacactttaggttcataactttcccccttggctttagcttccttgattttcctgttctcatccttcattacttgccagcgataagcgatccgaaggtcttgtacagcttcataaaccaactttgagacatggaaacgatccactacctgcatagccccgggaaaacaacgttttgctattttctgcatactgccggccatatcaagtgtaatttcctttacttggttgcgcttatcggcatctattttgagaagcacattgataacatcctctgctttagttccctttacaatagctacaatggtgccttttcgaccatgcttatcccgattggtaaggattgtatatagttcgcctttgcttaaagccgtttcatcaatacataaatgataacctatatttttaggataaagaataaagtcttcagcatgttccttctgattccaattattgaaatcacttaaatgttctttgtattgagtctggagttgcttgccatccatacagtaatgttctgctacactttgggaactaaccgcatgattgtctaagtaacgcttttaaaaaagctccgaactcagctgttatgcgagtaccggaggctactaagttccaatcacgactataagtttgtcctgtttccgggtcttcccaacgacgccgcttgatgcgtagatatacagccttgccgcgaacaggaaagtcttgcacttctatttccgggaagaaacctttggaatgtagatgtaaatgggaatgctcttgaggaatggaaggcttttcctcaagaaaaaaaatgaagcaagtctcttgagagacatggttaaccgggtcaaaatagtcaagcaggcctgcaggaaagaacaagctcaacatctccagtggagtggcagggggttgaaggttctgtttcatgccacaaagatagtgtttttaactaattcccccaagttttcaaactgagcctataataggttgtgttttattacatatccgtcc

SEQ ID NO: 4028 - DNA, 4778 bp, Unknown
  gut microbiota DNA sequence
aagacacacacattataatattcgcacgcgcgtataaggacggaaaaaggaagggacccatacgaaaacagcagacggaaaacaaggaaagagaaaaaacggaaggcaaacttgcaaacttgcaaaacttgcagcatctccacacacactaaaaaacaaaactaccatttaagacaagaacgaaatcaaagacaataaataagtaaattctataattctctttatacaaaaagacagacctgttttattcctccatttacaaataaaaaactatccacctatcagatgatccattaaaaagacgtatctttgccattcattatttttaatgctaacatgaaatacggagtaacaaaaaatacattacttattacagcaggcatagtttggctcttagccggtatcaacatcttacgtattggaataagttgctggataaacgattctcattattggttcttcaaagtctgtgaagctaccatagtatttctgttattctttggtctgatatttcataaactttacaagaaacatactcatcgcatatctcaaaagaaagccaagaattgtccattctctttcttcgatgtaaaagggtggattatcatggcattcatgattaccataggtattttaacacgcaccctgcatttactaccggaagcattcattgctgtattttatacaggattgtcagtagccctaattacaactggtacccgatttatatggtactggtggagaaacaggcatctactagtctgataagtcattcggtctacagggatttccacgacggatgctatttttccctcgcacgatggcagcgaaacctccccaaaagaaacgacagtatcaccaatcactctttcaaatcgcatgtttcaagaaatctacaggctaccatacaggttgataccactagcagagtgaatcgaagaaaatcatatcatgctacgctaaggtttccgcatcgagcagattaatcatacctgattgcaaattgttataagctcccgaacagttgttgtcattgtatggattcctcaacatacagttcggcaacctcaatgcggcatacatctacaccggtaaactccacaatacactcgcccacaacctgcgttatccttgcgcgaagaagtaaaccacaagtatcttaccttttcagccggatagtcgaaatcaccccggttctctccacttcctagcttttcgggtattatcaactgttctgtttctagcgtagaaatatcattaagaaaacatactgccacgctgaacaacggaaagagcaatagttaaataataaataaccttttcatcttctatcatttttttattggttgttacattcttcatctgtcacaacatgggatggagataaaatagcactaccgtaacgacggttcaacagttctgattatgtagaatcaacacaagacgatgagccaactggttaaatcaaactaataaaaaacaatcgccgcagaaagaaatgtataactccctgcggcaattgttttattgtaatatccaagtacatcgatctatcaattgttttttactatcattggcacgtacttctatttcattccttccttttctgagagggacatccttgaacaaacaaactttcaaactgtctggtttcatctttccacactgacagtcattcacgatcaatatcacttcttctacattcgaaaaaacctgtacatcaacgagtggcttcactcgattcacattacgacgccccgcgatataaatcataggttccggattccaattggcccgataaaaataataagcatcctttttaatcttgcgatcataggttaccagccctttgtcattaatgcccggacgatcaccttccgtacgatgagccgcaccgaaatcaaacatattccacacaaaactagcccacacatacggacgttcgtttattattttccaattctgaatgtgatattctgtttgccaattctctggatgccaccaacttccgggaacagtttgtaccaatgaatcctgctgatgatagatactagcacccgcaccatattcgctgatggcaattttcatttcgggatggttcttatgagtagcatccaaccatgtggcaagcgtagccggcgtagccccataccatccgtcatagcgattccaagctatatgatcagtaatgaaattcaacgcaccctcctgattacttgcagaagtagtaggacgagtaggatcctcttgatgcgctatagcattcaactcctttatatactctacaggattgtctccctgctcttttaattcattgaacaacccccaaaaacagatactaggatgattgtaatgctggcgtatcatctctttcaactgctctttaccattttcacggaaagaaggctgatcaacaaaacctttatcagcgtatcctcctggccccacaaatggaatctcagcccaagtaacaataccatgtttatccattaaatcatacatataggtagcttgcggataatgtgccagacgaacagcattcacccccatatcaagcatgatacgagtatcttcctcgtgatgcaccggacaaagagcattacccacttccgccctctcctgatgacggcatacaccatgcagcggcaagtattttccattcaagaaaaaacctttatcgggatccgtaacgtaataacgtaaccctaacggctgttccactttgtccaattcttttccgtctttaatcaaagtcaccaccgcctgatacatgaacggatcctgcataccgttccaaagacgcggattcttcagtatgaactctatattctctacctgtacatctgtatgaggaatcatacttacttccttctccgtttcatacacagtctttttcccgtcattaacctgcaaccggagcactactttccggagttctcccgttccattagaaagatttacgcgtgcacaaatagttgcctgtttatccgtaacctgttgctgtatgagataaaccccagacgatgcataatctaacggagaaatacacaggttatcagtcagcaacagatgtacatcccgataaatgccgccataaaaattaaaatcaccgaccaatggcattacatccaactgctcgccattattgacacgtaccagcaatgtattctcttttccatattccactttatcggttatctcgaagacaaaagctccatagcctccccgatgctcacctatatgtttaccatttacaaagacgttgctcacgcaattcgccccctcgaaacgtaaaaaaagccgcttgccttgccactcgggacggatgaatatctttttagtataattacctattccccgcttgtaatcgtgcttaccacccaaggcatcctgcgcattccaagtatgaggcaagtctaccctacgtgcagcactagcatttacttgatgggaaaaacggaaactccaatcctgattgataagcttatcttctctttgtgccaacacctgcatgctgaaagctgcggcaaataatacggtgaaagttcttctgaggtttttcatatgtatttttattattatactttgatttatgttccaacagcaaaaataggcaaaaaacttgagagagcaactaaaacacagaagaatagttgaatacgaaaaaggtaaaagtcaaaaccgccatgaataacttttcttctgatattcacagcggcatatattataagcaaaataataaatcaacacatatcctctcaaagatttttccaagcatttcttataatatttcgtatagaagcatgctaaaaaataccgatataattacaaatataaaatccaacgatatattatcttattgttttacatttagcttataaccaacagagagggttaaactgttataattcacacctatattatcatttttagattctttcccaagtgacatttcatattgaagcttaaccgtccacctccgattttcaagacctacagcggatgccattccccagtcgaaatttctcgcatgctgatatagaaactggttgctaccaccctccgcactttctcccacaccaggatatccttcaatccaaccggaagaaggcatagttagataatatggattgctgtcaatatgatttttgatacaatatcctatatatggtcctatctcaaagaaaaatttagtggaattgttgctatggatagagaatttagctaaaataggaacttgtaaaaaatgccttgtctgagaaacattttctatccatgtagcatctccattactatatgttccgccattattcacagagtatcctctaaaagtataatataatcccgacttcatagagaacatattattaacattataatctgcagatatccctaaacgagtggatggacgccaacattctccatatccagttctttgtattgcagataaccctgcttcggttgcccatgtaacacgctgagcattagcccacatgctacaagaaaaaacaacagcaaataataatacttttttcattgaaaaataaattaaagttagtaattctatagtttatactatcgtgtcgctataatctttttcatcataataacttcattttttgacagaatgacaacaaagttccgttttacccccatccatgaaatcatttttatttcaaactaacattttaccaaaccaataaaattgaatgtaagtacgatatagcgatgactgatccgctaaaaaacaatacaatggaaacaagcaataagtattg

SEQ ID NO: 4029 - DNA, 1291 bp, Unknown
  gut microbiota DNA sequence
cttcagggtgtgcataccgattctcccttttaatctttaccagggccgcctttttgtagcatccgatgaaatacgcgtcatagtccgttatgtcctttccgggaaccagcacctgccttcttacaaaaaggtaggtgtcatggaaattgtcctcgtccagcattccgtaccggcgtaacgtccctctcaacctgtcataggatgcagtgaaccactcgttgaacagtctttccttttctgcgctcttgtctgccatagctttatatttttttgagttatacatggcctacacgggtaggcattcttatttcttgtgcttcctccagtttgtttttcggcggtctccggcaaggcttgccgtgaaaaaatacgctcacgcgaagcgtgaggaagattttttcacgtgcaaccagcccgaagggccgccttgcgggaccggcctgaaaaacaactatttttgccgcaagaaatgaggatgatggattccttccttctatctattgtctgtccggtgagaatttagattccatgcagcttttctgtctttggtatgtttggagaaatattcaaggatatgaaatgagaacggcaatacgtgatgttgcggaaggagcagatatgggattggaaacaggaagcgtgcccgggctttcatgcagtttatacggcggtgttgattttggggaggattacagggaagtgacaggaaagtcggccgttccggagaaattgtatgtgtacgttgttccttccgaaatacggagtcttttaaaatcatggaagacctcattcgggagtgtgtctcgatatttgcctgagacaaaattataagtcgcctattcatggataagtatttggaatatatcaacgacatgctacgatgcaataaagagaatcggaacggcagactgaaactcgcaatctgctgataatgcggactattctaaaacaagtgtggaaaacttgaagacatccgacggaaaaccttggaaaaagaagaaccggacaaagtctccgccttcaaaataatgctctattatgccacaggtgcggcattacttgtcattccggattggcttcccatgaaatccaccgcccgccatcaagaaaacggccggtgccatatggcaggtaatcgtagcgacagcctgtctttggaacccgttgtcaccctaaaggattttactgatatattattatgtcagtcctttttcaaatcaaaatacagcaaacgggttttcaaaggttcatcttgcggaatatcataatattgcttttctatcacgtctgt

SEQ ID NO: 4030 - DNA, 2411 bp, Unknown
  gut microbiota DNA sequence
acggaaccagtcttttatgaaagccatcagttgccgtcctacgtggcttgatgtaccctgatattccaggttgacccccagtcttcctatcagcacggccggatagctgcgtccacgtttaggatttacaatattgcgttgcagcctgtttttatcattgggggatattaatctggtcttgatactgtcattggacaaggtaaacaaggccacaatacgatgcgggatttcagtcgtcacccaacaatatgttttcccaaggagttcatccgcatacagatcggcatcattgagaaaaaaatcatcaaggtcattctcgccacaagtgaaaggaaggcaattcctccgtacttccttgttataggcaagcatgacacaatcatcatataaagaaataccgtccattgctgttaattgaaccggaatgaacgggatttctccaatacttttcgcaaccgtttctttgcctccactgataaccggggtgttacctttgcggcgttcttgtctgcactgcgtacgaaatcttccgccgtaacgccctccaaaaccggaatgttcttgatagttatagccataatattattttttgcaaaaatacaactttgttgttatacagccaaataatagcccgtcttccactcttttttccggaatgttcctccatatccggaaaagtctgtgtcacgccacccgttgcggtaagccgtttttctcaaggaaagggcaggcaataccggcggacgtggatatgggcaaaacaacccgcatatgcaatgcagagggagcaggagagccttcaccacagccggagagaaaagtggtttcatgccggggtacggcatgaaaagggggctcccggacagttcttttccttgtcgcacatgcactacgtcggtcgcagttttcgccttctgaatccctcttacgtccgtccctgcgctttcggagcgtttttccggcagaaaatttcgccgtacggaaattttctgccggaaaccgaagggaaaacgcggagtcccgcagggacggacgaactttgatgaggaaggggaaaatcatccgtttcataaataccatttcctcagatggcatcgcatatttccttctccatcttttccagcttatgggacaggatttccatgtcgctgctgatcttctggttggttatccgggcatatatctgggtggttttcaaatccgtatgccccaaaagacggcttacggtctcgatgggtacaccgtgcgagagcagcacggtggtggcgttcgtatgccggaccacatgataggtcagccgtatcttgaaaccgcactgcctgccaagttccttcaatatggtgttgcatctgccgttgctcggtaccggaaatacatgaccgtccttggacagtcccttatacttctctatgatgcgcttgggcacgtccagcaggcggatgttggactcggtgtttgtcttgcgacggcgggtgatgatccagaggttgccgtcgaagaaggtctggagccggtcggtcgtcagtgccttcacgtccgcgtatgccagtccggtgaacacagagaagatgaagaggtcgcgtaccagttcgcaggtcccgcttttcaccggggtctccatcaacgtctgtatctcacgctccgtcaggtagcctcggtcaacgctctcgggggaattgatgtacccggcgaaggggttgaagggaagcgcaccgctgttgcgggcgatggagatgacgtgcttgagcccgatcatgtaaccccatacggtattggtgcggcatttcttctccgtacgcaggaaatactcgaagttgttgatgaaggtcaggttgagttccttcagggggatgtcgtcacggcggtatactttcgggacgaactcgcaaaggtgcctgtatatggtacggtagcggttgtatgttccctgcacgcggctgtgtcccactttcttgatgaactcctcgttgtgctgctcgaagagcttcagcagcgtctcgcgtttcacgcccagcccgaggcaggcgtccctcagcctggcggcggtgacatagccgtcggactgcatcagttcctggtaacggcggttcacgtccacgcgtatccggtcaaccgccgcattgattttctgcgcctcggcgctcttgcccgtggcacgtgccgttttcacgtcccaaagtttcgggggcacgtccagcttgcagctgaactgcttgatttcgccgtctaccgtaagacggcacatcagggggagatagccgttggctctctcgctgcccttcttcacgtagaagaggattttgaaggtcgatctgctcatactcgttttcatacttttttgatcgttacaaagttaatatcaagcgagttgtcctcaggtatgaaaaactgtgcaaattactgaaatagaa

SEQ ID NO: 4031 - DNA, 1018 bp, Unknown
  gut microbiota DNA sequence
tttttatagggttggctttgacagtcatagccggaatcagttggcgggtatggaaagcagccaacgagaaccctgcagaagtaatcaaaaacgaataactttataaaatataagattatgatcaaaacagtaaacttacagaaaatcttcaaaacagaagaagtcgaaacatgggcattgaacaatgtcaatctagaaatcaaagcaggcgaatttgtagccatcatgggaccatccggttgtggaaagtccaccctgctgaatatcctcggccttttggacaatcctacggaaggcacttacgaactgaacggaacagacgtttccaaatttaccgaagcacaacgcaccaatttacgtaaaggggtcatcggattcgtgttccagagctttaacctgattgatgaattgaatgtattcgaaaatatcgaattacccttattgtatatggggattccggcggcagaacgcaaacgccgggtagaagatgccatgaaccgtatggctattgcccatcgggtaaaacatttcccacaacaactatccggtggacagcaacaacgtgttgcaatagcccgtgctgtagtagcaaatccgaaactgattctagcagatgagcctaccggcaatctggattccaaaaacggtaaggaagtaatggaacttctgaccgaactgaataaagaaggaacaacaattgttatggttacccactcccaacacgattccggctatgcggggagaaccattaatttgtttgacgggcaggtggtgaatgaaataaaaatataagtcaatttattatagaggtggtttaaccacctctataataacaaaaggatattataacaatgaacgtcttcttaaacatcaaacttattgcccgcaactggtggcgaaacaaacttttttttctgatttcgctattcagtcttacagctggattaggatgcaccaatctgcttatgactttttttatccatgaatagccacacaatggaatttcctgacccctgtt

SEQ ID NO: 4032 - DNA, 13727 bp, Unknown
  gut microbiota DNA sequence
caaccattacgataacaatacatagttatctcagtgcacgcactaatccggtaaacagcctgaaagctgaatagcaaacgtctatgtatatgttctcttttgctgaaaaagaaccaagcttacagaaatcacaacaaggattatgcccaaagcactgtatgtagtaaagagttctttgaatacaaatacccctaccaggactgccgtaagaggttccaatgcacccaataaggaagtcaacgtcggtcctgccaattttacagccttcaccaacgtaatattagagatcgcagttgcaggaagtgccagtcctccgatatagagccaagtgattacattggtttccaaacggaccccctcatcatagaaaagtcctcccagcaaaaagaacaaggctcccagccccatcacataacaagttaataccgtagaattaacttccactgctctggtttttcttatacctattatataaccggcataagagaaaaccgatatgcaggccgctatcaatcccatcattctatttccaccattatattctatatttccggaagataataaagatgctcctactaatgataaaacgatagcagcgaaagtcacaatagactttttttctctaaagaaaacagccattgttactgcaacagccagcggatacataaaatggatgatagaagcaacaccacttgcaatattctgataagctatgacaagactgaacgaagtaagcgcacgcagcaagctcagtccgaaaattgttttaaaatctttataccctatgtgaaaatcacatttggtaagaaaagcaaaaacaagcaagacaactgtagcaactccccaacgataagtcagcacttcgaaagaagaatatccaatagccaacaagcttatggaaaaaaacggtgccaatccgaaagtcgcagaagacactgctgcatataaaataccttttatccgattcatgtccttttcaagtaaagcggatacaaagatagacaataatacataataaaaaaacaggttgcctttgtaaaggcaacctgtgatatcttactttatgatttccaacttcttaaagcatttagtcagtttatccacagcatagtcaacttgttcctttgtatgagtagccatcaaagcaacacgcaccaaagtatcttgtggtgcacaagccggtggaataacaggattaataaatataccctcgtcaaatgccagtttagtcacttcgaatgtcttatccgtatcacgaacataaagtggaataatcggactttcagtatcaccgatttcaaaaccggcctgacggaaacaatccaaagcataatttgtaatcttccacaaattctcacgacgttcgggctcactcttgaggatatgaagtgcagcacgtgcagcagctgttgcagcaggagtattacttgcagagaatatatatgaacgtgagttgtgacgcaaccagttgattgtatctttatccgcagcaacaaaaccaccgatagaagccagtgactttgagaatgtacccataataacatctacctgatctgtcagtccgaagtgatcacagacacctcgcccgtcacgaccgaacacacccaagccgtgtgcttcatccaccatgatacttgcattgtatttgtctttcaaacgaacaatctcaggcaagttagccaaatcaccttccatagagaaaaccccgtccaccacaatcagtttcacagattccggtttacacttctgaagttctttctcaagggcttccatatcattgtgcttgtatttcaactgggtggagaaagaaaggcgacgtccgtctacgatggaagcatggtcacggtcatcacagataatgtagtcattgcggtctgtcaggcaagataccacaccctcatttacagtaaaaccggtagaataaaccaatgcatcatctttccctacgaattccgccaattccttttctaactgaacatgcaggtcaagcgtaccattcaagaagcgtgaacctgcacaacctgtaccatatttacgggttgcagcaacagctgcttcaataatccgttcatcgtaggttaaccccatatatgagttggagccaaacatcagcacctttttaccatccatgataacctctgtatcctgatggctgtctatctcacgaaaataagggtaaacgcctctttccatgtatagttgaggcaatctgaatttacttaacttgtcttgtaataatcccatatcctattgtatatgtaagcctcgtcgacctactttaaaataatgtatataaactcactaatacattctgttttcaaggtgttcccgtcaaaacaggctgcaaagatagtaaattctacaaccgattgtactttttttcaaaaaaaatatttaggggcatcaaaacttttaggatttagggcagttataaacaaaatgtattacttttgcgtttaataaagagctaaactaccaaagtaaaagtatgaccacgaaaaagaaaattgtatttgtcgttaatcctatctcggggacacaggggaaaagagccatattaaaatggattgacgaacgtataaaccgtacactttatgattatacgattgtcaaaacacaatatgccggccatgctgaaaagattgcggctacagctgccaaagagaaagtagatatagtagtggctattggaggagatggaactataaacgaaataggacgtgcattgatacatacggatacggcattaggcattataccttgcggatcgggaaacggactggcacggcatttacaaattcctttggaacccaaggctgctattgacattataaacgaaagttctgttgcctgtattgattacggaaaaataaacaatataccctttttctgcacatgcggagtaggttttgacgcgtttgtcagcttaaagtttgctgattcaggtaaacgcggactactaacctatctggaaaataccttgcatgaaagtctgagttacaaacctgaaacttatgaaatagaaaatgaagaaggaacggtaaaatacaaagctttcctgatagcctgcggcaatgcctcccaatatgggaacaacgcatatattgctccacaggcctcgttaaccgatgggttgatggatgtcacaatattagagccgttcacagtgctggatgttccttctttatcttttcaacttttcaacaaaaccatagaccaaaacagccggatcaagacattccgtactaaaaagattaaaatacatcgttcaaaacccggagttatgcattatgacggagatccgatcatgggaggaaaagatattgaggtagaattgattccacacggactcaacatcattgtttctgataaaaaaaaagagaacgaaccttttagtctcttacagcaaatatccgaaatattcagtggtatgaaacctaaagctgaaacttttgctttccggcacagccatttatttgaacttaacaaaagtttattgcgtcgtctatccaaaaaacaataaaaaatatcttttttctgaacatcagtaaagactctgcaaataaaaacagtttctttatgatgttcagaataatccgctctctacatgttcagatagaattctttagtcaaggctatatattcttcactatacacatgacgtgataattcgatggtcaaatcgtctgtaacacacttatccacagagaatttgaaagcaagcagcacccgtttgggctccgatccaggttttgtatgaatgaaagtctgatgtgagagatgtaatccgtaacgagtggcagccatcaaaaaagattctttaccatcagcaggaataatcacagaaaaaacgccttcgggatgaagcaaacgggcggcagatcctgctaatttgtcaaaatcaagaaaatctgtatgtcgggcgatattacgctgtttcccagggcatttcaatgaatcggtaaaataaggaggattggaaacaatgacatcaaagagtgtttccgatgtaaaatgacaaatatcctgcaactccacttctatcctatcctgccacggagatgccgccacatttccacgagcctgttccacagcatccgcatctatatcaaccgctcttatccgggcattgcaccgctgtgccatcatcaaagaaatcaatccggttccagtaccaatatctaaaatattacgggcggaaaccacatcggcccaagctcccaataaaactccgtccgtaccaaccttcatggcacatctatcatgataaacagtaaattgcttaaaagaaaaataaggatttggcatactatatttattaaattagctgtcaaaaataggaaaatccatttaattactccaattattaggaaatatttgatttttaaaactcaattagttcccatgaattttccttattcgacaaggaatgattaactttgtccccgttttgggcattgggctcaatttaacacaagaggaataaattatgaagaggaataagaaagaggatattttgttgaatactgataacgatgacatctctatgttagctgaaatccaaacggatccggatgaagtaactgctatggaatttaataaagaaatacctgttatgcctttacgcaacatggtaatgtttccatctgtagtaatgcctgtgaccattggacgccccagcacattgaaattgataaatgctgcatacaagaaaaaacttcccatagcggtagtttgtcagatacagggagatatggacgatcccggttttaatgatgtgtaccatgtaggagttatcgggaagattctccgtgtattcgaaatgccaggtggaaataccacagtaattatgcagtcaaacgggcccaaagtacatttggacagtatcaccaaaacgtctccatatttgaaagggatggtgactcctattccggaggcaaatgaccaactggaaacggacgaattcaaagcattgattgacacctgcaaggatctgacgagcaagttcatagaggcttccgagaagatgagtccggatacggtttttgcaatcaagaacttggacaatccggaaattttggtaaatttcatttgtgcaaacttccctattccggtagaagaaaagataaaattgctaaaagctggcgatttgcaaagccgcctgtatatgctggtcaagatcttaaatcgtgaagtacaattggctgacatcaaacaaagcattcaaatgcgtacacgcgaagatattgaccgtcagcaacgcgaatatttcttgcagcaacaaattaaaaacatacaggatgaactgggtgccggacaggaagatgaaatagatgaactccgccaaaaaggaaaaaccaagaaatggagtccggaaatggcagaactctttgaaaaagaagtttccaaattggaaaggacaaattcccaatcaccggatttcaatgtgcaacttacctatttgcaaaccctgttaggattaccttggaatgtctttaccactgacaacctgaatataagtaatgccgaaaagacattgaacaaagaccactacggactagagaaagtaaaggagcgtatccttgaacatttagcagtgctgaaactaaaaggtgatatgaaatcacccatcatctgcctttatggtcctccgggagtcggtaaaacttctttagggcgttccatagcggcatcattgaaacgtaaatatgtacgtatgtcattgggtggtgtgcatgacgaagccgagatccgtggccatcgtaaaacttatatcggtgccatgccgggccgtatcatcaaaagtttgataaaagccgagtcttctaatccggttatcattttggacgaaatagacaaactgggcagtgaccaccgtggagatcccagttccgctatgctggaagtgcttgaccccgaacagaacaacactttccacgataactatttggatgtagattacgacttgtctaaagtaatgttcatcgctacggcaaacaatttgagtaccattcctcctgctctgctggaccgtatggagttgatagaggtcagcggatatatcacagaagaaaaagtagaaatagcccgccggcaccttgttcccaaagaactggaagccaacggcattaaaaaagaatatgtgaagttctctaaagctgccttggaatgtatcgtagaaaattatactcgtgaaagcggggtgcgcgaacttgagaagaagataaacaaggtaatgcgtaaaatagcgttggaatttgcacgtgacggctatgaagtgatgcatgaaataaaacctgccgatgtacgcaaatacctgggcacgccagaatatagccgcgacaaataccaaggaaatgaatacgccggtgttgtcacagggctggcgtggacagctgtcggaggtgaaattttgtttgtagaaaccagtttaagcaaaggaaaaggcggtaaactgacattaaccgggaacttgggtgacgtaatgaaagagtcggccatgctggctttggaatatctcaaggcacataccaaactgctgaatttacaggaagatatctttgacaattggaatatccacatccatgtacctgaaggagccatccctaaagatggtccgtcagccggtatcaccatggtgacttcattggcatccgccctcacccagcgtaaagtgaaagcaaatctggcaatgacaggcgagatcacattacgtggaaaagtcctgcccgtaggcggtatcaaagaaaagatcctagccgctaaacgcgccggaatcaaagacatcattttatgtgaggaaaaccgcaagaacattgaagaaattcagccgatgtatctggaaggactgacattccattatgtcacggatattaaggaagtattggctttggctctcaccaatgaaaaagtaaacggtgccattgattttaatattaccaatcaaaaaacagaagaaaagaaataaatatgacttttgacttacaatatacagaccccaaatcgaatgcccgtgccggattgataacgactgaccacgggcaaatagaaacccccatctttatgcctgtaggcacattgggaacggtgaagggcgtgcatttacatgagttgaaagaggacattaaagcgcagataatcctgggcaacacttaccacctgtatttacgaccgggactggatataatagaacgtgccggaggtctgcataaattcaacggctttgaccgtcctatgctgactgacagtggtggttttcaggtattctctttatcaggtatccgcaaaatgagagaagaaggtgtggaatttcgctcacatatagacggttcgaaacacctgttcactcctgaacgggtgatggacatagaacggactatcggtgcagatatcatgatggcttttgacgaatgtactccgggaaccgcagattatgaatacgcaaaaaaatcaatgcagcttacccatcgttggctggaccgttgcataaagcatttcaacgaaaccgatcccaaatatggttatcaacagtcattatttcccatagtacaaggctgtgtctatcccgacttacgcaaacaatcagcggaatatattgcctccaagggagctgacggaaatgccatcggtggcctggccgtaggtgagccaaccgagaaaatgtacgaaatgatagaggttgtcaatgaaatcttacccaaagacaagccccgctatctgatgggagtcggtacaccggtaaatatactggagggtatagaacgcggtgtagatatgtttgattgtgtaatgccgacccggaacggacgcaatggaatgttgttcactaaaaacggcataatgaacatgcgcaacaagaaatgggaggatgattattctcctatcgaggccgaaggagcatcgtatgtagataccatgtacagccgtgcttacttgcgccatctgttccacgcacaagaactgctggccatgcaaatcgcttctatccacaacttggcattctatctgtggctagcaggcgaggcccgtaaacacatcattgcaggagatttctctacgtggaaaccaatgatggtaaaacgcttatctacaagattataaattactagaaatgaagaattggttcaagacaaacacagattcatccccaaaggataaaaaatggtggaagccgaatatcagttggctgaaactggataaatgggtgaaaagactggacatatatatcattaagaagtttctgggaacctactttttcgctattgcattgattatctccattgcagtagtatttgatgtgaacgaaaatatagacaggttcatcaataacaaagctccgctgaaagcgattgtatttgattattacatgaacttcatcccctacttctccaatctgttcagccccttgtttgtctttatcgctgttatcttctttacttccaagctggcagaaaactcggaaatcattgccatgttctccaccggaatgagttttaaacgaatgatgcggccctatatgatttcggccgcaatcatttccgttgttactttcggactgggagcatacgtcatacctaagggaaatgtaacccgtttggattttgaggaccgttataagaaaaaaaagaaacaggaatatgtgcggaatgtgcaactggaagtagacagcggggtcattgcctacatagaacgttatgaaaattataataaaacgggataccgtttctctttagacaagtttgatgacaagaaactggttgcccaccttactgcccgaagtgtcacttatgatacagcatctgtacacaaatggacaatcaagaactatatgatacgtgagatggaaggtatgcgtgagaaaatcactcggggtgaccgtttggatacgatcattaaaatggagcctcaagattttctgattatgaaagggcagcaacaaaccatgacaagccctgaactgaaagaatatatagacaagcagaaaagacgtgggttcgccaacataaaagaatttgaaattgaatattaccaacgtatagccatgtcctttgccgcttttatcttgacaaccattggtgtttccttatcatccagaaaaatgaaaggaggaatgggactgcatttaggagtagggttagcacttagtttttcatacattttgttccaaacagtgtcagcaacctttgctgtcaacggaaacacccctcctattatagcggtatggattcctaatatactttacacatttattgctatctatttatacagaaaagctcctaaataatcataggagcttttctagtttttgacgccaatcctcgccgttctccggttgcatcgtaataaagcccagttctttaccaataacaatattggccgcaccgtcatctacaaatattgtttcagccggattcagtttactatctttgatcatatagttaaagatgccaggatccggcttggtggaaccggcttcgtaggaagtataaatcttgtcaacataagcgtccaatggctttcccgcagaagtaaatgcattgctcctcgcccatcccatcacataaggattggtgttgctcaatatatataccttgtacttcttacgaagctcattcaggtaatccaatttatattgcggcacgtccgtaacaaatcctttccacccattttccacgtcttgataagtcaattctttcccgcagattttactcaactcacagcgaaaagtctcagcgtctatgtttccattttctacttcctgaaaaatcccctgctggtggtatttccctaataaactgtccgcttccctcactcctatccgctcaaatgcctttacagcctgttcacgatcaaggctaatgacaaccccgccgaaatcaaacacaatattcttaatctgtttcataatctttttatttatccgctgtaaaggtaggcatttgattgtgaatggtaaatgatgtaagtcaataaaataccatatagcaaaaaaaaccgcagattccattgagaatccacggtaattatttttgttgtatttttcttcctttcggaaatgttctctcaattcaaataagaagagagttcggatacggtgacatccttggcaacgataacaccattttcatctaacaaaaagttcttaaagcctcttttcaagcgataagtctgatatagatccgatgaaacaccagccaattccacaaaacaattagaagttgaaatctggtcttttttaatggtctcgttaaatatcgacttgtattcatcaaatgaaacggaaaccatttctacattgtcggcctgcgcgacggcatgattcaaagtagcattctgcatccttgacaaagcatcatagctggcccaaaaacttagcagtacatatttacctcttaaatccttcaagtcaatcaactgcttttcgccacagatagtaaatgtaggagccttgtctcctatggtcaagccttctgtcggcgtgtttttccctacaaaagagaatgaaatcaaggaactaataattaatacaacaaaaatccactttacatttttaatcatgtaattcgatcttagttaatactatccgagactgcccttaaacagtgatttccacccggaacattatctttagtactgataatcaataccatttaaattggaaatctgcgacaaaggtaaggagttttgaaattaactccaagattttttctcaaaaaatatgttatatagcataaaatcgtccttttcatcgagaaaaaagaatgcagaaaatatagctgataaggatttatttacgtacttttgcaatctgtaaatagcaaccacaaagtatgaataataatactgaacttattttaatcagaattaccggtcttgaccggccgggattaaccgcttccattacggaaattttgtcaaaatatgatgttaccattttggatattggccaggccgatattcatagcaccctgtcattaggcattttattcaaaagccaggaaaaagattcagggaatatcatgaaagagttgctatttaaagcttccgcattaggcatcaatatccgtttctatcccgttactgtggaagaatatgaggaatgggtaaacatgcaaggcaagaaccggtacatcctgactttactggggcgcaagctgacagccaaacaaatcgcggcagtcacaggaatattagcggaacaaggtttgaatattgatgctatcaaacgtcttacagggcgtattccattggatgaacggaaagcgaatgtacgggcttgtatcgaattctccgtccgtggcaccccccgccaaagggaagagatgcaacaggcgttaatgaaactgagcagtgacctggaaatggacttttctttccagctggacaatatgtaccggcgtatgcgacgcttgatttgtttcgatatggattccacattgatacagacagagtgtatagatgaattagccgaacgcgccggtgtgggtgaccaagtacgagaaatcacagaacgcgccatgcgtggagaaattgatttcatagaaagcttcacagaacgggtggctttgctgaaaggactggatgaaagcgtaatgaaagaaatcgcagaaaaccttcccatcaccgaaggtgtggaacgtctgatgttcgtgttgaaaagatatggttacaaaatagccatcctatccggtggattcacctatttcggcaattatctgaaagataaattcggcatagattacgtatatgccaatgaactggaaatagtaaatggcaaattaaccggaagatatctgggagatgtagttgacggaaaacgtaaagccgaactgctgaaactgatcgctcaagtagaacgtgtggacatagcacaaactattgctgtaggagacggagcgaatgacttgcccatgttgtccgaagccggtctgggtatagcattccatgcaaaacccaaagtagtggctaacgcacaacagtccattaatacgatcggattggacggcgtcctctatttcctgggcttcaaggactcttacctggaagaacgcggcaaactctaaagaaagaagtaactatatatatgaaattttcagaactaaatttagaagaaggggtgcttcaggcattagatgccatgagatttgaagaatgcactcctgtacaagaacataccataccggtcattcttgaaggaaaagatttgatcggagtggcacagaccggaaccggcaagactgccgcataccttttgcccgttcttaatcaattaagcaaaggcggatatccggaagatgccatcaattgtgtgatcatgtcacccacacgcgaattagcgcaacagatagaccagcaaatggaaggtttctcttattttctaccggcatccagcgtggctgtttacggaggaaacgatggtgtgcgcttcgagcaagaaaagaaaggtttaactttgggggccgatgtagtcattgctactccgggacgtctgataagtcatctcagcctaggttacgtagacttgtctaaagtttctttctttattcttgatgaagcggaccgtatgctggatatgggattctcggatgacattatgcaaatagtgaaatatctgccgaaagaacgtcagaccatcatgttctcggccactatgccggctaaaatacaacaattggcaaaaacgatcttaaacaatccggtagaaataaaattagcggtttcaaaacctgcggaaaagattatccaaacggcttatatctgttatgaacgccagaaattgggaattattcaatcccttttccaggatcaaacacccgaacgtgtcattatctttgcctcttccaaattgaaagtaaaggaggtgacacaagcattcaagcggatgaaactgaacgtaggtgaaatgcactcagacttggagcagtcccaacgggaacagattatgcgtgaatttaaaagtggcagaatcaatattctgattgctaccgatattgtttcgcgaggaatagacattgacgatattcgtttggtaatcaactacgatgtaccacatgacagcgaggattatgtacaccgcatcggccgtacagctcgtgccaaccatgatggttgcgccattacttttgtcagtgagaaagagcagacccaattcaaagctattgaaaatttcctgggtaggaacatctataaaatcccggttcccgaggaattgggagaagcgcccgaatacaacccgcgaagtggcgccggtcgtagcaatcacaaaggtggaggctccagaaaacaaggcaattataaggggaaaaagaacggtacgggcaagcccaatgccaataatagaagaaacaccccaaaagaatagacggaagagatgatatctaaaaaccattggaggaagacggacttgttttcctccaattttattttatggagagggtcacttcatggctcatctgcaaaatagatgcgaggcaatcacaaacatccattatatgtattgcttgtaggatatataatctttcacctgtaacattactaaccttacaccccacacattagtaacgtatggggtgacacgttactaaccttccggcatgtacgttactaacctctcaaacgtcctgttcttttctgaaaagaacaaggtctttaaaaaaaagaacaggacgttttcattgaaagaacaagagctttttagggatattcagtaaatgtctctaaaaaataag

SEQ ID NO: 4033 - DNA, 250 bp, Unknown
  gut microbiota DNA sequence
gtaagcattcggcctcgtgcgtgtttttttcccctcttttccttcctacctttgtggcttcattataatcttaatccattatgtgttcagtattagaattttctagcgaaagtgataaactacgtactctcttttccgagtctaaccattttgattctgttcttttcatatttgatggcggccgtcgttataaagtttcgtcttccagccttggtatccattcccctcaggacctacttctccctttagg

SEQ ID NO: 4034 - DNA, 215 bp, Unknown
  gut microbiota DNA sequence
gacacgcaggaacccgtgtgtcggatgacctcgccacaaagaccgtcaatacctttatggaaattacaaccttggggataaaggtaataagaccaaaaaggactgctgcggaaaaggccaagacctaaagggagaagtaggtcctgaggggaatggataccaaggctggaagacgaaactttataacgacggccgccatcaaatatgaaaagaac

SEQ ID NO: 4035 - DNA, 1454 bp, Unknown
  gut microbiota DNA sequence
aacttcggcatggagaagaagcagattgccggagatggtatggtcaccggttacggaaagatagacggccgtccggtgtttgtctatgcatacgatttcaccgcgcacggcggttcgctgagcgaaaccaatgcggccaagattgtaaaggttcagcaactggctttgaagacgggagctcccgttatcgctttgaacgattcggggggtgcacgcatacaggaaggggtgaacagcttggccggatatgcctccatcttttatcagaataccattgcatcaggtgttatcccccagatttccgccattttggggccttgtgccggaggcgcctgctattccccggcactgactgactttatctttatggtgaaggagcagagccacatgtttatcacgggtccggatgtggtgaagaccgtgactaacgaggaggtgggcaaggaggaactgggtggtgcccagactcacagcggcaaaagcggtgtgacccattttatgtgcgataatgaggaggaaacgttgatgagtatccgcgaattgctgagtttcctgccttccaacaatatggaggatgcgccgctggttccctgcaacgatgacatccatcgtcaggtggaggcgttgcagactgtcattcccgaagatccgaacatgccttatgatataaaggatatcatcgaaccggtgctggataaccagtatttcttcgaggtgatgcctcactttgctaaaaatgtggtggtggggtttggtcgcctgggaggtcgttccgtaggtattgttgccaatcagcccgcctggctggccggcgtccttgacattgacgccagcgacaaggctgcccgttttatccgtttctgtgactgctttaatattcctctgatcactttcgaggatgttcccggcttcctgcccggaacggtacaggaacacaacggcatcatccgccacggtgcgaagatagtctatgcatacgctgaagctacagtgcccaaggttactttaattacccgtaaagcttatggaggtgcctacattgtcatgtccagcaagccgacgggagccgatgtgaacctggcttacccacaggcggaaatagccgtcatgggtgcagaaggagcagtgaatattctttaccgcaagtctgctccggaagagaaagctgagatcatcaaggaatacgaagataaattctccaatccttatcgtgcggcagaacgtggtctgattgatgaggtgattatgccccgtgacactcgttacaaacttattcaagctttggaaatgtgtcacaataaaaaccaaagcaatccgcctaagaaacatggcaatatgcctttatgataaaatcaagattccgtcacagattgatcagattgacatcggtccaatttaagcagtgggtcctcaatggaaatagggacattcattaaatattacaaaatcagcca

SEQ ID NO: 4036 - DNA, 686 bp, Unknown
  gut microbiota DNA sequence
gaaatacagaagatattagatagttgtatagctcatgactataaaactaaagtagatgcactatttttaaaacgtgaatatttgacgcaagcccagctaaaggattatttgcgacaagaaattttccgtgtgactgaaaatattgtagccatccaacaaaaataccgtgtcgtgcgtaacattgtattggacatggatattcccgattttttgtgggaaagtggttattttgaggacttgaattctgatgaaagaaaaaagtatatcggtttccgctgctctgattttgatatggatgcatatttgcatgaaccgtcctgttatgatgggcggcttccttatttgtccattatcgttaatcttgtcgtgctttccaaatatttgcgctatctgcaagaacaggaaagcaattaccatacagatgcggttgccatccaagagcaagccttgccaaaagagaaagaggaaagtgcagatactaatccaaccaagattgtgggcaaaagcaatcctttcaagtccacgttgaaagctaatgaaatcaaacttctgaccgactgtgtgaatgaagcgaatatgtttactactaccgtcagtgccaaaatacttaccgattttttcaactgcaaactgaatggggtattgaaagttaataatacccgtctgttagcctatcttatgatgca

SEQ ID NO: 4037 - DNA, 42635 bp, Unknown
  gut microbiota DNA sequence
cttaccaaccagaaatttccgctgagccataatttgcgaagctgaatgtgtggtaagtttttagccatccatgattaaaataacctctcgtgttggctttgtcaataatcgtcttcataacttaatgtcttttctattggaatgttgttattgatataacaaattagaagttgaaaagtttggaacattgttgagtaatgaaaaaaacggggcggtgtaaaataaaagaagagatgatcaaatcatctcttctatagagcggaagacggggctcaaacccgcgaccctcagcttggaaggctaatgctctatcaactgagctacttccgcaattttttgtgggcaaagatggattcgaaccaccgaagtcgaaagacagcagatttacagtctgccccatttggccactctggtatttgcccattcgcttttaagagtctatctcaattctctcattgagtaggtttgtttctcaattgcgatgcaaaggtacggcttttttttgaatatgcaaattatgcaagaactttttttcaaaaaatctgcgttttttgcaatttctctttaaaatcgagcattttgatggcagttattgcacattcatcccctttatttcctaatctcccaccggcacggtcttctgcttgttgcatagtattggtagtaatcaaaccatagattacaggaatatctccttcggcattcagttgggcaataccttgagtggtaccggcacatacataatcaaagtgcggagtatcgccacgaactacgcagcctattgcaatcactgcatctacttttccactttttatcatttgtgcagaaccgaaagtcagttcaaaactgccgggtactgtttgtactaaaatatttttatcttttgcgccatgtttctttaaggtacttatggctccttccaatagggggccggtaatgttattgttccattcggatactacgataccgaaacgcatattttctgcattaggaactgaattgaaatcgtaatcagataagttatgatacgctgttgccattgttttttagttttagtggtttaataaaagaaagaggttatctgtacacaggtgcagacaacctctttatatcattaaggtatattcttttcttatttgatggatgcacgttcgatgtacttatcaatgtccattgactggtaagaattgaagtatttttctttcaccaaagtgtatgctttaacggcttcactattcttgcccaacttttcgaacaattgaccagcttggatcaaatagataggactcaatgcctggctgtctgctttatccgctgctttcagcaaagttcctgcagctttgtccaattgtcccatttcagcataacagttaccgatagttcccaaaatggcagggctcaccagctggtctttagcgctgaatttatccagatatttcactgcatcttcatatttacccaactgtgcatagcagatacctgcataagcattggccaaattaccagcagcggttccactgaattcatctgctactttcagaaaacccttgtaaccgatactgtcaccattcaatgcggtttcaaagttatcagctccgaaatattgttctcctttaaataaagcttctgatgcttttacttcattggggtcagaaataaaatgcttatatcccatgaaaccagctatgataatcactactgctgcaatagttccaaggattcttcctttgtacttgataaggaatgcttctgaggtactcagtgcttcttccatatctaatgggtcctgagtgtgtttttgttctgccatttttatatttacttttttattatttttcggatattctttttcggtcagcaaaagtagttcatttctatgtattaatgaaatttacgggcatatttttttagtttttcccgtttttatctctaattttgtatcctcaattaaatagaagttctatgatactgaaacgcatctcgatattgaattataaaaacctggagcaggcggaattggaattctcgccgaagatgaattgttttatcggacaaaacggtatggggaagacaaatttgctggatgcggtttattatctttctttttgtaagagtgccactaatcctattgattcgcaaaatatccgtcatgaaggagaattctttgtaattcagggtttctatgaaacagatcaaggtgagccggaagaggtatattgtggattgaaacgtcgtcagaaaaagcaattcaagcggaataaaaaggaatataaccgtttatcggatcatattggctttattccccttgtaatggtgtctcctgctgatgcggagctgattgcaggaggtagtgacgggcgccgtcgttttatggatgtggtgatatcgcaatatgataaggaatatttggatgcgctgatacgttataataaagcattgacgcagcgtaatgctttgttgaaatcggaacaggaattcgatgaggaattaatgctggtatgggaggagatgatggcatctgcgggtgaggtcgtctttaagaagcgtagtgagtttattgctgagtttatacctactttccagtctttttattcttatatctctcaagataaagagaaagtgaatctggcgtatgaatctcatgctatgagtgggggattgctggatattatcaaggagagccgtcggcgcgaccgtgtaatgggatattcgttgaagggagttcataaagatgacttgattatgcagttgggggattttccgataaagcgggaggggtcacaaggacaaaacaaaacttatcttatcgccttgaaattagctcagtttgactttttgaagaaaacgggcggcaatactactcctttattgttgttggatgatatttttgataaactggatgcttttcgtgtggaacagattgtaaaactggtagccggagatcgtttcgggcagattttcattacggataccaatcgggatcatttggataaaatattgaagaagatagaaagagaatacaaagtctttgctgtagaagatggagaagtgacagaaagaaaggaaatggctgaatgaaacgtaatgatgcggaacaaataggggaaatgattcggaaattcttccggcagaatgctttggaggcgccactgaacgagtatcgtctgatacaggcatggaaagatgtggtgggacctgccattactaaatatacgagtaatctttatattaagaatcaaattctttatgtacatctcacttcatccgtgcttcgtcaagagttgatgatggggcgtgatttattggtgaaaaatctgaataagcaggtcggcgcacaagtgatagtcaatattattttccgttgacaggatggtcttctgctgtttctttggtatccccgaagtttcctgcaatacttcttgtcaggtgcggattttgacggatttttcttatctttctcgtaaagtccgcacttgaagaagtgtaatgtgtaagagtagcttatggaacagtccgtatcacgatagattctatttcaatattccattctcagtccagacttcatccattctccggtcgaaaggttcgacaggcagcttttcgtttacttgaaaattataacatatacctatattataggaatgaagaagaggcagtaatttgtcataatatccttttcctcttcccaaccggttgcctcgggcatcaaaagaaacacccggtataatggcgaagtctattttctcatacgctgtaaatgcttctcccgtcggttcctctatgtgataagcctcaccggttttcaggttttgcctgcctgtataaatacgaagttccaactcatctcctttaactaccggcagcaaaactgttttctgccggtgccatttttcaacgaagtcatgtgtctgtacttcatcatccaatgaataatagagcaaaacggtacgggccgatgcaaacttgggatgctgttccagtttctcaagcaaagcagcggacttcgttattaattcggtgatgccgtgacggcgcttttcttgcgctatctgcttgcgcagttgtttttttagtttcttcatcgcttacttttggttctatgggttgttcgggagctttgggaaatgattcacctttatccaatacttccaatgctttgaggacagtcttgtcgctcttgttcaagtattctatataagcttccatgcccagcatattataaatgatgtttccgtataaatttgtttcaaacagtttctgtgatttatacatcaatatgttgcgacgttttagccctttgttctcagcgaaacgggcgaattgttccaaaatattctgatgcttcaaatattgcagcaggctttcctctgtttcatatttttgcatttcggcacggtggttgtccgtatactggaaagcaaactggatggtcagtccgcgattaacagccatgcgataataggaagtcatgccggtagtatcctgtggtacaaagatatcgggcataatacctccacctccatatacaggacggcctaaagaagtttcaaagatttggctttgatcctgcttgatactgtcttgtgagaaaaattctccgtgttcgtaacgggtcaggatatccatttcataatttgcgtcattaccttttacatacggtttctgtatgcagcgtcctgacggagtatagtaacgggcaattgtcagacggatggctgaaccatcgctgaagtcgataggttgttgtaccagcccttttccgaaagagcggcgcccgatgattgtcccccggtcattgtcttggatagctccggcaaaaatttcgctggcagaagccgaaccttcgtccatcaatacgacaatgggcattttctggctacttccggttccgttggatgtatagttctcgcgtggagacttgcgtccctgtgtataaactatgagtctgtttttgggtaagaattcgtttaccatctgaattgctgcacccatatatccaccggtattaccgcgtaagtcgatgaccactccttcgcagtttgcctgatttagcttggctaatgaaatcaataattcgggataagtcgtttcaccgaatttgtttacttttatgtaaccgaatttgtcattcagcatataggcggcatctacactctttaccggtatgtcaccacgaacaatggtgaaatgtaaagtttctttttctcccggacgaaaaacgccaagttttacctcactgcctttgggacctttcagtcttttcatggattcatagttggtgacaatttttcctacaaaggcactgtcatccacttctatgatgcggtctcctgccatcagacccactttttctgatggtccgccttggatgacattgtttacatggatggtatcttgctggatggtaaactggataccgattccgctgaaacttccttttaaatcagaatttacagcttccaggtcttttgccggaatataagaagagtgggggtccagctcacctagaatttgcggcatagcatcttccaccagttcacccatgttcactgtatctacatattggtcgtcaatgatacgcaacaatgcattcagtttgttggatgaagtattaatgatacctaatttgtttcctgaaaagtggttggcgtaaaaagttccaatcaatattccggttacgatgcttactgcaacgattaccggcataaaacgggatgttcgatttttgctcatatctttatttgctattattcattgggattgatatagattacttcaatatttgcgcgtttcaataaatcaagcccgtcttccaaacggtatttttctgagtaaactacacgtttgattcctgcttggatgatgagtttggcacattctatgcaaggagatgcggtgacgtacatggttgctccgtcgctgctgttgttgcttcgtgctattttggtgatagcattcgcttcggcgtgtagtacgtaaggcttggtgactccgttgtcatcttcgcatacattttcgaatcctgcaggagttccgttatatccgtcggagatgatcatcttgtcttttacgatcaatgctcctacttgacggcgttcacagtatgaattttccgcccaaatactggccatgcggatgtatcgtttgtcgagtttgagttgtttctcttctttcgtttccattatttcagtcttgcttattatgtgcaaattgaatataagtttttttcccttcgggagctagcaataaaacattgctgtcaccttgataaaatattgcattattcaatgcttctatgaactcgttgttatagcttgttgaaggcggagtcttggtaaagtttatgtttactgtccggtcttttccgtccgcttgccatgtgccttcaatggttccattttgtatgcttcctgtaaaagtaccatccgctttgaaagtgatgttgaaaccatgaatgatatccaaggcttttcttccttcggttgcgatagtcttatccggattgtgtgccattgcattgtatttgggctctccgttccgtttgtcccaatttgctttaccatagaaatccactacatgccatgtgccgcttgcaaagatttcctctacatcgtcttcattgttgcaactccataagaaaggaagtagcattagtatataaagaatagactttagtttcatattgtttggttttttagttgatgattccatttcttttcagcaaggcatggatactgggttcttgtccacggaagcgtttgtaaagggtcatcggatgttccgttcctcctttcgagagaatattctcccgaaaagaagcagcgacttcctggttgaagatttctttttccttgaataaggagaaggcatccgcatccagtacttccgcccatttataactgtagtatccggcagaatatccccccgccataatatgtgagaactgtacggacatgcaggtgtcttccactccgggcagtacttgcgcttttttccatgcttctttttcataagcgcggacatctccgtcaaatgtttcccggcgggtgtaccatgccatatccagcaagccgaaacttacttgacgcaggcaggcataggccacattgaaattggatgcatctacaatcttttggatcagttcggcaggaatgggttctcccgtctgataatgtctggcgaatgtattgagaaattctttttctgtggcgaaattttccataatttgtgatggaagctccacaaaatcccaatatacgctggtaccactcatggttgaataggtggtattggcaaacattccgtgcaaggcgtgtccgaattcgtgtagaaaagtgtttacttctgagaaagtcagcaatgccggtttcccagccgatggcttggtgaagttcatggtaacggatacgtggggacggctgttgactccgttttctatccactgctccttatagctggtcatccatgcgcccgaacgttttccggcgcgggggtggaaatctgtataaagtacagccaggaaacttccgtctttgtcgaatacttcataagcttttacatcgggatgatagaccggaatttctttattttctttaaatgtgatgccatacagacgggtagccagaccgaatacacctttctctacttggctcagctcaaaataaggacgcagctcttcttcattcagattgaatttcttatttttcagcttttctgaataataggcccaatcccatggcatcagctggaaatcattgccttccatttcgcgtgccaatgcttcaacttctgccacttcctttagggcggcaggggtataggcatccagtaattggttgagcagtttgtatacggcatcactcgtttcggccatgcgctttttcagtttatactcggcaaaagtggagaagcctagtaaatgagccagttccatgcgaatgtttaccaattgcttgatgatgtccacattgttgtattcgttattgtgtgtacattgggtattataagccatatagacttctctgcgcagtgaacggtcatcacaatatttcatgaaaggaacaaaactgggagcatccaatgtaatgatgctgccttcttttcccttatcctttgctgtttgagcataactttccaatgaactttcgggtaatccttccaattgtttttccgtcaaagccaattcgtagttatttgtttctttcaacagattctgagaaaaacgtaaggtcaatatgcttaattcggtattcagttggcggaacttttcttttgcctcaccggtcaggttggcaccgcttcttacaaaaccatcgtatgtcttttgcagcagttgggcgtcttcacctttcagttgtaactggtctttctgctcgtatacggcttttatgcgagcaaacagtttttcattcagactgatgttgttgctgtgttcggacagtacgggcatcattttttctgccaattcctgcatctcgtcactagtctcggcactcatcaaattgccgaaaacagtagttacgcggtctagcaacgcacccgagttttccagagcaacaatggtgttttggaaagtcggtgcttcgggattattgacaattgcatcaatttcctcattttgttctttcattccttccaacaaggcaggttcataatgttctatcttgataagatggaacggagccgtgtcatgaggggtgttatagggttttaaaaatggatttttattttcagtcatagcactattttatttgacttacaaatttgctaaaaaaaagcatcactatcctcattctatttacttatttaacaaagtatattaaatagttaggttaaaaataaaaaagcacaagcagaaatgcctatgcttttcatttttatggttttttacctgattatttattcttttcagtcagtttttccaacgccggaatggagatttcctttctgctgagttgtaccaatccctgttcctgtaaatcattcagcacttttgacacattgattcgtgtctcatcaatcaaactcgccaaatcctccattttgattttaaggattttttttccttcgggcttcatggagcgcagcactaaaaaattcagtattttttcttctgtattacctatgtggctgttccataatttttcgtatgccacttgtgctctattactcagaatatttaaatagttaaggcggaagatttcgtagttgttcagttcattcaatacaaataacttgtctatggtaactatgttaatatctgtacgtgctttgtaagtcgctgtatagttggtttgcatgccgaataatgaatagggctctataacgaaaggacttccaaaagtttcaaataaggcgtatgaatgtcggttatcggttgtttgggagattatctccccatttaagagaaagattaattgagtgcaaggtgcaccttgttccacaatgatatcatcggcgttgtatttacgaaaatgtagctttaccttgcctatgatattggtgaagtcatttttacataatccctggaagagagggagttgtaaaagtgtatcatacattgtaatttccataagttctgttgttcgttaagttatagtttaacatacaaaggtaacgataaaacgagatttattatttataggtggaagaacttttattttttttattgtttcttaccgtctcctaatgtttaaaagcagaatacttgcggactgtataaaaaataaatatatttgcattcaaaaaaaaggaggagtttatgtttggatcatttgattttcaagaatttttaagtgcgtttattgtgctttttgctgtcattgatattatcggatctattcctattatattgaatcttaagcagaaagggagaaatgtcaatgctaataaagctaccggcatttcttttgctttattgataggtttcttttatgcaggggatatgatgctgaagttatttcaagttgatattgcttcgtttgccgtggcgggtgcttttgttatttttctcatgtctttggaaatgattctggatatcgagatattcaagaatcaaggtcctatcaaggaagcgactttagtccccttggtttttccgttattggctggtgcgggagcgtttactacgttgctttccctacgttcggagtatgctcctgtaaatattgttgtagccttgatattgaatatggtttgggtttatgtagtgttgaagttgacagatcgcatcgaacgtttcttggggaaaggtggaatttatgttattcgtaagttttttggaatcattttgttggcaatatcagcgcgtttatttactgctaatctgactttattgatagagcagtttcagaaagctcagtaatatgctgtttttttacagataataatgtcggaactcaccatagatattttattggaaaccaactgctttgtgttgaatggatattaatctgtggtgagttccggtatcattccatttgaatggtagctgtttgatattttgatacgctcctttggtgtctatttctcgttgatgatgaatttcttcattccgtctgtaaaataagtttcatatttatctccttcgcctgagcaaataaaataagcatccagttcaggatgtgcttcacaaaatgctttggctgagtccagtcccatcaccatgaaagcagtggcgtatgcatcggcactggcgcaatcttttgcaatgacagtggatgacaggatactatgttgtactggatatccggtgcgtgggtctatggtatgtgcatatttctttccacctttgtaatagaaattacgataattccctgatgttgccatacctacatcactaatggcaagcacagtctgtaactcctggtttactgacaaggagtcatctacaggtttgtttatgccgatacgccaagcgttcattttggaatttttgcctcttaccactacttcaccgcctatatctaccatatagttttttatccctttacgttccaatagccttgctactgcatctactccgaatcccttggctatagcgctgcaatccagcattatacgagggtcttttttcataatccggttgttctgtaaatctattttttgatatcctatcatttggcgtaagctgtccactatcagtgaatccactcctgtagattttttgaatccgaatccccatgcatttaccaaaggtgcgacggtgatatcaaaggctccatgggtttcatcggatattttctttgagagatggaatacatgtacgaaaaaactgtcaacttccgtcttttcattgtggtttacgcgggtgattacggaattcggattgaaaggagagagggagttgtccactttcttcagttcagtttctatttcttctttcagattatcttcggactggtaggtgattttgtatactgtaccgaatacaaagccttcatccgtacggaaaggggcttgcttttttagaataataattgttcctattatcagaattgctagaaacggcaattgccatgctaatttttttttattcatacctgtattttagttaagaaagaaataaatgttctattaaaattttaacgccgataataatcaaaaccaaacctccccataattccatgcgcaggttgaaacgcttgccgcaaaatacacctatcagacttcctaatgttgagataacaaaagaggtaaagccgatgatgacaataggagaaagaatagaagtgaaagagtttattcctacaaaagcaaatgatataccgatggccaaagcatcaatgctggttgctatagccagcgtaacaaccacttttaatttagtggggtcgaagcagcgtttgtcttcattgctgaagctctcttttatcatacgccctcccaaaaaggccaataacccaaaagcgatccaatggtcataatcctctatcaggtgactgaatcggctggcggcaaaccagccgataagcggcatgacagcctggaaaaggccgaagaagaatgccataataaaaaaagtgcgccagcaaatgcgacgcatgataattccgcttgttatggaaactgtgaaacagtccatagcaagactgatggcaaggagccatatttctaaagttgtcattggttaaaatggtaatttgtatattaaactgtatgttactcctaagttagtcgagttgttttttccaaaaccgggaatataccaaggctcggtgtgttccgccttttttatgttcatgcgtatacggtaacgtagtgaccatcccatgtagaaattcttgtacacatttacctttattccagccagcagttctgcccaggttactgtggttttaattccgtcataactgaaaggaatttcaggaaatccccatgtaggatccttcattgtcggagcatctacatcgtatgaaaaagaggtgaatccgtaacgtatgcctccatatagaaaaccaggcagatagggcttcttgaaaaagaagttgtagttcatgcctatgcggaaataaggagctgaggctttataatgtatattggtaccgtcatcagtagtgtcggtggttccatatccaatttcagctacggggacataacggtttttcaaattgacctccacgctgatttctgtacttgtaatgtcacctccaaaaattttgcttcccaggccaaatatatctacaccgatagtagttccctgatagaagggtaccttttcttcctctatggttgtttttttttcttgtgccgccagtgtggggctgtacaacagcatactactcagtagcgttaacaacgtaatatatgttgaaattctttttttcttcattattgatgtccgaatttacaatctcgatagattttaggttataggtggtgtatttaatgtcttccactttataaaacatcatggtgccacattctatattctgcaagtaggggatattctggtgaatgagtgtgatagtgtcacgcatcttttccgtataatgcaatacgtaggtagtttttgatgtataactcaaaggcaggctcatactgctttccgctttattgaatatcgtgtcattcatcaatgagtcttttactacagtttccttaatagttccatcttccagtgtgtcacgtacaatcacatcggtagtgataaatccagtgacgtcaaaagccggactgaattttacagcttggtgtgtctctgcatccagaaagtcgaaatgggcaaaggaattggtggtaagcggacaatcgctttccccacagctttgcatcaaggtgcttacggtaatcaggagcaataagataatggctggtagtttcttcattttaaaactctttctctattttataattattgcgttcaggagcattccgggctatcaattctcctatgaatccagccagaaacagttgggttcccaaaatcatcaaagttagggccagatagaagtaaggagaatcagtaattaatatataaggtaaaccatgtgacaaggcatatagtttgttcgctccgatgataatgacggaaatgaaaccaagaataaacatcaatgatcccataaacccgaagaagtgcatcggcttgataccgaatttggataaaaaccacagagtaatgaggtctagataaccattgaagaaacggtttaatccgccgaattttgttttaccgaattttcgtgcctgatggtgtactaccttctcggctatcttaggaaaacctgcattctttgccagataggggatatagcggtgcatttcaccgtatacttcgatgttctttacgacatcacgacgataagcttttagtccgcaattgaagtcgtgcaggttcttgatgcctgaaacggcacgtgctgtggcgttgaatagtttggtcggaatggtttttgataacgggtcgtagcgtttttgcttgtatcccgatactaagtcgtagccatcttctgtaatcattctgtataattccggtatttcgtccgggctgtcctgcaagtcggcatccattgtaatcaccacatcaccttgcgccttttcaaaaccacaatacaaggcaggggacttgccgtagttccggcggaatttgataccttttacgttgtccgactccgagcgtagtttctctatcacttgccaggagtggtcggtgctgccgtcattgacaaaaattacttcatagctgaaacggttggcatccattacacgttgaatccatgcgaatagttccggcaaagattcttcttcgttatacaaaggaataactacagatatatccatcttttattcatttttctttttacgcatcacgatcaatgccgtagggatagccattagcatcccgtaaaacatattttgtgatatcagttgaaatgtcatttccagcggggtaagtcccgacagtaaatctatcgcttcttcgaattggttcagtgaggttgtcagttcggttccggcagtttctttgaactggtttaagatggaacggtatgcctcgaatacgaatccgccatctatatagcggaagtagatgtaatgcactaccgctacaaatagagaggcgaacatatacataaaggtagtgaatagaaacgcacgtgaaaaagtgatgcttccgtcacaatgccgttctctgaactttttggcaaatatgtatcctaaaaagggtactcctatagtcaggactataaaaagtaattgtaggaaaggtattctcaatcctaacgggaagagcatgaatttgaaggcccataaaagacccatgcccgtaccatagcgcatggcgcattcctgcaaagtcggtttataattcgtcattctttattaataagtgcacaaaagtacttcttttacgggaatccgtcctatagttatgggtgaaaaatgtattttttctgctaaaatcaaaaaaaagtattcgaaagtattgtagttttgaaaataatgtctacctttgcactcgcaaaacaaaaatgggtaagtcctatacggccagctcctgatgaatcctccagggcttgatcgcagcaaaggtagttggttgtagcggcgcgatatagtaagcttacccacccccgcctctttagctcagttggccagagcacgtgatttgtaatctcggggtcgttggttcgaatccgacaagaggctcggaaaagcgagaaggacgaagaaatcttcattcttctcgctttttttattatatttgcgctgatattagttttaaggttggtacaaccgttatttaagagttcttttttatgatagagtcacagattgtggcaagagtattgccgtctaaatgccgtgaagcggtaaaagtccttttgcaggaagtgtacggatatgaagatttccgtaatttagaagtttatgatgacttgttcagaggtaaggaaaaattgcaattgtctcaaggacaattaattgaggaggtcattatggaagccgaaaaagggatcaagggtgactcgtctgctcataatttgctcctgacagctccgaccggagccggaaaatcattgttgtttcagctccctgctatttatctgggtaatgaatataagcttcttactcttgtggtttctccgctgaaagcattgatagtggaccaggttgaggcgttgcgggaactagggtatgaacgtgtggcgtatgcttcgtccgatctttcacctgaacaaaagaacgaagtatatcgtcgtgtccgtgaaggggaggttgatcttttttatctttcccctgaattattgttggcgtatgatatcagttattttgtaggtgaacgccgcatcggactggtagtggttgacgaggctcataccgtgaccacttggggtaaagagttccgggtggattattggtttctagggcgtcatttggaagctttaaagaatgcgttggggtatgtattccctgtttttgcattgacggccactgctgtgtggaatcccgaaggcgggaacgatatgatttttgataccatccggtcgttgcatcttgctccgtgtgccttgtatgtgggcacggtgaagcgtgaaaatatcggctttgacattaccgccatgaccatagaggagggggaaacctacgataaggccaagcaacgtactgttgccgcccgggtggaggattttctggacgggcataagactatcatttattatccttttgccggaggtatagatatgaaactgaagacctgggtgtatccggctaactggcattggatggcatcttattatggtaaaaaggataaagagcaaaaagccgaaattatacaagcttttaaggagggtgagaaaaaaataatcgttgctacgaaagctttcggtatgggggtggatatcagcgatattgaccgtgtatatcatgtggctccatccagcacctttgtcgattatattcaggagattggccgtgctgcccgtgataagaacattacgggtgtggcggtgacggattttaatgagcgcgacttttattatatgaaacgcctgcattctgcgggtgccatctcccaggaacagttggggatgattctgaagaaagtttgggaaatatatctgatgaaaggctgtagtgatgaaatgcagatgtctttatccgattttgaatttgcagtgaagttgcctcgtaaaaagaacaagctggaatatgaatcggatttggagcaagtcgtcaaaacggctttgttatggatagaagaggatttgagtttccggcatggcggttctcctgttgaaatcaattcacagacgttgttttccgatggctatgtgcaggaaaagacgggtgatgccgctttccgtaaaaaatacaagcagtacatggttcccgtgaaaggggttgaaggagtctataaggtggcttttgaatctttgtgggagaattgtttctcggagatgggataccgtgagtttaagcgcgatttatacaatggaaatctctttgagggagttcgtgcggcagctgtgggtaagcatgatgtcttgttaaaagagagtgcggcggatatctgctccaagctggcaagtctcttgaagagtttgaaagatttgttgacggtgagtctgtatggtaataaaggaaagttcgaggaggacgatttgcgtagtatttttgcggcgtatgatatggatgttccttctgccaagcgttttatcacttcgttactggagtccagggtagaggagggcagaagtgtgagttacatcaccagtgccaagaagaaagatgaagacaaactgatgtttaccgttacccgtggttttgatttgttgctttcccgttaccagaagttgtgtgcccagcgtatcacaggaaagaaaggagaccggctgttgttctatgtcactccgttctccgatctcaatatgctgctcaatttgctgtctatgctcaatgtggtggactttaccgtagaggggggtgttccttctgttggagtacgtgtccgtgatgcggagatattgaaaaaggaagctgcttcgggggactatcataaccatgtgctggagaataatgagaaaatattccaggaacagatagagttgttccggctgttctttggcaatacgaagttaagtgatgagcagcgatgggagtttatagaggattattttacggggatgagtttggagggattgaaagaaaaatattcttgtgttgtggaatgacagctgtaagggctgtataatataactcgttggcgaaattaattttgccttgtatgatttcacgttagtatatgaggttgtgccaacgttttgacacaacctctacttgatagccgacagtatgggcattaaattcacttgaaatgaatttgttttccaacttttattgttaatgcgaagagaacgactttgacgaatgctactctttatttggctggtacgcgcaaagtcacggaagttggaatcagcctcttgtcggcaaccatgacggtggaggaacgggaagacaatgttgtgataattgatcatcgtttttgtttttaaagggttgttattatcagaaaagtgtcaggaaggaacaaggcgcacactgctgcggcgtccggtgaaacttggtacaagatccgcggaatcttgtaccaggatttttgtaatcttgtgccggggtgcggctggttccttctgacactgcaaagataacttcacgtccgtgcggcgtgaccccttccgaccccttttgaccccttggcggattgcggggggaatcatggctctccaagtggaggcagactagttgcaactggcagcggggacacggggacagtggggacagcccctttttttctcacacacacgtgcgcgcgtataaagccggggtcagctcttgtgatacgttccccctaccgtccacactcatcggaccccttgcttggtgaaccgtttgggccgccttttcctggtggtaggttttcatcgcctttttcacctcggtgcgtatacgaaggtctgcatgcagggggcctcccaggagcagtgtgttgtgttatttggtttttttactgtaagagatgattttctctagcagctccggccatatgtcatcctgtggaaaggcaggcagggggaaataaggttcggagccttcggtgagttgttcttcctctttggtgtcattgggaaactcattttccaccttattgtatcgcgcgcacgtgtgtgagaaaaaaaggggctgtccctgctgtccccactgtccctgccttgtaagaatcggcggaactgaataacggaaaatatttttcaggaggacttgtctttaaaattcacttgaaatgaatttgttttcccacttttattgttaatgcgaagagaagtcgttatcttcgcattaacaatccatttaagaaaaagagaatgatgaaatatcccattggcatacagagttttgatcaaataatagaaggtaattgggtctatgtggataagaccgatttggtttatcgtttggtaacgacgaccaaaacttgttttcttagccgtccccgtcgttttgggaagagcttgttggtaagcacgttggatgcctatttcaaggggcgcaaggaactttttgacggcttgatgatagcgaagttggagaaagactggcatcagtatcctgtgttcaagatagatttcaacggtgttaactttacggaaaaaggaaacttggaagctaccatagaatattatcttgccaactgggagaaaatctacggagaaactccccgtgaggttcctatggggaagcggttcgaacaaatactttctctagcctatcagcaaacggggcgtcgtgccgtggtgctggtagatgaatatgacaagcctattctcgatgcattggatactcctctggaagatgccaaccgcgaaatcttgaaagctttctattccaccttcaaaggggctgatgaatacttgaggtttgtgttgcttacgggagtgacaaaattttcgcaagtcagtgtgttcagcgggttcaaccagcctaaagatataagtatggataatcattatgaagcattgtgtggtgtgactcaggtggaattggaacattattttgcagaacctattgcaaatttggctgaaaagttcaattatacagtggaggaaatgaaagacgtactcaaaatgcaatacgatggctatcattttggcagcggcttgcttggtgtctataatcctttcagcctgctcaatgcttttgatatgaacgatatccgcgactattggtttgcatcaggtactcctacttatttgatcaaacttctgcggcataaccacgagcagatggatgaattgactgggcgttactatgatccttcgatgtttgtcgattataaggccgatgtggaaaaaccgctgcctatgatttatcaaagcggctatctgacgatcaaggaatacgactcccggagaaaccgttacctgttggactttccaaataatgaggtgaaaaagggatttctgaccatggtggcagccaattatttcaaaccccaagagtttgaagtttccaactggattgtagatgccgtcattttacttgaggaaggggaaactacggctttttgttcagctttaacttctttccttgcggatataccttatgattctcatggctcgataaagacggttgaagcgacagaaaaacattttcaatatactttctatctgattctccgtttgcttggggtatattgccagttgcatgtggagaaaactcagtcaagaggaagagtggactgtgtattggagacaaaggattatgtatatatatttgagtttaaactggatggtacggctgctgaagcctggcagcagatagaggacaaaggatatgctacaccttatcagacagacacgcgcaaagtcacggctattggtgtcagtttttcatcggaaaccatgacggtggaggaatgggaggaaaaaacgttgtagcccagttgagattaaataatagtgcaaaagtaatgcctcaagccggaatcatcacgatccctcttgaggcagtcttcatttatggaattgggaatataaaccgcttacgctttaaaattgcgtgctatttttttatatccatatacggcacggttacccaattcttcttcaatgcggagcaactggttgtattttgccatacggtcgctacggctcagtgaaccggttttaatctgtccgctattggtggctacggcgatatctgcaatggtagcatcttccgtttcaccggagcggtggctggtcacagtggtgtagccgttacgttgggccatttcgatagcatccagagtttcagtcagcgaaccgatctggtttacttttaccaggatagagtttgcacaaccttcactgattcctttttccaggaacttcacattggtaacgaacaagtcatcacctaccagctggcagcggttgcccagacgctcggtcagcatgcgccatccttcccagtcgttttctgccataccatcctctatcgaatcaatggggtagtcccaactcaatttttccagataggcaacctgttcggcggcactgcgcttttcccctttggggccttcaaacttggtatagtcatagatgccgtcatgataaaattcggaagaagcacaatccagaccgatggtgatatgtttgaacggttcatatccggcagcttcaatagcggcaaggatacaattcaaagcatcttcggtgccatccagtgcaggggcaaaaccgccttcatctcctacggctgtgcttagtccgcgttttttcagcacctctttcaaagcatggaatacttctgcgcccatccgtaaggcctcacggaatgtctttgcgccgacaggacgaatcatgaattcttgaaaagcgataggagcgtcgctatgcgagcctccgttaatgatgttcatcatcgggacgggcatgacataggtatttgttccgccgatgtatctgtaaagagggatatccagatagttggcggcagcttttgccacagccagggatacgcccaaaatagcatttgcgcccagttttgatttagttggggttccatccagatcaagcatggctttgtcaatgccacgttggtccatagagtccattcctttcaatgccggagcgataagggtatttatattttctacagcttttaatacgcctttgcccccgtaacgggtcttgtcaccgtcacgtagctccaatgcctcatgttcaccggttgacgcacccgatgggacagaggcacggcccataatccctgattccaatatcacatccacttccacagtggggttaccacgtgaatccaaaatctctcttcctttaatctctgctattttcatataattctaattttataagatggttttattttaataacaatagagaagccggatttgttgaggtgccagggaaagttttttcatgatatttacttttttatttctttccacagagtacatccgtcttcttttttcgtctccctttaataaaagctagagatcaatatgaaaataaaatggatagtgggggggctgttatgggcaagttcttacttgcaggctgccgcacaggaatataaactgtggtatgacgaacccgctcaggtttggactgaagcgcttccgctgggtaacgggcggttgggagcgatggtattcggcaatcccggtgtggagcatatccagttgaacgaagaaactatttgggcaggacgtcccaataataatgctaatcccgatgcgttggaatatattcccaaagtgcgccggttggtgttcgagggaaaatatcttgaagcacaaacgttggctaccgagaaagtaatggcgaagaccaatagcggtatgccctatcaatcgtttggcgatctgcatatttcttttccggggcatacacgttattccgattactatagggaactgagcctggattcagctcgtaccatcgtgcgttataaggtggacggggtgacttatcagcgtgaaacactgacgtcgtttgccgatcaggtagttatggtgcgtcttactgccagccaacccggaaagattacttgtaacgccaatcttactactccgcatcaggatgtgatggttgcgacggaaggggaggaggttaccctttcgggcgtatcttcctggcatgaaggactcaaagggaaggttgaatttcagggacgtatgactgcacgtactcagggaggaacccgatcttgtcgtgacggagtcttgagtatagaaggggcggacgaggctgtgatttatatttccattgctaccaactttactaattacaaggatataacaggtaaccaagtggagcgtgcgaagaactatctgcgccgggctgtaagtaaagattatatgacatcacgtaaggcacacgtcgattttttcaagcaatatatggaccgtgtctctttggatttaggcatagacaaatatgcaggggtaaccactgatatgcgtgtacagaatttcaaggaaacgaaggatgattttctggtggccacttatttccgtttcggccgctatctgttgatttgttcttcacagccgggtgggcagcctgctaatttgcaaggcatttggaatgataaattatttccttcctgggatagtaaatacacgtgtaatatcaatgttgaaatgaactattggccggccgaagtgacgaatctcagcgaattgcacgagcctttgatacaactgatccgtgaagtgagtgaaacagggcgtgagtcggccaagattatgtatggggcggatggctgggtattgcatcacaatacggatatatggcgtgttaccggagctatagacaaggctccgtcgggattatggcctacgggtggagcctggctgtgccgtcatttgtgggaacgttatctttatacaggcgatatggaatttctccgctcggcttaccctatcatgaaagaagccggtaagttttttgatgaaatcatggtgaaggaaccgttgcataactggttggtggtatgtccgagcaattctccggagaatactcatgcaggcagtaacgggaaagcgactacggctgccgggtgtactttggataaccagctgatattcgatttgtggaatcagataatcacgaccgcccgtctgttgggtacggatgctgaatttgccacccgtttggaacagcgtttaaaggaaatggcgcccatgcagataggacgttgggggcaattgcaggaatggatgatggattgggacaatccgcaggatgtgcaccgtcatgtgtcacacctttatggtttgttccccagtaatcagatttctccttaccgtactcccgaattgtttgatgcggcacgtacttcgctgattcatcgtggcgatccgtctaccggatggagtatgggatggaaggtatgtttgtgggcccgtctgttggatggtgaccatgcttataaactgataaccgatcagttgactctcgtacgtaacgagaagaaaaaaggaggaacttatcctaatttgtttgatgcccatccaccttttcagattgacggtaattttggttgtacggcgggtatcgtagaaatgctgatgcagagccacgatggttttatttatttacttcccgcattgccggcgcaatggaaagagggaagcgtgaacgggattatagcccgtggaggttttgaattggatttgagttggaagaatggtaaagtgagccggttggtggtgaaatcccgtaatgggggaaactgtcgtttgcgttctttaaatccgctggcaggcaaagggctgagaaaggcgaaaggagagaatccgaataaattgtatgccatacccgaaatcttacagccgattataaataaagaagcgaaattgaataaagttgagttgaaaaaaacttatctttatgatctggaaaccaaagcaggtgaagagtatatattcttaggtaagtgatgattcttgcattgattgtaaggatgaaaaatagtaaaaagaagaaatatgaaaagaacaggattaaacattatttgctcattgttgctggctggtggaatgtgtgcatgtactgccactcctaaacagaccgaagaaatcaaatggagcgaacgtatggctcagtcggaaatgcaacgtttccctgagccttggatgatagaaaaagcgaaaaagcctcgttggggctatacgcacggactggtggtgaaatccatgttggaggaatggaaacataccggtgacactgcctattataattatgcaaaaatatatgcagacagtctgatagacaccgacggtaagataaagaccatgaaatatctttcttttaatattgataatatcaatgccggaaagattttattcgatttttatgaaaagacgggagacgggcgttataaggtggcgatggatactcttcgcaaacaactggccgaacagccccgtaccagtgaaggcggtttctggcacaaactggtatatccgcaccagatgtggctggatggtatattcatggcttctccttatctggctcaatatggtaacgtattcaaggatactacggtcaatgccgatattgtgaatcaaataaagctgattgcccgtaaaacgtatgatcctaaaaccggtttgttctatcatggctgggatgagagcaagacacaaaattgggcaaataaggaaaccgggtgctcacccaacttctggagccgcagtataggctggtatgccgctgccgtggtggatgtattggactatatgccggtgcagttcgaaggacgcgacagcattatgacgattataaatacgttggccgaagacattgtaaaataccaggagcttgaaacaggggtatggtggcaggtgactgaccagaataaccgtaaaggaaattatctggaatcttccgcttcatcgctttttgtatattttctgtgtaaggctgtaaacaaaggatatattcctgtggagtataaagcggccgcagagcgtggattcaacggtttgataaaacaattcattaaagaagagcctgatggttcatacactattaccaactgttgtgctgttgcaggattaggcggtaaaggaaaccgggatggaagttttgcttattacataggtgagccggtgatagagaacgatccgaaatcagtaggttcctttattttggcagctattgaatatgagaaaatgaagcagtaggaataatctgaaaaagatgaggacatttgtcaaaaaggtcttcatcttttccgtaaacatcaggaccttttttaaacaccttgttgttttgataaaagctcttgtttggagattgtcaattaattaataaacgaatttgaaaatacaatgatgaacagacacgcattactttccttattggctttattgctatgttgctctacttcgttgccggcgcagaaagcgaaaacgtatattccctggaagaacggcaaactggtggtgtccgaggagggacgctacctgaagcatgaaaatggagtacctttcttctggttgggtgaaaccggatggctgatgccgcaacgcttgaatcgtgacgaggtttcttactatctgaataagtgcaaggatgctggatataacatggtgcaggtgcaggtattgaacggtgtgccttccatgaatatttacggccagtattccatgacagacggttttaatttcaaagatatcaaccgcaaagggatttatggatattgggaccacatggactatattattaaaagtgccgcttcacggggcatctatatagggatggtatgtatttggggaactcccgtggaacaagggctgatgaatgaaaaagaagccgtggcatacggtaagtttcttgcagaacgttacaaggatgagccgaatattatttggatgataggaggggatatccgcggtgataataagacggaggtatgggatgcgttggcaaacagtatccgcagcatagacaaaggtcatctgatgactttccatccgcgtggacgtaccacgtcggctacttggtttaatgaccgcgaatggctggatttcaatatgttccaaagcggacaccgtcgttacgggcagcgtaacggtgatggtgattatcctatcgaagagaatacggaagaagataactggcgttttgtggaagccagtcaggcaaagactccgttgaaaccggtgattgatgacgaacctatttatgaagacattccacaggggctgcatgatcccaatgaaacccgttggaatcagcacgatgtgcgtcgttatgcctattggtcggtatttgccggatcattcgggcactcatacggtcataatgatatcatgcaatttatccgtcccggatatggagcctctttcggtgccgacggacgcaagaaagcatggtgggatgctttggaagaccccggtttcaatcagatgaaatatctgaagaacttgatgctgacttttcctttctttgaacgtgtgcccgatcagagtgtcattgcaggaactaacggcgaacgctatgaccgtgccatcgctacccgtggaaatgactatttgctggtttacaattactcaggacgtcctatgcagatcgatttgagcaaaatcagcggtgcgaaaaagaatgcatggtggtatagcgcgaaggacggtaagttggaatatatcggtgagtttgacagtaaagtcactcctttccagcatgatagcggttatctgagcggtaatgaccaggttctgattgttgtggattctgcgaaggattatgtgcagaaagcttggacagccttgccggatgccatacagaaatggaataagtaagaaatatgcatatcatgaaaaaacaagtattattaatcattcttctggcacttccgttgtggttgaaggcagcggatgtttcggttaccggcctgcgtaccgagcagatggtagaccccatggggttggatactgctgctccccgtatgagctggcggttggaatcttctcaaagaaatgtgatgcagaccgcctaccggatcttggttgcgtcttctcctgaacttttagcacaggataaaggagatttgtgggattccggaaaagtggaatccgatgcgtccgtatggattccctatcaagggaagcgtttgaaaagcaatcagcgtgtttactggaaagtgagaagctataccaatcgcggtgagacagaatggagcgagcctgcccgatgggggatgggacctttaggtgagattcattggaaaggacgatggataggttgggacgctgcgtttgcatgggatcgggaagattcacacagccgtttgagctctcgttatttacgcacggaatttaaaacgcaagccaaggagataaagtatgctacccttcatttgtgcggtttgggtatgtacgaactgttcattaacggtcagcggataggtgatcaggtattggcgccggctccaagtgattatcgtcgtactgtgctttacaattcttttgatgtcaccaaacaggttgccggaggaaatgccgacaatgccatcggagtgaccctgggcaacggacgtttctacactatgcgtcaaaattacaaaccttataagattcctacttttggttaccccaagttgcgtctgaatctgattatagaatataccgacggcagtatccagcgcatcaacagtgatgagaaatggcgtttgacggctcaagggcctatacgtagcaataatgaatacgatggtgagatttacgatgcccgtatggaattgggaaactggacacagcccggttatgatgattccaaatggctgaaggcgcaacgtgtttcattgccgtacggtacactccgcggcaataccgctcccaacatgaaagtgatgaaaacgctgaagccggctgtcttcaagcaatatggtgaccgttatatgattgatttcggtcagaatatggcaggatgggtgcgtattaacatagcgaaagccgctgcgggagatacgatttgcatacgttatgccgaacgggtaaagaacgacggtacggaactggatgtggaaaatctccgccatagccagagtacggattattatatctgcaacggtaaagaaaacaacacctcctggagttcccgtttttcttatcatggattccaatatgtagaagtgacaggttataaaaatctgaaagcagaagatttggttgctgaagtagtatatgatgacttggaagataacggtactttcgagtgttccaatgatatcatgaaccgggtttatcggaatgcctggtggggaatttccagtaattataaaggagtgcctttggattgtccgcagcgtgacgagcgccagccctggcttggcgaccatgctatgggaacgtggggggaaagtttcatgttcaacaatggaaacacctatgccaaatgggcggatgatatccgtgaagcgcagcgtgaagacggttgtattcctgatatttgtccggcttattacaattattatacatcggaaatgacatggtcgtccacattcccggtaatctgtgatatggtttatgaacagttcggcaacatcgaacctattcgtaagaattatgccgctatcaagaaatggatgcaccatatacgcagtgagttcaccacagaggatggagtgattaacgccgataaatacggtgactggtgtatgcctcccgaatcaccggagctgattcacagtcaggaccctgcccgcaagacggatggagcactgattgctacagcctactattataaggtgtcgcaaatgctggccaagttcgcccgtttgcaaggtttggaagatgaggcgaaaggattcgagaaggatgcagcaaaaatcaaagactgcttcaacgcccgtttccttacggttaagaagggaacttctccggtacaaacgccgcatgttctttatcccgacagcatattctatggtaacaatacggtgacggccaatatcctgccgctggctttcgatatggttcctgaggcttatagggaagaagtggagaaaaatgtaataacaggcattatcacccggaataaaggtcatatcagcagtggggtgataggtatgaactggatgatgcgtgagcttacccgtatggggcgtggcgatgttgctttcctgttggcaagcaacaagacttatcccagttatggctatatgatagaaaagggagctactgccatttgggaattgtggaacggtgataccgccaatcgttggatgaacagttgtaaccatgtgatgatattgggtgatctattgacttggtatttccgtgatttagccggatttaatccggcacagcccgcttacaaacaaatcatccttaaaccggatttttccatccaggagttgagtcatgtcaaggcttcgcacaatactttatatggcaagatgattagtaactggaagaagacccttacgcatctggaatgggatatcacggttccctgcaataccactgcattggtttatcttccaacgttggacgagaaggcggtaaaagacaaggacgttacctttgtacgtcgggaaggcaactctaccgtatggagtgttccttcggggaactatcatttttcggttagcatggacccttcttcaggtaaaaaccgtgcaggtatcgtggaagatcagttcctatacgaacaagcttcttttcccgaatgtcacggcgctactattgtggaattgaagaacggagacctggtagcttctttctttggaggcactaaagagcgtaatccggattgttgtatctgggtatgtcgcaagccgaagggcgcgacggaatggagtgcaccttatctggctgccgacggggtgtttagtctggatgatccgcaggctgtcttggcaggcattacggcagaatccactccggcggatgccggccccgtggcttctacgtttaaaggggataagtcccgggcacgccgcaaggcttgttggaatcctgtgcttttccagatccccggcggagatctgatcctgttctataaaataggattgaaagtagccgattggagtggttggctggtacgttctaaagatggtggaaaaacttggagccaacgtgaaccgttgccaaaaggtttcttaggccctattaaaaataagccggagtatgtggatggccgtatcatttgtccttccagtacggaaggcgatggaggatggcgtatccattttgaaatttcggatgataaaggaaagacttggaagatggtaggtcctgtagaggcggaaatgagtgtgcctacagctttgcgtaaggcaaatgcggccaatgtagacgatcaggaaggcggtgaagccataaaaggagaaggcgagaagcctatttatgctatccagcccagcattttgcgtcataaggatgggcgtttgcaggtactttgccgtacacgtaatgcacagattgccacttcatggagcagtgacaacggtgaaacatggagcaaagtcactttgcttgatgttcctaataataattcgggtacagatgctgtgacgatgaaagatggccgtcatgtattgatttataatgatttcagcacattgccgggtactccgaaagggccgcgtacaccgttgtgtgtggcggtttcggatgatggcattcactggaagaatgtaatgacattggaagacagccccatcagccagtattcttatccgtccatcattcagggcaaggatggcaaactgcatgccgtatatacctggcgccgtcagcgtgtggcttataaagagttggatttgagcaaactgaaataatacaattgtggataaaggaattctttgatagagagtattggagaatttgaaaaaaacgggtgtctgaaataaaaatcagatacccgtttttttgaaaacagactcccattatccgccaatgaaagctctttctaaagatacagaatatgaaataattataaatagagtacaaacgtttcttattatcgtcctccctttataaagaaaagaataagtgacagattattatgaaaagcattagactactacttttactggcttccggagtaactacgggagcatttgcccagtcgggcgggctgacggatatgagccaaagtcgttttgccaagatggccaatacggaattaggtgccgtgcattggacagatggcttttggggcgaccgtttcaatgtatatagccatacctccttgcaaagtatgtgggatacatggaacaatcccgatgtttcgcatggcttccgtaactttgaaatagctgccggtgtttgcgagggcgaacattggggacctccctttcatgacggtgatatgtataaatggatggaaggggtggcttccgtgtatgccgtcacgaaagatcccgaattggataaactgatggatcacttcattgaacatgtggtgaaagcccagcgtgcggacggttacatccatacccctgtcatcatcgaggaaaagaataaggggattgacactcattcggacaaacagcaacagacggtaattggcaccaaagtaggcggtgaggacgagaaaggtgcatttgccaatcgtctgaattttgaaacctacaatttggggcatctgatgatggcaggtatcattcatcgccgtgccaccggaaagactactttattcgatgctgccgtaaaagcgacggacttcctctgtcatttctatgaaaccgcttctgcggaactggcaagaaatgccatttgtccctcccattatatgggtgtggtggaaatgtaccgtgctacagggaatccccgttatctggaactttccaagaatctgattgatatccgtggtatggtggaaaatggcaccgatgataatcaggaccgtattccgttccgtcagcaatacaatgcgatgggacatgccgtgcgttccaattacctgtatgccggtgtgaccgatgtgtatgccgaaacaggagaagaccaactgatgaaaaacctgaccagtatctggaaagacattgtgacccgcaagatgtatgttacaggagcgtgcggtgcgctgtatgacggcacttcgccggatggaacctgctatgagccggacagcattcagaaagtacaccaaagctatggccgtccttatcagttgcctaatagtacggcgcataacgagacctgtgccaatatcggcaatatgcttttcaactggcgtatgctggaagtgacgggcgatgccaaatatgcggatattgtggaaaccgccctttacaacagtgtgttgagtggtgtcagtctggatggaaagaaatatttctataccaacccgttgcgcatcagtgcggatttgccatacacacttcgctggcctaaagaacgtaccgagtatatcagctgcttctgttgtccgcctaatacgctgcgcaccgtttgtcaagcccagaactatgcttatacggtgactccgaatgcggtatattgcaatttgtatggagcgaatacactggctacaactttgaaggaaacgggaaagatcgggctggtgcaagaaacggagtatccgtgggaaggcgctgtgaagctgactgttaccgaagctccgaaaccgtcaaagaagaaagcgttttctttgttcctccgtgttcctgactggtgcgagaaagcaactttgaaggtaaatggcgaaccggtgcaaggaacctggaaagcgaatacatacgccgaggtaaaccgcatctggaagaaaggggattgtgtggaatgggtgatggatatgcctgtaaaattgctggaagcaaatccgttggccgaagaaatccgtaaccaggtagtggtgaaacgtggcccgttggtctactgtctggaaagtatggatatagaaggcgggcataagatagacaatgtgctgatacctgccgatatccggttgactccgaaaaaaataaccatcgaaggcagtccgattgtcgcattggatggtactgcccgtctggtcgatgaagtatcatggaaagatactttgtaccgcgaggtaggaaaggccgacaaaccggtccatatccgtctgattccttattatgcatggggaaatcgcggaaaggctgaaatgacggtatggatgcctttggcacggactaatcactaaccacttacccctaattagttacaaatgaaaaaaatattcataaccactgccgcgctgctgatagcttgtacactgtcggcagccgatttgttcgtatctccggaaggcaatgaccggaatccgggtaccaaagactttccgaaagccacccttacagccgcattgcgtcaggcaagggaacttcgtcgtcttaatgatgaaagtgtaaaaggtggcatcaccatccatctggaggcaggtgactaccatctgtacgaacccgtctttatccgtccggaggacagcgggacggcagcttcacctaccgtcatcacttcggatggaaatgccgttctgaatggtggggtggaaatcaggaactggaagaagcaaggaaagttgtgggtagccgatgttcctatgtttaacgggcgtccgctggatttccggcaactgtggatcaatggacaaaaggctgttcgtgcaagggatgtggcagactttgaaaagatgtaccgcatcatcaacaacgacccccaaaacgaaatactgtgggtacctgccgctgctgtaaagaaaatacagaaggcccgatatgccgaaatggtccttcatgaaatgtggtgtgtggcaaatctccgtatcaagtcggtcgaaatacagggagacagtgccgccgtgcgtttccatcatcctgaaagccgcatccagttcgaacacccgtggccgcgtcctatggtgaccaaggatggtcacaactcggctttctatctgaccaatgccatggaattgctggatgaacccggcgagtggtatcacgacattgaaagccgtaaaatatattattatcctcggaaaggagagaagataagcaaagccgtagttcccggcatcgaaacgttggtatgggtggaaggaacgatagaccgtccggtaaagcacatccgttttgacaatattgctttccaatataccacctggatgcgtccctctttgcaaggtcatgttcctcttcaggcaggtatgtacatgacagacggatataaaatccgtccttccatgattcgtaagaacaatcataagctggataatcaaggttggttgggccgtccggcatcggcagtcgtagtcaaggctgcctgggatattgatttcgagaagtgccgtttccagcatttgggctctacaggcattgattatgaatgggccaccgatggaggacatataaacggctgtctgttccgtgatattgccgggaacggtattgtagcgggcagtttcagccctgccgctcacgaaacacatcttccatacgatcctgccgaccgtcgtgaggtctgtaccggactgaccatttccaacaactacatcaacgatgtgaccaatgaagactggggcaccttgggtatttgcgccggttatgtcagtgatatcaatatcgagcacaatgaaatcagtgatgtatcctattcgggcatcagtctgggatgggggtggacacgtacggtaaactgtatgcgcaataaccgcgtgcacgccaacctgattcatcactatgccaagcacatgtatgatgtagccggtatttatacattaggttcacaaccccatagccggattacggaaaattgcgtttccgacatattttcacccggttatgcacacgatcccaatcattggttctatctttacaccgatgaaggatcttcatttatcaccgtcaaggacaactggacggaaggagagaagttcctgaagaacgccaacggtccgggcaatacatgggaaaacaatggtccgatggtgaacgacagcatcaaggcaaatgccggactgcccaaagaatatagctatttgaaggaaaaataaaacgtgatactattatgaaaaacaaacttgccactttagtcggagcacttgcattgagtgctgccgcctccgcccagacctggatctggtatccgggtgattatgagatatggctgggcaaccggatgaacaaccgccgtacggaacgcggtgcttttttccctcccttctggaaaacggacagccattatgtggtagtggaattcagcaagaaattggatctggcggaaccggaagagatcttcattgccgccgaaggaaaatacaatgtgaagttggacggcaaactgcaattcggtatgccctccaccttgaaactccccgcaggaaaacacagtctgaacatcaaagtgtggaatcagtccactccccccactatttatgtgaaaggaaaaaccgtaaatacggacaagacctggaaagtaacctacgaagacaaggaatggatagacgaaagcggaaaagccagtgatacttctgccaccgtttatatggatgcagggtgttggaactttgacggagccacccaactgccttccaagttttcattggccagaaaaccgatgaaagcagtttcctccactccccggaaagaaggggtattgtacgacttcggaaaagagacctttggttatatcactctgaaagaggtaaagggaaaaggaacgatccatatctattacggtgaaagtcctgaagaagccttggatacggaatattgcgaaacattggacaaattgctggcagagccggggcagataaccgatctggccatccggaatacacggaaactatacgatgaatacacgttggacaacagcaaggcctttcgttatgtctatgtcacttgcgatccgggagtaacgatacaggacgtttccatgcaatacgaatacctgcccgaagagtaccggggttcattcaaatgcaatgacgaagagctgaaccgcatctgggaagtaggagcatacaccatgcaccttactacccgtgaattctttatcgacggcatcaagcgcgaccgttgggtatggagtggcgatgccatccagagttacctgatgaactactatctgttcttcgataatgaaaccgtgaagcgtaccatctggctgcttcgtggaaaagaccctgtgaccagccacagcaataccattatggactacaccttctattggttcctcagtatttacgattactatatgtattccggtgacaaagactttgtaacccaactctatccgcgtatgcaaagcatgatggactatgtattgggacgtaccaatgccaacggtatggtggaaggtatgaccggtgactgggtattcgtagactgggcagacggttatctggacaagaaaggcgaactctcctttgagcaagtcttgttctgcaagagtttggaaaccatggcgctttgtgccggtctggccggcaatacggcagacaaaaccaagtatgagaaactggcttccgctttacgttccaagctggaacccgctttctggaatgagcagaaacaggcgatggtacacaaccgcgttcagggcaagcagagtgagtccgttacccgctacgccaatatgttctctgtcttcttcaattatctgaatgccgataaacagcggaccatcaaacactccgtattgcagaatgacagtattttgaaaatcaccactccttatatgcgtttctatgaactggaagcactgtgcgccttgggcgaacaagaatcggtgatgaaagaaatgaaagcctattggggcggtatgttgaaagaaggagctaccagtttctgggagaaatacaatcccgaagaaacaggtatccggcatctggccatgtacggacgtccatacggcaaaagcctctgccatgcatggggagccagccccatctatttgctgggcaaatactatctgggagtaaaacccaccaaacccggttacgaggaatactccgtcaccccttgtctgggcggcttgaaatggatggaaggaaccgtgcccactccatacggcaatatccatatctatatggataagaaagagatccgtatcaagtccgacggcggaaagggagtgctgaacattccaacccggaaaggaatgaaagccatgaccatagaacccggagaagaacaagtcttcaaatactgatggaatagatcaaaaaaaaggtgatacctaccttcccaggcgggtatcaccaatactgtttcgtaagttcccgttatccgctgataacagtacttacctctgatctaacattagttttcttatgggcttccgcctgtatcactacattaggaagcggagattctacatcttggaaaaaagtatcttccaaaagcttcgctttttagtctcttctttattacctgaactttgataaatatcttcgtatccccatttgtcatggatcattctgtaaatcatcccccattcgggcagtcctcccagattacggtcatcaataaacaaatccgccttcagttttctggagtaatgattactttccagggtttcttccgcataattgctgtttacggcataaaactccagtccacgctcccggcagaaatccacggcctcctgtaataatttaccttcccgcacactccacagaataaggcgatgccgttcctgttgtagttttttcagcgtttctatggcaaagggtagttccctgcctatttcgggatatttatgctccactattgtgccgtcaaagtcaactgctataatcattccttatattttcgaaaattctttaatacgctgctcctctgccagtctgcatatcagcagggttccctctttctcggctatgatatacccgtccagtccttgtattaccgcctgtttcaaatgcggtgtgtgtacaatgcagttattgcattcatacattcggacattctcgcctacaacggcattgttccgttcatctttgggcagcaaggaatgcaatgagccccagctacccagatcagaccatccgaactctgccggcaatacataaatccgttccgctttttccattacggcataatctatggatatactttcacaagcagggaacagctcttctatggtttctttctctctttcggtatagaactccggataaatcctgtcgaacacctcggcaatgcccggtgcataacggcgtatagcctcttctatggtctttacattccatacaaagatccctgcattccagaaataattcccggcgtccacatagtgccgtgccgttttcaagtccggtttctctttgaattcatccactttccgtatatcctgatccacctcttctcccgcggctatatatccgtatcccgtttccgggcggcaaggtctgatacctatggttacaatagccttgctttgatctgtcatcagcagtgccttggctatcacccggcggaattcatccgtattgataaccaatgcatccgcaggagtcactacgatattggcgtgcgggtggtgtttcttgattttccagcaagcgtatgtgatgcagggggccgtgttacgtgcaaccggctccgtcagtatatgatgaggcggcacggatggcaattgtttccttaccgtctccttatacttatccgaagtcactatccatatattatccggaatgcacaaccctttaaagcgttccactgtcagttgtatcaggcttttgccacatcccgtcacatcaatgaactgtttgggacattccggcgtactcatgggccagaagcggcttcctatgccgcctgccatgataacgatatgagtttccataacacgtatgctttttatttctttttatattccagataccattggtacatcttgtgcaccccttcctctatgtctattttgtgatgccatcccagttcatgcaatttggtcacatcggtcagtttgcgcatggtcccgtccggtttctccggattgaatgtaatgctgcctttatatcccgtttcctttactatcagatgcgccaggtcggcgatggatatttcttttcccgtgccgatgttgatgtggcagttgcgtatctcttttgtgccgggacggtaagtatctttaaagtccacatgctccatgatgaaaacactggcatccgccatctcctcactccataagaattcgcgcagcggcgtgcctgttccccacagttccaccccgtccttgctgatgccgtagtttttcaggacagccagtatctcctctgttctgctctctccgtttataccttccaccgggcgcatatccagatcatagcgtatgttctcccagtcaccctcgttcaggcatttggcaagatgtattttcctgatcatggcaggcagcacatggctgcgttccaaatcaaagttatcattggggccatacaggttcgtgggcattacagcgatatagttggtaccatattgcaggttgaaactctcgcacattttcagccccgctattttggcgatggcgtatggctcattcgtatattccagcggggaggtgaggagagcatcctccttcatcggctgctgtgcatctctgggataaatgcaggtacttcccagaaacaataatttcttcactccgtgacggaagctttcccctatcacgttctgttgtatttgcaggttcttgtagataaagtccgccctgtatgtgctgtttgccatgatacctcccacgtgggcggcggcaaggattacatattccggtctttcttggtcaaagaagtcctttacggcaactccgtccagcaagtccagttccttgtggcttctgccggtcaggttggtgtagcccttttcttgcaggttacgccaaatagcggagcccacgagtccgtggtgccctgctatataaattttggctgatttctccattgaaattcttgactaatgatttaacagcttgctttgagatgaagtttcttcacgaatttcatatcgtgtttcaccatgattttcaccagttcctcgaatgaagtcttgcggggattccatcccagtaacgttttggctttggtaggatctcccagtaactgttccacctctgccgggcggaaatatttgggatccacctctaccagcaccttgcctgtagctgtgtcaatacctttctcgttcacaccttcaccttcccagtgcaagtcgatgcccacttccttgaaagcaagggtggcaaattcgcgtacagtgtgatattctccggtggctataacaaagtcttcgggcgtatcgtgttgcagaatcagccacatacattccacatagtctttggcatatccccagtcgcgcagggagttcagattccccaagtacagtttatcttggaatccttgtgcgatgcgtgccgccgccagggtaattttccgggtaacaaaagtttcgccccggcgttcactttcgtgattgaacaaaataccgtttacggcaaacatgccatagctttcgcggtaattcttggttatccagaaaccatattgcttggctactccgtatggagaacggggatagaaaggagtagtctctttctgaggaacttcctgcaccagtccgaaaagttccgaagtagatgcctgataaatcttggttttcttttccagccccaatatacgtaccgcctccagcatacgcagcgtacctaccgcatccgcttccgctgtgtattcgggcacgtcgaagcttacttttacatggctttgtgcggccagattataaatctcgtcaggttgtacggactgtatgatacgtatcagtgagctactgtccgtcatatccccccaatgcaggttcaccaatcggttctgcttcatatcccgtacccattcgtccagatacagatgttctatacgtgcagtgttaaatgaagaagaacgtctcaggataccatgtacctcgtatcctttttctatcaggaactcggccaggaacgaaccgtcctgtcctgtgatacctgaaatcaatgctacttttttactcatattttgtattattattaaaaaaatgttttataccatgacctgtcttcatgcatacttgcatttggaccggtataaataattcttattcttttttatttgcggcgtcaggttgtatcaggctctcttcctctgcttccggtatttcactccacggcagtctggcttcaatgaactgtggaatctttgaaagaattttgcctttcagtgccgagatgggttttatgccgtgacttttatacattctcaagtcctccgcccatttcagtttgctttttcccgcatcggtagaaagcccccccattctcattttcacgatgtatttgttcaggtaatatactttcagatcggcttcatacagatagcgcaccagcaaatccgagtcggcggctatcttataactttcgttgtaaagcccccatttatccatacactccttctttatatagacagtggggtggagtgggagccatccgtttttcacattctctttgctgtaccgtccgcttatccagtttcgtatcatctggttggtgtcgtcataatctacaaagaccccgttgccgtatatcatatccgcatcctgttcctcgaatgttttcacaatttcggagatggtgtgagatgagaacaggaaatcatcggagtgaatcaggcctataatatctcctgttgctgcacgtattcctttgttgatcgcttcatacatacctttatccggctcggagataattgtatctatcccgtttttatattcattgatgacagccagcgagttatctttcgacgctccgtccaccacaatgtattctatgtcgggataatcctgttccagcacactttctattgctccacgaatggtggcttcccggttgtagcaggaagtgataattgaaactttcatagattttatatttggattaaaaatttcagatggaaggaaaccattcttttaatttttgattaatcagcttttcagcatttcctttttttatttgttggaagtcaaaagaataggcctcttttattttttgtggtaaatctttttcatcaaaaacaccgattacacatcccagtttatccagtttcctaataagttgaaattggtcgtgaatatgttctgttttgtcgtgccggggaataactacaattctttttttt

SEQ ID NO: 4038 - DNA, 1213 bp, Unknown
  gut microbiota DNA sequence
tagtacagaagtcaaaagcttttgcatggcgataattaaaatgagtatatcctgtctgtactatcacttcttcttgagtggtagcagcccactcgtctatggctttggccatgcgaacaaaagccatgtccattgtgcctaaactagcaaatatcataatacaccacaacaaatagcgttaggaaatatagttttcatttcttcccattgaacgagaaatagatctgcatatttttctatccatataggagttttggatgcatgtgttacatctgcggctgagttgataaagattactttggattttagtagcttttttgcaaagaaaacagtaggtacagctactccagctcccgttgttatgataacatttgggcgttttattaatacccaaaatatagcctgtatgcaatttatgattaaactccattttttagcaggttgaaaatttactaggaacacatgttctttgtctttcatgaatgcttttgtagaagttgtttttaaagtgagccaataacaattccaattattggggatatctccaatagctaattgtaactctcttaaatgtcctcctgctgagcaggcaagacatatttttggcttgtgaacagacatattcgattaatgtttcagtattcttttttttatatatttagccggatttcctgcataaactccccacggctctgcgtcttttaccattactgtacctgcgcctatcacagcaccttccccaatctctatatcaggaccaatgaatgtattagcgcaaatccatgtttgattgccgatacggatttcgggacgtagtaggggaagagccggatcggtatagtcatgtgtgcctgcacatacatggacccgatggctgacagttgctttttctcctattgttactttacctaaattatagatcagggtttcttctccaatggcactccaatcgcctatttccagattccacgggaaccagataacggtggaggagtatatatggacatgttttcctattttagctccgaataggcgtagtatcgtatttctgtatccgaaagctatacggggagaattacggaaaaagaattttccgaatgtccacagtatacgttttacatagatccatttggagtagtttaggtgattacggttttctgctatgttgagttccatggatatttactaatttattcttattcataaacgaatt

SEQ ID NO: 4039 - DNA, 185 bp, Unknown
  gut microbiota DNA sequence
taaaatcaaagcttttcgaagccagttaagaggggtggctgatctgaaattcttcatgttcagactggctaggctatacgcttaaaagaaagattaccaaccaggaaaatccgctgacccgaaaatccgctgaccctaactcacttggttaaaccaaaggtaaaccgccccattcggagaataaa

SEQ ID NO: 4040 - DNA, 8664 bp, Unknown
  gut microbiota DNA sequence
cttcttgtgtaagatattttaaaaatcaaaaacaaaacgaaccgttttttttgagaaatctaacaagagatacccacatttgtactatctttgtaataagttggccttttaagaaaacttgggaaaagcatttattatgaatcaatatccggattttgaccaaaagttatatgacgatcttcgccgtggtaaagagtatgcctttgctgctgtctttgaccgttaccatcggttattgtacaccatagcctatcgttttttgaaatcggaagaagaggcggaggacgcagttcagtttctttttatgaaattgtgggagcagagggaaacttttagttttgagtcgggtattcgaagtttgttatttactatcttgaagaattatatactgaatgaattgaggcatcgcaatctggtatttgagaaattgtatgaaatggcccaacaggtgaatgatgaggacgaagatgcttttttaacccggtttgaacatggtgaactcagaaaatccttgcgggttgccattgacaaacttcctcctcagaaacaaaaaatctgcttgctgaaaatagaatatgggttatctaatcaagagattgccgacaggatgggcataactgtccctacagtgaaatctcattacacacaggctataaaggcgcttcgtaatgcgattgaatctttgattatgtggtttcctgtaatatggatttatttaatagactgaaatgcactcatacttttatcggagtggggtgttattataaatatacgaaaaaaatagattatgaagatagatgaatcggtgatagataaagtacttgacaacaaagctgctcctggagaagctcggaaagttgccggttggttcgttacggaagaagggcgtaagtatttgtctgggcgattggaccgtgagatggaagagcttgcagaagagatgccggaagatgttagacttccttctatttccggcatgaagatgaaacagcggtttatgagtgagataaaacgtgagcgtggaaggagatcggtcggccgtaagtggatgtgggtggcggctgtattgttaccatttgttctcttaagcgtttctttgttgtttttggtgaaccggacggggattttctctgaaacggaatatgctgaaataagtgttccttatggtgaacagatgcgggtaattttgcaggatggcagtattgtacacttgaactcggattcccgtttgaggtatcccaagcaatttggattgttcaatcgtacggtggagctttggggagaagggtattttaatgttgccagagatgaaaaccgtccctttaaggtggatttgcaaggggtggaagtgagagtgaccgggaccagatttaatgtaaaagcatatgctgccgaacccaatatttgggtaactttggatgaaggaggaattcttttcagggatcataatgcgaaagagtacaggcttgttccgggggagagtgcggaatataatcgtcagtcggggaaatgcctgatttcccgcccggataatatggagcagatttcggcatggcgttccaacagccttaatttttatctgactccgcttaatgagattataaaggtgatggaaaggcattatgacgttcattttattgtgaaagattctacggtactgaagaacaggtttactttgtcaacaggaaaagtaaacgcgtcggatgtactctatgatttggaaactgtttctaatatctgttttacggaggtggaagacggtctgtttgaagtaggcaccaaataatgggaactataaaggtaaatgtggaatagatgtgagtgaatacacttgcatctatttttttttgagaaaacgaaaaaaaggactcatacctttttctggatgatgtgttagcctatataagaaattcttttgtttcaaactaatactattgatgaaaatgaaagcaagaaccaaaatgaagacattactgctgttgggagtccttttatttggctttactgtttcagcacagtcgcaaaaagtctctttagattttaagaatgagagggtggaaaaagttctggcatctattaaaagccagaccggtatgagcttggttttcagtgaccagttggtcgatgtgaatcgtaaggtaaccatgcaactcaaagatgtcacactgaaggaggcattgacaagacttctttcaggaattaatcttacttttgaaatcaggaacaacaaaatctattttattgagaagaaagctgtctcgcaacccggttctagaaagaaaagagtgacgggagtggtgaaagatgtaatgggagaacctctgattggtgctaatgttgtggaaaaaggcagaagtaccaatggggttatcaccgactttaatgggaagtttacgttggaagtggacgaatctgcttcgttggttgtgagctatataggatatttggcacaagatattccgacaaaagggaaaggggattttcatattatattgaaagaggataccaatacgttggacgaagtggtcgttaccggatatggagatttcaagaaggcaacttatactggatctgcttctgttctgactacagaaaagctggaggctttacctgttgtctccgtggggcagatgattgaatcgaatataccgggcatcagtgtggttgccggtacttcttcgcagcccggtgcgaaaacaactttacgggtacggggagttgcttccatgaatgcttctaccgaacctttgtatgtattggacggagtacctatcccatcttatgacttgagtaactttaccagtatgtccgaagcgggaggaatgggattcattgaaacgctgaatccggcggatattgagagtatcaccgttttgaaagatgcggcatctgcttcattgtatggtgcgaaaggtgctaatggagtcgtgcttatcactactaaaaaaggaaaggaaggcaagcttcgtgtcaatatggcggcaaaatatggaatcactgatttcgcttatacatatcgtccgctgatgggaggtgaggaaaggagggaattgattcatgaaggactggttaattttcaactggataagggagtaagtgaacaagaggcacagcagtatgctgatgcgaatatcgaccagtatgccaaacgcctgtctcaggggtattcggattgggaaagcgctctgttcaagaaaggttatcaacaggattataacctgtctgctagtgccggcaaccaaaattccagttttatcggttctttgggatataccaagcagacgggtgtttccctgaattcagaaatggagcgctttacggggcgtgtggatgcaagtaacaagtataaaaaggtggaatttggaatgaacgcttctttttcgtggacaaagaacgttcatttacctgagggtaaattttatggaagtgccatttatgcatcaaaagtgaatctgacgccttctactcccatttataatgaggatggaacgtatgccagcgggtatcgtgaaaacaatggatataatccggtattggaggccgaggtgaatgattattatgctcggacggtacgtgcgatgggtacggctaaaatagcttataatgtgtgggacaatttgaagatatccagtgtgtttacggtagattattcgttgacaaaggattttttctttcagtctcctgaaggacgtgatggagctacttatcagggacggggacgtatgcagatgactgaccgtatgcggtatacttcacagaataatctgacttattctaaaactttcggtaaacattctgttagtgcggtcgctgccttcgaggtgatgaagtatgattatgaggatttgtatgctgcaaagaaaacttatgggcaggatatcaacacttcattgggaaatgcagccgatccgatagatgctgaccagaaattgcaggaagatgcattaatgtcctatgtggctagtgtgaactattcttatggtgataaatattatgccagtttcagttttcgcagggatggatcatcccgcttgtctcccgatactcgttgggggaatttctggtccttgtccgcttcatggagactttctcaggaaaagttcatgcagccgttgaaatcagtattaagtgatttaaaacttcgtgcttcctatggggtgaatgggaatcttccctcttcatattatggttatcagagtacttataccacgggggcgttttatagtgggaaaccttctccgtgggaaagtacattggggaatgaggaactcacctgggagaagaattatgcactgaatttgggactggatatcggcttgttcagtcgtgtgaatgtttctttggattggtacacgcgtacaacgaaagacctgttgatgagcaagcaattgaattccatcagcggattttcttctctgctgaccaatgtggggcagatgcggaataccggtgtggaacttgaagttcgttccaataacatcaagacgaaagatttcagctggactaccgccttcaatttgagccataataaaaataagattctgaaactggcagatctgccttggtttgtggatggcaggtatgtacgtaaggaaggttatccatttaatactatttatctgcgtgagtatgcgggggtggatcctgagaccggaagtgccttgtattatgataaccaacaggatgagaatggcaattatacaaaaaataaagtgaccgatccggggcaggcaagtcctattccgttgaaagatattacgcctactatatcgggaggttttatgaatacctttaattataaattcattgacctgtcattcaatctatcttatagtttcggtggttattcgtatgataatgcatcctacattctgcaagatgatggttattcagtgataagcaataaaagtaccgagcaacgccgccgttggcagaaaccgggtgatataacggatgttccccgttttgtatatgggaataaaaaggggggtaactataattcttcacgtgccatccattctacggatcatattcgtctgaaaagtctgatattgggattgaatgctcctaaagcatggttgcagaaattaggaatagggaatgcccgtatttatttctcgggtacgaatttgttgacatgggctgcatacgaccaatatgatcctgaaatgagtggggtggtaggattctacacgcctccgttgaaaacttatgctttcggactggaacttaaattttaatcatcaattacactaaaaaacagaaccattatgaagaaaatactttttattttaggattcgtttcacagctcgttgccggttgtagtgatttcttcgatacagctcccagcaataaaatccctactacgatggctttccgtacagtaaccgatgtggataatgcggtgaacggattgtatgatctgatgtcgggctccggatattacggggctgctatgtttgcctatggagacatgaaaggagatgatatgcagagttctgaggaaagtggggtatgcaatacatgctatatgttcaatcatcgtcctaatagtttgaatgccggttcattgtggggacgacctttttatattcttcgtgaggcatggaatattctgaatgctattgccgaaggaaaaattgaaagcggggacgaaaagaagttgaatgctttgaaaggcgagacgatggcggtgattgcgctttgccagtttgatctgactcgttgctttggctatccttatacaaaagataaaggtgcgtcactgggtgctccgttgatagaccatttggtgggaacctatgagaatcctccccgttctactgttgctcaggcttatgattttattatagaaacgttggaagaggcggttacattgatgtccgaagagaaaaataacggacgtatgaataagtatgcggctcgtgcattgctggctcgtatctacttgtatcatgacgataaccggaaagcatttgatttggcggaccaactgattaaggatgcggatacatcgggaagttatgcactttatccgcatgagaaatatgtggctgcttggtcggtagaagccaagtttggttcagaatcgttttttgagatagccaatagtgtggatgatactccaggacgggattcatggggatatttattgaattggtatggctatcagaaggggtttgtcactcagaaatatgcggagcaaatgctggctgatcccggagatgtgcgcgggcagttgctggaggagaataaatatgcggggaaaacggtatggtggttgtacaaactgagagggacggacctgaagactgcaccgctggaatgtaacaatgtggtacttcgtctgtccgaggtgtaccttattgccgctgaggctggttgcaagttgggcggtgatgctgcggttcagggacttggttatttgaatgagattgtgaagcggggcaatcccgataacgaagtgacaatggctgactataccttggaccgtgtgttggatgagcgaagtaaggagctggtaggtgaaggacatcgtttctttgatttgctgcgcaatggcaagactattgtccgtaaaggaggatatcatcttcccagtgtggacgaagaggtggattgggatttttacaagtgtgtgctgccgatacctgaagaccagtttatctttagtcctgagatggaacagaatccgggatatcccaagaattaacatgctattaatcattatttaaatatatacgtatgaaaaacagaatagtaatatttgtggtatttgtgtgttgcttatggactatgccgggaatagtacgggcgcagttgtctgttcatcagtttgaccagttaatgaaaaagattgatgatgtcctgtggtacgagaaagtgggtgatattgcccatgtagataaggtgatattatgtggaccaccgcgttggaaggagtccaatcccacttcgatgagtgctggtaacgaacttaaattcagagcatacatttttattcccaaaagtgtgaaggaaaacaagaaatatccgttgatcgtatttcctcacagtggggtacatgccgatatggacacctattatgcccatatcatccgtgagctgatagcgcaggaatacatcgtggtggcagcggactaccggggaagcaccggatacggagcgggaacatacaataatatagattatggtggattggaaaacgaagacgtgtacatcagccgtaactatatggtggataatttcgatattgtggatggtagtcgtgtgggtatcatgggatggagtcatggtggtatgattacactgatgaaccttttcaattatccgggacaatataaatgtggttttgcaggcgttccggtttcggatgtaatcatgcgtatgggatatgccagcgacagttatcgcaaaatcttctcggccaagaatcatatcgggcagactgccaaggacaatattgcggaatacaaacggcgctctcctgtgtggcatgcggagaagttgaaagatccgttacttatctatactaataccagtgatgatgatgtgaatgtagtcgaggtggaatcaatgatccgtgccttgaaagcagaaggcaaaaaatttgaatataagatatttgagcgtgctcccggtgcgcatagttttgatcggttagatacttatgagtcaagcaagattcgtctggacatttataagttcatggggcgttacctgaagcccaataaaccattcggttcagtgaaagaattgcgtaaagcagcttataagttctgataattaacttggtgacaggataatggagggctggttgcttcatgtaatggggcaaccggcctttttatgactcttcggatggataaaaatgagtgaatattcatcttgtataaaagataagtggaaatatggataaagtgtacggataataagtgataattaaactttttgaatagcttggcggcttgttagcttttagaacgtagttatacattggtaatgagaaatagatcatgaaaaacacacgcttattatttgttatttggatgttgttcttggttttacctcaggggtattcacaagagaaaaaggaagattcatccgtattggggcaagtgaacggctttttgagtaaacatgtgaagctgactgcctacggtcagttcggttatagctatacggacaggaaagacttggatgtgaggcaggcggacaatcagttttttggaaggctggggatgctgatcctttcgggagatatcacggataaactgtcgtggatggttcagtatgaactgtttacttcacagctgctggaactctatgcttgttacaaaccgtattctttttttcaggtcaagataggtcggatgaagacctgttttacattagagaaccagatgtcaccttcggtttatgaaacggtaaacttcagtcgtgtcattgagcgtctggcaggtttcagtggagatgtatgtgggaaccagggtggccgtgatatgggtttgcaggtgggtggtgagttgttcaagacctctgtcgacgattattttctggaatatcggacaggtgtatacaatggttccggactcagcatgaaagatcataatgatgcaaaggattttttctactgccctgtaaacgaggtcttaaagcataaa

SEQ ID NO: 4041 - DNA, 67274 bp, Unknown
  gut microbiota DNA sequence
tcgaaatcggataatttcgagggcttttgtctgtttctatacggaaacttgtgcgcgtgataggactcgaacctacacgtctcacgacaccagatcctaagtctggcgcggctaccaattacgccacacgcgcgacattgcttttggtaagcgggtgcaaagataagcaatatttcttaagtaccaaagatttttagaaaattattctttgtggctatgtaaatattcacgtgcagcctcaataatggtatctacattgcgttgcatatcctctgaactcatattgactttgatgtccggatctataccgaattccagatgttgcatatccgcatcgtacatggggctggccgagaagcggacagaccagccgttgggcagttcggaggagaagggcaggccggaaccgccacctgttttgtcaccgatgatggtcactttgggaagtattttcattctgttcacaaaatcattagtggcgctgaaagagcggcggttagtcagcactaccgcctgtttttgccagcgtacacggtctagtgacggttccagccaaactgctttgggagtggagaagtcattgtgccccggtccggttttatgggacatatagcctaccagcactttttcattcgtgaaacgtgcggctaatttctcggctgtggtaagattaccacccgaattatttcgcacatcaataatcaacccatcacaaatagccagtttgtttagaacctcgtccagatttccttcaccgatgcccgattggaaactgccacaataaatataggctatattgtcctcgaatatctgatacttcatacccgaggattgggcataatccttacctagataaacacgttggatgctgtcgctgaaattggccggatagctgtcaaaccattcacgatattgggagtactccagtttggaagacagatttacgtgtccgtcacgcaactcgttcagcatatctgccagaacttcgaataactgttcattattcatgcctttggatattctctgtttatactggctgtatatttcattccactccaatccgtattcctgctttttatagtcaaggaaacaatactggcggtcgatagtctgccataatgcttcgaagttgccttcgggggagttgtcgtattcgtcctccgtgatgcacgaagtaaataatacaacagacaataacagactgataaaaatataactatttcttttcatcctctatattaataagggctgacccggctgggcatcgccactttgttcttaccttttaataaataaaagtttttcacgaaacctatcataaaggcgtgtgaccatatatgacttttcagattattgactttcgcctgctggatatcacataggtatccgaaacgcatattgaccgaccggataggaaaatccaatgtaaccagctgtcgcaaggaaggttggttatgcagggaagtgaacagcacattcttgccgccattctttaaactgaatatctcataataagattgtccgtattccggggaaaacataatccccatgacaggcagattggcttgataacgggctatcagcggatagttaccgatatgaaaccgatagatgaccatacccgatgccgccagattgacatatgctttagcttgggcgggattattggaatttcgcatgttatagatgaacccgccgttcaagtccagcatgggacccgccagtatcttcaagttttctgtcagccggaactggtaatgcagtgcataattccaattgaccatacctgccatttcattacttgtttctgctttattctctgtcagggacagattggcttggaacagactttgaacagacacgttgccattcatcagtttggtcatgcgcatactttcacgcaggatacgaatttcgggtccggtatattccatcggtgaaagataggtgtccaatatatttgtaaaaccggcaccgtaaagagtagctctcataacgtagcggtttgcttgtaagctgtcttcctgcgcctgcgaagacagacccaaaaacagggacagtaataacaggagaattttcttcattttttaaaacagtttcatctggccggtaatttcatcaatgatatctgtttcactcttaccatgatccggatcttcaatttcggcagtttcttcgttttcatcagtcccctcttccgcaccgtcctcttctttggaaggttcggggaagcgtaaaggttccagttcatttatttgttcaatgttgtaagtactgattcgttttcctttcgctttgaaactcttgattccgatgaattcgtccacatctatttccaatggatcacggaaactgtcatgtcctccgaatatgacttgtatgcgtggataagccacacaagtaagcaatatagaacgactttccttattctcgcccaaataattgagacggcgtgaagtggattcaaaagtgaatcgtttcagataaggatatccctggtcggcatcaaataaagcggcggaccataccttgttggcatcgaacttctcgatgatgtggatccccggatcataatgattgttcaaatcgaagttactggtatagaattctccattttcatggactattaaaatcaattcgtcactttggaattctcccagatattcaccgcgtccgtcatagttcaagcggagtacatcccggtcaaaccatacttttcttccacctagggtagagccgccacgttgtttcaaggctattttatgtacttcgtatttagacaggatattgcccatggactggcgtccctttatattgatgtcactgaaatctttttcatatatgatttttttgatacgcggattcggctttaaggtaatcttgataacctccgcttccccattgggattggctgtaaagtaaacgatacgtgagccgggcgtaccttgtgttacatcatattcacggtcgcgggtgatggaggtaatgttgaatcgtttgatatagtgaaacccttcttttccatcccgatagaccacattgtatatggtacgtttgtcgtttttcttgaagatattgacatagagaacattcttgccgacaaacattttgtctgttacacgaaccactttgtatttgccgtctttatagaagataatcacatcgtcaatatctgaacagttggctataaattcatcttttttcaaggcggtgccgataaagccttcttcgcggttgatatagagtttttcgttagcttccactaccttcgccgcctcaatggtatcgaagttacgtaactctgtacggcgggggtattgtttgccatatttatctttcaacatctgataccagtcaatggtatattctacgatatgtgccagatgattgtttatttcttcaatctgttccttgatacgggctatgttctcatctgctttatccttgttgaacttcagaatccgggccatcttgatatccaataacttcagaatatcctctttggtcacttcacggataaattgcggatagaaaggagtcagccgttcatcaatgaattcgcaggcggcatctgtattttcggattgctcgaactttacttccttataaatccgttcttcgataaagattttttccaatgatgcgaaatgaaggttttcaagcaattctcctttgtgtatttccaactcttgacgaagcagggacaacgtgttgtccgtggcttttttaaggacggcactgactgtaaggaagtggggcttcttttcatcaattacacagcaattgggagatatgcttacttcacaatcagtaaatgcatagagcgcgtccaaggttttgtccgaggatactcccggagcaaggtgcactaggatttccactttttcagaagtaagatcttccactttccggatcttgatttttcccttttcactggctttgacaatagagtcgcatacccccgggacagtctttccgaaaggtacttcggctatggacaatgttttgttgtctattttattgattttagcacgtactttcaccattccgccgcgttctccatcgttgtagcgtgatacatcaatagagcctcctgtctggaaatcgggatagagtttgaattcctcaccacgcaaataggcaatggaggcatcacacagttcgttaaaattgtgtggcaggattttggaagaaaggcccacagcaataccttctactccctgagcgagcaagagcgggaatttgacaggtagggtgatcggctctttgtttcgtccgtcgtatgatgcttgccattcggtggttttgggattgaaaaccacatccaatgcgaatttggacagacgtgcttcgatataacggggggcagcggcaccgtcgcctgtcagtatgttaccccagtttccctgacagtctatcaacagatccttttggcctagctgcaccaacgcatcgcctatggaagcatcgccgtgcgggtgaaactgcatggtatgtcctacaatgtttgcaactttgttatatcggccgtcatccaatcttttcatagagtggaggatacgtctttggacaggtttcaaaccatcattgatgtgcggtacggcacgttccagtattacgtaagaggcatagtccaaaaaccagttctgatacattccgctcagctggtgcttcacccctgtgtttttggtatcggcaggtttatagtccaagtgtccgttctccggcgtggggatattttcttcgttttgttcctctttatcaataaaatcgtcgctcatatatatttaaattccttaatgttctgatgatatgcacgcaaaaatacgacttttattgaaaaaaatcatttactttgcatattatttcgcccttattaaaggttgaaaacaggaaaaaacaacaaaagtgtaagaataaacagataagaaaatggcacaagaagatgtttttaagaaattagtatcgcactgtaaagagtatggttttgtatttccgtccagtgatatctatgacggactgggcgctgtatacgattacggtcagatgggagtggagttgaagaataatatcaagcaatattggtggcagagtatggtgctgctgcacgagaacatcgtaggtattgattctgctatttttatgcatcctactatttggaaggcttccggacatgtggacgcattcaatgatcctctgattgacaaccgcgattctaaaaaacgttatcgtgccgatgtgctgattgaagaccagcttgccaaatatgacgagaagataaacaaagaagtggccaaggctgccaagagattcggtgatgcttttgatgaggctcagtttcgtagcaccaacggtcgtgttctggagcatcaggccaagcgcgacgctttacatgaacggttctcaaaagctttgaacgacaatgatttggatgaacttcgtcagattatcattgatgaagagattgtttgtcctatttcgggaaccaagaactggactgaagtacgtcagttcaatttgatgttctctaccgaaatgggttctactgccgatggtgccatgaagatttatcttcgtccggaaacagcgcagggtatttttgtcaattacctgaatgtacagaagaccggtcgtatgaagattcctttcggtatcgctcagattggtaaggctttccgcaacgagatcgtagcccgccagttcattttccgtatgcgtgagtttgaacagatggagatgcagttcttcgtaaaaccgggtactgagctggagtggttccccaaatggaaagaaactcgtttgaaatggcataaggcattaggtttcggtgatgatcattaccgtttccatgatcacgataaactggcacattatgccaatgcagctacagacattgaattcctgatgccgtttggattcaaggaagtggaaggtattcatagccgtacgaactttgacttgagtcagcacgagaagttcagtggcaagagcatcaagtatttcgatccggaattgaacgaaagctatactccgtatgttattgaaacatctatcggtgtggaccgtatgttccttagcattatgagtgctgcttatacagaagagacattggagaatggtgaaactcgtgtggtattgaaattgcctgctgctctggctccggtgaaactggccgtgatgccgttggtgaagaaagacggcctgcccgagaaggcgcgtgagattatgaatgacttgaagttccatttccactgccagtatgatgagaaagacagcatcggcaagcgttaccgtcgtcaggatgccatcggtactccgtattgtatcacagtagaccaccagactttggaggataattgtgtaactttgcgtaatcgtgataccatgcagcaggagcgtgtagctatttcggaactgaacaatatcattgccgataaagtaagtataacaagtctgctgaagactttgcaataataaatgtattatgaataaaagtattctttggctgattggtctgctgtttgttacttccctgtccattgtttcatgtagtgagacggatgggacagaagatccatatgcaaactgggaagagcgtaatcagcggtatattgactccattgctacagtggcggaagccaatcaaggcaatggagaagggcaatggaaaatcatccgttcctataaacttccatctttgggattgaatgaaacaggaaagatcattgataatgtttactgtaagattcagaaagtgggagatggtactgagagtcctattgctacggatacggtagcggtgaattatcgtggtcaattgattaacggtacggtttttgaccaaagttatcagggtgagcttgatccggaaactgccactcctagaaaatttctggtaggtgcggtgatagcagggtggagtacggccttgatgaaaggatttggtggtatgaaagccggtgaccaatggaagctttatattccttatccattggcttacggaaaagatggtacagaaggtattcccggatattcaacgttgatatttgatgtgaatttggttgatatattcccgttgaagggtatgggaaaaagcattgatgataccttggatgctaaaaaatagctatcatagaatattggaaagaagagagtattgcagtttgttgcaatgctctttttttatggtgttttgattcatgtcggttggacgagacgggggcctgtcaggtgaattgtttggggatttactgaaatgtttttgggaggtatggcgttttccttggtatggttaatggttcttttatccgcttgctacgcgttccattgtctgtaaggaatggtttaaaggttggggtaaaacggcttaattatattatattaagaagaactcttgacggaaacaagaagattgttttatcggggatataaataaaacacttcgttttttcggtatccgccgaagtgtttttcctttcagcataatgttgtgggatagtttgacgggcgaataactgtaagaaacaatataatctttatcttggtcaattcattaaaccaatgattgacgcaaagataaagattatgacaaattatttaataaattatttcacgtttcctactttgatcaagtattcggcaatctgaacagcgttcaatgccgcacctttcttaatctgatcgcctacaatccagaaagtcagtccgttttcgtttgccagatctttgcggatacgacctacgtaaaccggatctttacctgccaggaacaaaggcatcggatattctttcttttcgggattgtccatcagtaccaggccttcccctttggcaaaagcttcacgggcttcttcaggagaaatggggcgttcagtttctacccagatactttccgagtgagaacggagggcgggaacacgtacacacatggcgctaacctgaatgtcggagtgcataatcttgcgtgtttcgttgaacatcttcatttcttctttggtatatccattgtcggtaaatacatcaatctggggaatcaggttgaatgccaactggtaagcgaatttctctacggtcacgggctcgttagccaatacctgacgatattgttcatacaattcatccatagctgctgcacctgcaccgctggcagcttgataagtagccacatgcacacgttttatgtgtgaaagattttcgatggctttcagcgcaactaccatctggatagttgtacagttggggttagctatcacgttacggggacgattcaaagcatcttccggattcacttcgggcactaccaaaggcacgtcggcatccatacggtaagcgctggagttgtcaatcagtacggcaccatgtttggtaatggtttcacaaaactcttttgtggtacctgcgccggctgatgtgaaagcgatatctacacctttaaagtcatcgttgtgctgaaggagtttcacttcaatctgtttaccgcggaatgtgtattttcgtcctgcactgcgtgaagaaccgaataacactaactcatccaacgggaagttcctttcatcgagcacacgcaggaactcttgtcctacagctccgctcgcaccaacaattgctactttcattttgttttttgttttataagataaaatttagtaatactttagaactatctctcagcatgtaagtacgttctgcgtgcaaaattagaacattttagaatataaatcagtaaaaaagaaagttttttcgtaattttgtcgatattatggtataaaacttaaaaaaagatggaactattcgaccttaacatacattttccggtcacagatcctacctggatattcttcctggtactcattatcattctgtttgcccctatgattttggggcgtttacgcattccgcatattattggtatgatacttgccggggtagtggtaggcaagtatggctttaacattctggagcgtgacagcagttttgaattgtttggaaaggtaggactttactacattatgtttttggccggtcttgagatggatatggacgatttcaagaaaaacaggacaaaaggattggtctttggtatgtttactttcctcatcccgatggggctgggcatatggagtagcatgagtatgctgaactatggattcctgacttctgtgctgctggccagtatgtatgccagtcacaccttgattgcttatcctattatcagccggtatggcttgtcgcggcaacggacggtcagtatcactattggtggtacggcggtgactgtggtgctggctttgatggtgctggctgttattggtggtatgtataaaggtgaggacgtaggcggactgttttgggtgctgttggttgccaaggtggttttgctgttcggacttatcatatttttaatgcctcgcatcagccggtggtttttccgtacatatgaggatgcggtgatgcaatttatatttgtgctggctatggtgttcctgggcggaggcttgatggaactggtggggatggaaggtattttgggagctttccttgccgggctggtattgaatcgttttgttcctcatgtttctcctttgatgaaccggctggagtttgtgggtaatgcgctgtttattccctatttcttgattggggtgggaatgattattgatgtacgttgcctttttacggaaggtgaagcgctgaaagtggcggttgtaatgaccgtagtggcgacattcagtaagtggctggctgcatggataacccagaagatatatggcatgaaaaaagtggagggcagcctgatattcggattaagcaatgcacaggctgctgcgactttggccgctgtgttgataggtcacggtattattatggaaaatggagagcggttgttgaatgatgatgttttgaatggtacggtggtcatgattttgttcacttgtattataagttctgttgtgacagagcgtgccgcacgcaaaatggtgacccaggaaaatctgatggagggcagcgaaggtaaggaacaggaacgcatcttgattccggtagctaatcctgaaaccatagaaggattggtaggcatggctttgatgatgaggcatcctaaacaaaaagagtcattggtggcactgagtgtgatcaatgataataatacttcagaaaccaaggaactcataggcaagcgtaacttggagcgtacggcgatgattgctgctgctgccgatgcgtctgtaaagactgtgttgcgttatgatttgaatattgcgcaaggtattattcatacgcagaaagaatatgcggtaacggatattgtaataggtttgcatcgtaagacgaatttgatggattctttctttggtacaatgacggaaaacttgttgaagggcacgaaccgccagattatgatcgctaaattattgatgcctgtcaatacgttgcgccggattgtggtggcggttcccgataaggcggaatatgaaaaaggtttcttgaaatggatgacacagctctgccgtatgggtaaacaattgggatgccgcgtgcatttctttgcaacggaagatacattgaagcatttgcgtgccctgacagaaaaacaggaggcgaatacttttacggagttttctttattggaagagtgggatgatctgcttttattgaccggacaggtgaattatgaccatctgtttgtggttgtgtcttcgcgtaaaggttccatctcttatcagacttcttttgaacgtctgccgtcacaaatcagcaagtactttgccaataacagtttgttgattgtgtatccggatcagttaggggacgatccgcaagagattgtttcgttttctgaccctcgcgggcaatcggaaacacgagtatatgataatgtaggaaaatggttctacaaatggtttaagaaaggtgatgaacgaaattaatatagagtggcagcaacgtacggagttgttgctgggaaaagataagatgaaacgcctgcgtcacgctcatgtgctggtggtaggtttaggtggagttggggcgtatgctgccgagatgatttgtcgtgcaggagtaggccgtatgacaatagtggatgcagacattgtgcagcccagtaatattaatcgtcagcttccggcccttcactctgctgtgggacgtcccaaagcggaaattttggcggaacgtttccgtgatattaatcccgatttggaattgactgtattggtggagtatctgaaagatgagcgtattccggaattgctggacagtgcaaaatttgattttgtggtggatgccattgatacggtagctcctaaatgttaccttatatataatgtgcttcaacgccgtctgcccattgtgagtagtatgggggccggtgctaaatgggatattactcaggttcgttttgccgatttatgggatacttaccattgcggattaagcaaagccgtgcggaagcgtttgcagaaaatggggatgaaacgaaaacttccggttgtatttagtacagagcaggccgatcaggatgcggtgatattggtagatgatgagaaaaataagaaatctactgccggaaccgtgagttatatgccggcagtctttggctgttatctggcggagtatgtgataagaagaatttgattatgatagaattacagggaataacgaagagtttcgggacattgcaggtactgaaaggtattgacttgatgatagaaaaaggagaagtggtaagtattgtggggcccagcggtgcggggaaaactacattattgcagattatgggaacgctggataaggcggatacgggtactattttactgaatggtacagaagtgagttgtttgaaggaaaaagagttgtcggcttttcgtaaccggcagattggctttgtgttccagttccaccagttacttcctgagtttacagctttagagaatgtgatgatgcctgcgttgatagcaggtacatcttcttccgaagctatgcggaaagccaaagaaacgctagcttttttgggcttgtccgaacgtgcttcgcacaaaccggctgaattgtcgggaggggagaagcaacgggtggcggtagcgcgtgcattaataaacaacccggcggttatccttgcggatgagccgtcgggcagtctggatactcgcaataaagaggaacttcatcagttgttctttgatttacgtgataagttaggtcaaacttttgttattgttactcatgatgaaaatctggctcgtttgacagaccgtactattcacatggtagatggcaggatctctttgaaaatttaatagagtaaagatcagtttaatgatatgtgaatactgtcatgctgttctttccatttgtctatctggaattctccggtatctccctcttccagtagtacaccgtccatactcaggttgactgttgttcttgtcccggcattaagttgtgtagttagtttttgttggtaatgctttattgttccgttacttaactgtacaaagatttgaaacataggattaggctgagaggggaacaccgatacaaaattattgttgaattctgtacggttagtgctgggtttcaacccgaagctgattgttttgaaagtgccttcgggccgggctgaaaaataattcaggttgctatggatattactgatgtatatccacattgaatcaatggcatcactgaaagcatcaccgtttgtttcagacactatgacgcttaaggctgctgaagcatgtttaagatgtgcttgcaggtcatctttccctatatttatattttgtgttccgtatacaaggctatgtatcgggtagtataccgtatctcccggtattttccttaatcctaaactggttgtattcagttttttgcctataattagcgtgggatctgccagataggcatcacctgctgtaccaaagtaatcgggatatccccaatatatcacattgtatgtacctacaggaagccttaaaggatatttttgggattttcctattccattcgtgattaagtaatatgctggaaaaggaacttgttttcccttggctgtataattgcctatataaaaacttccattcgtttcacaaggtagtacttctaatggaccattgtaaggatctgtgctactttggctcagagtggcatatagtgccggagataccagatcttctagttggggagtgacaatgtcacaatcctcgtttttaccgcacgaagctagcagtgccagtaaaggtaaaaataaaaactttctcatgtacatctttagtttaggtttgaatactccctataacaagatatggatgagaaagtttgaatggtataggagaaagttatgcttatactttctcgggaaaactggctttcaggatctcaaatgcccggacataatctttttcgaagactagaacctttatttccattcccggaatataagccaaaacttgggctgtatattctccctgcaacatggattctataccttcattttttagaagatcctgtaacatgtgtgcgcggacatcacttttgaaagaagtaagaataactgttttcatactcgttccttctgtatcagttgtttcttttttcgatttacagttttgcagaatccggcgtgccacttctcccgttacatcaccgtcctctccgtatgctgcgcctctctcattgaaccggcgtactatttcttcaatggtatcatcgcctattcctgcttcatccaagcgagtcttaagtcctaaatttctaaagaattcttcagttttttctatggttagcgatacccgtacactgggaactcctgaagtaaccccccagatacgttcgccatattgtagtattttgtcacgttttttatcggcgagtgtccgtagagttccgggaaatacgattgccagggtctggccgtgtgtcatgccatgtagtgcggtcagctcatgccctatcatgtgggtggcccagtcttcggatactcccatagcaataaaaccgttcaaagccatagtggcggacatcataaattcactcatcaagtgatagtcctgtttgttttctttgatttgcggagcgatttgtaccaatgtacgaaggatgctttcgctccagcggtccattagataagattcgtttgttttggtcatgtattgttccatgacgtgtacaaaagtgtctgccagtccgcaagctatctgatagtcgggcagtgagaaagttactgtcggatctaggatagaaaatacaggatgggaggagaaaaatggatatttttcatgagtttcacggcatgaaattacagctccgttattcatttctgaacctgtggcgggaatggttagcacagttcctaaaggaatcgtgttttgtgcactgccttttttaaccagttcccaggcatctccgttgtagggaataccagcggaaatcaacttggtgccgtctataactgagccgccacctactgccagcaggaagtcaatgtttttttctttgcctgattctatcgcctttttcaaggtagatatatcgggatttgattctattccccaaaactccgtgtaatcacgtccttcaagggcttggattacttgttcatagactccattggtttttacactgccacctccgaaagtgatcatgattctcttgtcggccggtatctgttgggacaattgggcaatcatgcctttgccaaagatgaggcgtgtaggattgtgaaagataaaattatccataactaattggggttttcttggttaatactgagtaaagataatgcttttttcctatctttgagaaaaaatttagctaatgaacgtaaaactgggaaaatacaaccagctggaggttgtaaaagaagtagattttggtgtttatttagatggaggcgatgacggagagattttattgcctacgcgttatgtacccgaaggctgtaagcctggcgacgtgctgaatgtctttctttatcttgacaatgaggaaaggctgatagctaccactttgcagccgttggtgcaggtggacgagtttgcctgtttggaagtggcatggattaatgagtttggtgcgtttttgaattggggattgatgaaagacctttttgtacctttccgtgaacaaaagatgaaaatgcagaaagggagaaagtatataatacacgcacatatagacgaagatagttaccgcattatggcatctgctaaagtggagcattatctttctaaagaacatcccgactatcggctgggacaggaagtggatatcctgatatggcagaaaacagatttgggatttaaggctattgtggaaaataagttcagtggtttgctttacgataatgagattttccaacctttagaaaccggtatgaggctgaaggcttatgtaaagcaggtgcgtgaggatggtaagatcgatttggttctgcaaaagttgggcgcaaagaaggtggatgatttttcggaagtgttattacaatatattaaagatcatgaaggcttcactccattgaatgataaaagtgctgctgaggatatctatgatgcttttggtgtcagtaagaaaactttcaagaaagcggtgggggatttatataaaaaacgcctggttgttttggaagctgaggggatacgcctcacttagtggagcttttccctaccggatataggaaaagccctatgaacttatggggaaaatcaattgtgggggaaagcgatttcccctatttttgtgccatagaactaacaaactaaaaacggaacagctatgaaaagatggactacattactgatagtgatttgtatgctaggtataactattcccgcaatgggggccatgagtatcagcaaaatgagacagaacactcgtttccttaccgaccgtatggcatatgaactgaaactcactccgcggcaatacaatgatgtatatgaggtgaattatgattttatcaataatgtccgttatctgatggatgatgtggtaagaggctatgattatgcgttggaacgttactatgattttctggatgtgcgtaatgatgatcttcgttggatactttccagtgcgcaatatcgtcgttttatgagggctgagcatttctaccgtcccatttatgcgcatgagaacaaatggcatttccgtatttatctggtatataataatgtgaattttttctactatggcaaaccgcatcattatgctagttattgcggagggcattatcgtactcatttcaataatgtcagttattataagacccattatcgtgaccattaccgccatgatgtgtacgatggccattatcgtatccgccatgacagaatgacgtatgatatgcaccgtcgtcgtgatttcaatatagctgttcgtcctccacaaaaggagcatcatcgcccggccactcctcctcagactcgtccaaacagacctcaaatccatcctgacaggccgtcgggtgatcatcgtcgtccgtctgttccacaggcaaggccggacagaccgaagaaggatcagaataacaagcatgatgggcgcccttcacgacgtggacagaactcacaggttgataaagaccgtcatgaaaataggcgtattactccatccggcagggatgtgagaagaggaaatggtaagaaagagaaagattcggaccgttcaggaggaagcaataaaagtaattctaaggaaagaacagcagtgcgtatgcgtacggtatagtatgatttgaaaaacaacgaaaaccgacgtaaataagagtccgaaacacaatgaattgtccggaattgtaaaggtcgtttttatgatgattcaccacaggtcaacgcagaatctgattatgaatagactgtgaaaatctgtggtgaatcttaataatttattccaaagtaagaggaactcctttgtagaaatccagaatcttggtacggaacagatagtcatattttgcttgaagcatatccgaaacggctttcatccaattggtacgtgcctcattgtattcagtagcgttggctttaccattggcatatttttcgctcatcagacggaaggaagcttcagaagcatccgtagctgtattactgcttttgtatttgctttcggcagctactgcattatagtatgcttgctgtatttctttgaaaagagcctttttgctttcttccaacttccatgataaagcagtgcgctggatgcgtgcgttctttactttatttcgtgtgtcaaaacggttgaacaacggaatgctgagtgagaattgcaggtatttattaaaattttgatgccactggctgctgaatgaagcattttctactcctgagatattatagtagtttgttcctatacctgcactgaagtttaattgcggataccaggaactttgggcaatacggatatttttggccgcaccttccagacgaaattgggctgctttaatacttggtttgttcagaacagcttgtgcatagatatcttcgggaagtgaaagcagagtaaaatcatcctctacacggggagatactactccaaatccgtcaggagtaggaagttccaacagctggctcagttctaacaaagctaactgatagttattgtcagcctgtactgctgacatttcgtcttgtgcgacgcgtgcgcgggcttcatagacttcggcttcagatgctttcccatttttgaaataggcttctttcaattccagctgttcccggcttaactctacttggttgtgagctacttttgccaattcttcattaaaaagaatttgtagataggcagaggtgacagaaatgctgatatcttctttggccttgttcaagtcttctgtagctgctttcaggttcagtttgctgagagcgatgttgttcggtatccgcaatcctgtaaataaaggaatactggtactgagtgagaagttggtgtttttggtattacggtcgccatacgtattgtctgcctgcaaggcacggccgaagttaaatgactggcccacattaccgttcagattaggcagccggctgtatttagcagtattcaaatccactgcattctgatctcttgcagcttcctgttgcttgatactcaggttgtgttctatagcataatcaatgcatttacgtaaatcccatttttcttgggaaacggccggtaatgcagtcagggtggccaaggctataatgatttgtttcttcataatgatattctgttatttcttttctgctccgcgtactttttcattgacattcagaccgttctttatttcaatctggataccgtcactcatacctgtaataacggcacgacggctgaatttctgtgaaggtacactatctgtcaatacgtatataaaagtagagtcgtttttaaactcaacagtactttcgggtactgccagtaccttgctggcacgtgccagaacgatttccgcatttgcgctatatccggaacggatggtaatactgtcggggactgtgatggctgctttgatctcaaattggttggcaccattttcttctacacctttaggagagatatattctagttgtgcatcaaattccatgttttgtaaggctcctaaagttatttttaccggcatgccttcgtgtatgcgtcctacttccgtttcatcaatattgcctcggaaaatcagatcattcatgttggctacggtggcgatagtggttccgtcattgaatgtgttgctcattatgacggagttaccggcttttacgggcacatccaaaatcaatccgtcaatagtagatcggataagggtactactgaatgaagccttgtttttagtgataccttctttgactatttccaggttatctttggctgtttgtaattcttcacgtgcctgttttacggctacttcactcttttcatattcttcactgctgataagtttgctttcgaacagttttttcatacgggcaaagtccgtttctccttgtctggcattgatttctgccagtcttacacggctttctgccgagtttagttgtcccagttcggggatcacctttactttggcaatcacttctcctttctttattttttgtccggcttccttatatacctcgtcaatgatacctgaaatctgcggcttaatcagaatctcgtcacgcggttctatttttccggtagctacagtggtctttttcagatcggtgatttctgcgtttaatatagtatacacgctggctttgggttgtgatttttgatagagaaatacaaatgttccgatgaatatcagtgcaacgatgactaatagtgcaatttttacatactttttcatatctgtttgttttattatttttttattcttgtttgttcttgcatggaaactttatccgttacgtcggacggctttattcgtctcttatagcctcaatgggtttgatggccatagcgcgataagccggtgccaatccggccagcatacctaggaccatcaataagatgcaggccccgacggccatccagaagctgatttggaaatgagcctctgtacccgaagctgccgttcctatttccagcccttgtaagatcaagactccgaaactaattcccatcaaccctgcaaaagttgtcaataccatgctttcagaaagaatttggtttagaatatctttagggcgtgcgccaatggctcggcggatgccgatttcggttgtacgttctttcacggtaaccatcataatattgcttactccgatagctcctgccagcaatgttcccaaacctaccatccatgccaaaattttgattcctgtgaacagattgtcaatcatgctgaacattgcttctgcattgaccatgatcaccgcttgtttgtcgtccgggtggatatagtgcgctttcttgattacttgttctattttgtcagctatactggtaacggtcacacccggttttacggtaatacagactaaatcaatgcgctttccaaaattgtatgctttttgcatggtagtaaatggaagagttacactatcctctgttcctgcattgatattcatgttactggttgataagctaacacctacaatctgatagtaaataccatccacacgcaaatattgtccgcatgggtttcctccttggggaaacagttcgtcgtatactcgttttcctatggtgcatactttccggctttccagtatgtctacgtcattgataaagcgccccattgtaatattttgagcttctatcttttcataatcaggttgtaaccctctgacggcacaggagcttttcttgtctccgaaaatagcagtagagccccatcggctgatattgggagtgataacttctacttccggtacggcttggcggatacgttccacatcgttaaactccatatcccaataacgtccttttctaaatcctttataggcttcactggttttattacttccgaaaaaaacggaattggtggcgaatcctttaaagttggccgacatcatatcttgtagtccctggccaccccccataagggcaaccagcatgaatatgccccaaaaaacaccaaaagcggtcaataggctacgtgtcttgtttctggtaatggtgatgaatatttcttcccacctgtctaaatctattctcataattttaatctgctctaagtgcttcgattggtcggatcatgacggccttgcgggcaggaaagaaacctgccagtgtaccggctatcaccaatgtcatggttgcttgtatggctatactgatatctactgtgggattgaggaaaactgtttcggtgaaaacgcctgcgtctacagtttggtttcctgccactgtgttcatgtattccgtggcagcaatgcctgccaccattcctatatacccgaaaaaggtggtaattgttacgctttcggctatgattagccataagatagatataggtttggcacccaacgctttgcggataccaaattcacgggtccgttcttttactgtgatcagcatgatattacttacacctacgatgccactcagcaaagtgaatatgcctattacccaaatggctatagtcagaatgcgcatacctttttcttgttgcaggaattgggtgaaacggttccacatccagatagcgcctttgtcatcagctgtaaaccggtggtgtacgccgatagctttgcggtactccttttcaaagatttcatttttttcttctgtatcgagtccttgtgtcataaatatcaaattgttcagcttgtcacctttattatatatgagttgtaaggtggtgaatgggatgaaggcgttaggttggaaacttcccttgtcggtaaaaaggcctaccacttgatatactactccattggcgttgacaaattttccgatagctttgtctgcgtcttttttaaagagcatttctgcggtttttgtatgaagaatgattacttttcgccgttgacggatatcgatgtcattgataaatcgcccccctgcaggttttactctttctacatccttatgattagggtatactccttccaatgtggtggatacatagtcttgtccatatgttaaagtcacattactctgacgtacggtagctcctacactgatgacatttttgggaaaatcggtttcggttatccgatagtctttattgtccagttcaatgcggcgtccttcttttaatccgtcgtatgctttggaagtccagccgggaaatactttgatggaattcatagccatatctgcagatgagctttcgaaagcatggattagtccgttgcctgcccccagcagtacgatcagcatgaagataccccaagctacggcaaagccggtgaggaacgtgcgtaatttattgcgctttattgttccgaatatttcttgaataagatcaatcatgtgtgtcagttatttcatgaatccgttcttgccgaaaggagaggcattatggtctatgttttcttcaatccgttcaatcagtccgtccttgatatggatgattttgtccgtttggttcgctactccactttcatgagtgacgacaacaattgtcagcccctcgtttttatgcagttctttcagaatattcatcacttccacggatgttttgctgtccagggctccggtaggttcatcggcaaggatgatttgcggtttggatatcaaggcacgtgctatggctacacgttgtttttgtccgccggacaattcattgggcatatgatgcgcccattctttaagacctagtttgtcaaggtattctaatgccatttgattccttttttttcggctcactccctgatagaagaggggaagagctacattttctaccgcatttttaaaagaaatcaggttgaaagactgaaagatgaatcctatcatccggtttctgtattcggcagagcgggtttcactcagattcttgattaatacatcgttcaaataatattctcccgaatcgtaattgtccaagatgcctaaaatattcaataaagtggactttccggaacctgaagcccccataatggaaacaaactcacctcgttctatgtcgaggttgatacctttcaaaacatgtagcggagctccgttatgataggttttgttgatattctctaaatgtatcattaccgatgaatttaacttgtgtttgtctggttagacgtgccgaagatacaaaaagttgcaatgctatatgaaataattgaaaaaaaatttgctctcttttttctcattgtgtacatttgctcaaaataactaaccctaaataataatatatcatggtaacaggcatggaaaaaccctacgtagtaggtatggacattggcggaactaatacagtttttggcatcgtagattcgcgtggtaacgtattggctaccgattcagttaagacacaatcattttctaagatagaggattatgtagaggctgtcagttcaaaattgcgtccgttgattgaatcgttcggtggcgtagaaaaaattaaaggtatgggtgtaggtgctcctaatggaaactactataacggaaccattgaatttgctccgaatcttccttggaaaggggtgattcccttggctactttgtttgaagaagcaataggtgttcctactgccttgacaaatgatgctaatgctgccgctatcggtgaaatgacttatggtgcggctcgtggcatgaaagactttattatgattactcttggaaccggtgttggtagtggtatcgtaataaatggacaactggtttacggacacgatggttttgccggagaattgggacatgtgatagttcgtcgtgacggacgtcagtgtggttgtggtcgtaagggctgtttggaaacttattgttcggctacaggtgtggcacgcacggcacgtgaatttctggttgcccgtcccgaacctagtttgttaagagatatcccggctgaagatattgtatctaaagatgtttttgacgcggctgtaagaggggataaattagcacaagatatctttgaatatacaggacgtattttgggtgaggctttggcggatttcattgctttctccagcccggaagcgattatcctgtttggtggattggcaaaatcaggtgattatatcatgaagccgatccgtaaagctatagatgataatatcttgaagatttacgaaggtaagactaaattgttgatttctgaattgaaggatgctgatgccgccgtgttgggagctagtgcattaggctgggaagtaagagaataatggaaaacaaaaagcaaggatataaagttcggaaatatcagggaccggtaaaacgttattgccagatgttgaatctgaaaaacgatgcggccttgatagccgagtatagaaagcgtcattcggaaggcaaggtttggccggaaacattggcagctattcgtgaagtcggtattttggaaatggaaatttatatcctgggaactaatttgtttatgatagtggaaactcctctcgattttgattgggatacggccatggccagaatggctacgttgcctcgtcaggcagaatgggaagagtatatgtctgtctttcaacaggcagagccgggagcgtcttcggctgaaaaatggcagttgatggatagaatgttttatctatatgaataactttcattctagataataataagaaaaaggatatgataaaaatcatatcctttttcttatattataaaattataaacttgtgttctttatggtagagctcatcaggcattagcctgttggctcattaatttctgaagcttgtattgcaaagattggcaagcagctccctttctcattgctttgtatcttcttaactgatactgcaacatctcgattgtgtcatttgttcttttcataattacatcttttttatgttctcccgtttggagaactggttattcctaaaaaccttttgttttctcttttactactgcaaagataacaccaaaattcctatttatgttttaaaacatagtatcaatccgctttatttaacttttaatgtgtattttgtcttatggtttagtatacgttaagaaatataactgtaaaaatgtcacttataatctgacagggaaatgttcattaacaaatgtggcggatctccttaaatcatgttagagaacataattttctttttgtcgaatttgcaaatttcaataatgttcgtacctttgcattgtgtttttcatagtattagatttaaggttaacaaaggttggagcaaggcgttgctcctttttttatgtctatatctctgcataaagtttcctttttacaaattgttttgttacattcgcaccatactattgatattaaactactattatgaaacacttatttatcacaattctgctcttattaccattgtgccgcatgctggcacaggagagagaatacgtaattgttgttcatggaggtgccggtgctatggaaaacctcgaggacgataaggagaaatcaaccttgtattatgcggctttagattcagctttgagcattggaaatgctatactgtctgccggaggcgaagggcctgaagcggtaatggcagttgtcaactactttgagaataaccccttgttcaatgcaggtaaaggggctacttgtaccagtgccggtacttttgagctggatgcttctattatggaaggtaaggatttgacagcaggagctgtcgccgggttgaaaacggtgaagaatccgattaatgcagcttatgcggtaaaaactaaaacacctcacgtgatgctggcaggtgagggtgctgaccggtttgcaaagtcacaaggactggaaattgtggataatatgtattttgctactcctaagacgttgaagtggatagaggatttgaagaaggagagcaagaagaatggaactgtgggctgtgtggtactggacaagcaaggtaacctgacagcgggaacaagtaccggtggtatgttcaagaagcaatggggccgtgtgggagattctccggtgattggtgcaggtacttatgcggataatgaaggttgtgctgtgtcgtgcaccgggcatggggagtattttatccgtcacgtcgtagcttataatctttctactcgtgtgaagttgctgcatcagcctgtcggggaggctgccgattatattatccatcaggaactgaataccaaggagggaaatggtggattgattgcagtggacaagaaaggtaattttgccatgccgtttaatagcggaggcatgttccgtggctacttgtataaggaaaaaggaacaggcaaaatttctaaagcagtgggcatagggaagaagatgaaaactttataattttagttcctgtttgaagtttcctcccacctgcaacagagttttgcaaaactgctaccactactaccatcctctttcgtaaacacccatgaacagggcgtttcaaaggtggtggtagcagcatgaaaaaacatctgctaccaccactttttatctgttatcacttccctttcctctgatagtttgggaattcctgtcacattttgtcttagcttcgttaccccttggaatagacacatccgtttgaaagctgtaggctgtatgtaacgatacggacggttggtatgcttatcgggaaccggtacggatggcatctcgactattcactgacggaaaagttttggagctgtagaatgttagcgggactttcatccgaaaaaggcatctgcaaaagactttggcatccgattcgtccttaaaggatcttatccgtatccctaaccctttcctgacgtatggttaaggcttttcttcctgcctgttttatctccgcaggcctttggagttaactccatagccttgggagataactccaaagcttatggagataactccaaaggctatggagatagaacatatccgtataaaaaggcttaacctggagaaagaaaaggcttatgctatagggtagggagtgatatacattcaattgaggcttgactactcctacagtcatgatgtttgaagcgatgctggatatcctgtcggttcgctgatgcggctgtaaccggaatataatatgcggcaggctggtaatgatcagacgcttagggaacatttggatactatccgtaaatacgccgttttgctataaaatgctgtctcgctgcggcttgatcggttgcaggtgcactcactgagcatgaggtaaaaaacattggcggaattaattcagtctttcaaatacagtctggattaactccgccaataggctgccactatcggatatcttatttataagtaaccggtatcaaccttacactaccattcaatcccgatggcaatggttgccaatcagtataaggtaccggtttgtattgcagattcaccacattgatttcattgaagatacgccatttctcaccccgacgatccatatctgcaatgcggttggcaggcagattggtcacttctatttctatcttgttatctcccggtttcagccatttgcctactttcaactgataaggtacggcccatgccgttccggcatcttgtccgttgatgcgcacacgggcactttcccgcacatcgcccaaatccagtatccagtcatcggcgggaatatggggaacagtgatgatattggtatatactcccgtcgccatggtaatcggagcgttggggtgagcaatttcagtccacgaagacggagtgtcgatatcaaatgtaccttctatccggggagtgttttttgtaaaatgaagtttccagccgtgatcaaggctgaggctgacaggttgttcttgaacgtatttccattcggcaacgtctgtcagggcatggttgaaagtttgcaggatcacgctttcgccggaatgcagttggaggtgtacttgggttttgccttcttgcttgcgggtttgtgctttccctttttctcccgtcatcggattgaacagcatgacactttctgcgggaacggctaaggttatccagtcgtttactcctttttcctgcaatgaggagatgaaataatgatgtccatcggcatgggagcggcggatacattgtaagccataccgcgttttcatctcttcgggaacaacaccgcttttttccaaggcagattgatagttgtttcctgtaatgatgatccctttttgataaggagttgccaccgtctcatcgaaagaagcaatttccggaagttgcttttgtaattgcgcaaagcctttccggcgtgcttccagttttccataaccgggtacatcctgcggatagttttcggtaaagatgatagtagctccggcttgtgccagctttagtaaatggccgagtacctcggacggcattagttttacagcaggaatgatgatggccttataggaagttcctcctttggtcagtaatttgccatttacgcaacgggtgcttttcacaaagttgtcagagatataatccatgtcatagccgcaattgctgatggtatgaacggtttctataaacttgggagcacgttttgccatatcatggatgctgaacagcaaaagacggcccggctgttcctgccacatatcatatacaggcagataaacaagaaaatcattgtccggtttccccatttgcaggaaagactggcaacgggtgatatattcaaagaaagcaggagcatcctgccaaatgttattggtaggagacatgtcaatagaggcatagaacttccatcccggccatttggcttctttgggactgtagggagttccgtggaaaaacatgtggtttacacctgatacgaacatcaaatccatatccggtttgcactgggaaagtgaggtacggaaatgttctgtcagccaggtgaatgtttcggatgaggtgtagggctttccggcgatatgagcggcggaagaagcatatttcagcatggaaaggtcggagtcattcttacgtgtcagggaatcttgacgcaatcctttaatatggaattgcgacaggccgaacccttcgcattcgggaatgtccacggaggcataggtatctatcagattggcaggggaaccgtgtgcctggttacgggtgatgctgccgtgaccgtgtgcccagttagtccattgggtactgaaattctcaatcaataaatcggagatggtttcgcgatagtcactgactatgcgggcggtggtttcattacggtcctgagctataaattcagggaagtgttcttccagtttatagccgcgacggcgggcgaattgttccagaaaatcaggagtccagtcagcaccatatacttcgtaagagtcattgaaaaaagtatgtggaaaattggtcttgttttctttaaaggctttgtcaaagttggcaaaatagcgttttacggctcctttatccaggtggttcatcacatagccttctccaccgggagcagcacgtttcactttttggaaagtcttgcctatatataaggtgatgatattccaatgtcctgccggagctttccattgtaattgtccgttcttcgctttggaagtgaggttaagacattgcttattgtccgcattataggccataacccggcttaaagtggctacagggcgttgtttttcttcttctactttcaaatctagcgtaatttcttttccaccctctacttgataggattgaaaaatagctttggtagcagcatctgtcatactcacgtgaggaccgccgaagggccatccggtaccggtgttcatatctacttcaataccgatacgttttccttcagcttcagtatgttgcaacatattcatccattgcgggctgaggaaaggaaggttattcttatcgttgccttgaacaccataaataggagtgatttcaacacctcccagtccggctttggcatattcttccagattgtaggtcagattggttgcatcgacagcacttcccagccaccaccagcgggtggcggggcgagcttcgggtcgcactgccggccattcttgtgcgtaaaggctgcttccggccagcaacaggctgaaaaataaatattttctcttcattctattttgttttttattagttggctgtattgaactcttttccatccactgtgatgttcctgtatctgatatcactggcatcatccgtgacaaacaagggacgtccgtccgctttctcgtaatggaaatttacattgtccaaggtgatgttgcgtgcgtggcggatgtagaaacctttggcgggaatcgttccgaacatccacggttcaggatatactttctcttgttcgggaggagtcagaagtccgtcggcttctgtatatcctccttggtgatagatatgaatatcgctcagtgtcacatcttcaataagggctcccggtattccgctgataatggaggagtagcgcgagtcggcattaaatacattgacgtggctgatgaggatgcgtttcattgtgcccacgggtgttccttgcgggctgcgcatccgggctcctaaccgcaggaagatgggggcgttgacaatatcgcgcatcgtgatgttactgatgacgatatcttccagtttgccaccgtccactgtttccagggcaagtccgcgacaacgctcgaagatgcagttggtgatggctatgtttttgaaaccgccgctggattccgttcctaatttaatgcgtcccgttacaaatccgtgatccggcgcttggggctcgtccctttgccaagtgcaatccaatacactgccacggtcgtatccgctgacaaaacaatcggagatggttacattttccgtatccttgaaatagcctaatccgtaggacgctttaagcacgatagcgtcatcccagggagcgttgacggtgcaatgactgatgcggacatttttgcagcagtctatgtcaaaaccgtcccggttggtatctactttcacgttcagaatgctcagattgtctactcctgtagccagcaggccgaaatgaccgcaatgcaacaaagagaagtctttcaatgtcacgttcttgcagagtttcaagctgatggctttattgcctacaccgggcagacggctttcctcacgggtgagtcctttgccataaatcagtcccggtccgctgatggtgatgtcttccagaccgattccccagataagtgagttcttccaatgactgtgtccgaaatcctggaattgggtgtgttcattcggttctgccgggtcatagccttccgttgctgatggaaaggcgccgacaatccgtgctccttgttctatatacagatgtatatggctgaccaaacgtatggaatagcaggcgtattctcccgcagggaaataaacggttcctcccccctgggaggcagcttcctcaatggcccggtttatggcggggctatcaatggtagtaccgtcggctttcgctccgtaatcttttacattatagatctttgcctgtgctgtccatgtgctgaggcataaaaggaagagtatgagttgtttcatggtctgtctttgcttttactgaatgggcattagtttgaatttgcgtaaataagatgcattgccatacatggtatgctcatcggataaattccagaatccgtctttagaggcagggtgggcatcccagtcaatcaccgcccagcatagtccgatttcatttccttcctttaataaagtagggcgagatagttcgggaccgtcggcatccgcatggtcaaagggggtgatatagaattccaataccagcttacccgcttctccctccttgaaagagtactgataggcataatcagcgtatggcttttgtttcagccatacctgaggaccccataacatacaccagtcattgccgtgagccggggtgaagatgtgatagttctgggcatggcatccgtgaaatttgaaccaggcttgccacacatctttgggagctgtgggatgaaaacggtcgatgaacggcccccctgaacaatcgccatccaccactacttcaaaaatatccgtgttcaaggagttctcactgaaccgccaataattatcgtatgcttcatatagaaaatacaacttctgagtttctgcacaccaacctactttgacactgactttcaatgtggtagtgtccggctgtgcatgttttccctcgtcttcctttaaagctgcttccgttatcttataatcagccggaacgcaatcccagtcgtgggtattgccatctatggcaggaaccttatctgccggaaattggtacaccttgaattcctgtgcctgggcagacaggcataggaaaaggaagaacaggtatggatacaatcgtttcattttgatcgggttttatgttctttcccgaataatccgggtagcatgaaataattataatcgcctcgttggtagaaacaaaagtagagcttttcttgcggtttccacgggcatagggcagagatgacgggggcatctgtctttttaccggagttgaataaagcaagcggggatgcttgtttatgtccgtcggacagacgaatttcggaaccgatgggagataccccatgaaccgttctcagtttcatgctttcaccataataggtggtaaaagcgtttccttctatactgaatacattatggaagcaggaggctaccggaatactgttgtctgttacggcagagtcgtctgcaccgtcgcatgcaccgaaagcccagcaaagtttgaactcttcgggtaatcgctcacccgaaacctccatgataaaaccattactatccgtcaatggacatacaatcagctttatttcaccttctttccataatttatctttaatggtataagcctgtccctttttcttaacactgcattggtccagccagcaactttcattgccgcaaaccactcccagacggaaagttcccgcacctttggataaacggaagggaagagtctgggcgttgttgccaaagacagacaacagcatacagagaaagaacggaagtagccgccggctataattccatgttgttttcatagctgatatcgatttgtgcgttcttattgtttttttcttccacacgactgccgtcttctacttgtaaccggacatcttccaggtggaagtcttcggtaaagataatgcttcctgctttatttaccttggcttttatgccggaaatatggaaattctgcaaaggcagttcctcattccagccggcagcggtgataaaggtttgcacattagtagcttttacatcgctgagccatacattacggaaatgcggataccctttttctttaggtgtgacaggagtcagcataaccttccaatgttcgggaatttccttaccttcatattcagccggcaaagtagaataactatagctggggttccagttcaggtccgctgccagtacatggcggacatggtctgctgtcacttgggtcatgtagatattttctacggttccgccgcggttcatggcagatttcagacggagggtggaagaggttccgtatgcttggaggttatatcccaatacatttcggatgcagcctgaagtttcgctgccgcaggtaatcagtcccgcacctttacgtgcaatgcatccacgaacaatgatattttctgtggggcggtttacgcgcaggccgtcggcatcccttccggctttcaggcagatattgtcatcgttgcaatctacttcgcagttttcaatcaggatattggtgctggaatcaatgtcaataccatccgtactgggaccatgcccccctacgttattattgattttcagtccgttcaaggtacattggtcggaatacagcacttggcaaccccaaaatccggtacgcatcaaggtaaagtctttcagtgttatatggcggctgttcgagatgagcatacctcttacacgtttgcagtcgtagtccacaatccaccgcagtttgcgtttctcgtaatccttccgcatggtccaatatttatcccagaatatttttccacgacaatccaacgtacctgctccgctgatagctgcgttttccgcatccagaatattgatgactgccgagggccataccatttcgatacctgccacgcgggagcgcatttcggggtataaatcaatattctcactggctatcagcgtcgtaccttggttgaggtggaggtttacattacttttcaggtagatggcaccaatccggtagtatcccggggctacttccactgttccccctccggaacggtggcattcgtcaatggctttctgcagggcggcagtgcttaaccgggtgctgtcatttttcaatccgtaatcggctgcttggaatatttttcccttcggataggttttggctcctacttgggcagtccacgaaaggtcaggagttcccatcccttctccccattggaatccggggagggattgggcattggtaaagagggtacctaaggtaaatgatagggttaataataatgttttgttgttcatttgttcctacttttaaattaattgccgtccggcttttcaatttctgtaaacgggctgtcattccatttgaaactgtccaaagcatccggatgtgcaggattgtaaccggaatagtcgctgcgcaaatagttagcgataggtaatcccgctttctttatcccttcaatgatacatttggagatttgataagctccgtaaggattgaagtgggtattatctgccaataccctgttttgtcccggataggttccggcaggataatgtacgaatgcctttttggaaggttccacccccattgcttcatagagggtacgggtcatttcgttgagatcgatcaaaggaacgttttctttggcagccaaccagcgcattgcttcgggataatcttcgtgagtatctctgattttcccgttttcatcgaaactgcggcgttgtgtcggggttaccagtacaggataggctcctcgtgcccttgcctcatcaatgaatgttttcaagctggtcataaatgaataataagctcctttaccgggacctttttgcttttggtcgttgtgaccgaattccataaaaatataatctccgggtttcatttgtgtcaatgcctttttcagtcgtcctgcaccgataaaagtattggcgctttcgccggattctgcataattggcaaaacaaatgctgtcattgaagaagcggggaatcatttgtccccagcttgcccaaggttcattgtcctggtctactaccgtggagttaccgcataggaatacggtgggtacattatttactttctcaataatcagttcggacaattggggtgcatccccgttgaattccaaagttagtttgtcatcccagttcaatttttggcgttcacgcggtttgatgcgcacattttctttttccgaaatatgtgtgttgcgcttgttgatcacgaatgtacaagattttaactcccctttttttgtcttcacattttcgaagaaaaggcggcgtgattctcctcgcactgttgtttctccggcagcgcgtttgtttcctatcacggctgtgacatggtagtttccatcgggaaccgtaacagagaaaaagaatggagctgtacttttaccttccggagagggctgtctgtcatatccgtatcccttttcctccgagtatctgtcggcgggagttattttggtataaccgtctttcgtctttttacctgtggtaaaatcgaatttgtaagtttgtgcttcgactcctaatgtcgctaaaagtccaagagctaatagggctatctgtttcatgattgatatagattgttattaattgattttcggttttagttcatccggagagtcattggtataagattttatgtcaccggctgtttttgtgaacaactcactgatttgttgaggcgttacagtaaattgcggacggaactggtccgaattcatataatccaaaatggctttatgcatctgacgagctacaatgcgtttctctggctgggaggtaatgtccatgcttgtcatgagcactttcccatttaatacattggcttcgaataacatacctatcttgcggcttataaaccaagtgtcgatactttgaaccgtaggttggaaagcgggtggaaagtgggtgaattgcatcacttgagtacgattcagcagttcccaccattgcaaattgctgtgatattctgtcggaaactgacggaataacgggtgtttggggttcactaagatacctgtggtatgaggaggacgcattttgaaccaggaggtgttccagaatacaggagtgaattgctgaaccacttctttaccataactcactttgcttgcagctgtaataagcacatttccaccatgctgaagaatttccagggctttcgaatccaaggtgtcggtagtgtatacttttccttcggctattgtcacttgggcgggataaacccagaaattccagtcatttacagcttctgttcccgtaatgcgtatttccagattcagctttttagcctcttggatatcagtaagcggaaactcaaggctacctgtgcgatttaaatttccgacaggaatgtcttgtgttgccaatgtgccttgcgcatatactttgccatattcgtcttttaacgtatatacaatttctgcttgttttaatgcctcggcaccaaaatgagcgatttcaatatccgcctttaaaatttccttgttattatatacaaatttatctgtacgcatcagtggaactgtaggtgagcagaaacgtctccattctgcggagttgatatatcctttttcttcaaagaaaacatcgagaacacctaccagtgcagttccctgacccgaataatcgttcagtgacaataattggaaaccggcataatcgggcgtgcggagtgtcttttctatttcatatttgtaacaaagggcttgcaactttccgctggccatcataaatagatgggcttggtcgctcatgtggttgtcagccagaatgtctttgaaaatctcgaagttcttggctttattgacgcctgtatatttacgtatttcattgaaattggggaaagcgcaccattgacctgtttcatgggatacgtagggctgtctcacggtgtcaagatgattctggaaacgatagtcgtcttgggtggacggttgtttcttggaccaggtcaggccacgtgccccagcctttacatgatattggttgcgaggttgccattgccatccgttgcctaccgatgctccggtatatacatgtctgggatccttcttttcccaatattctacgaacttggtcacccattctacccagcgtccgctaggttcgtttccgcatgccaacatgcaataagaggcatagttgccatattctttggttaatgcgatggtttcgtccatcagatatttgtcaataggttgtcccaaacctaatttgggaccatgattgggccagctcggaccttcgggttgcagatagaatcctacccggtcggcagccataaaagcggcttcgggaggacagaatgaatggaaacgcatatgattcagtccataattgcgacagatacggaatacccgttcccaactttctacatccatcggagcgtaaccggtcaacgggaagtcacagttttcaactgttccgcgaagctgggttttgcgcccgtttacataaaaccatttacctttgatttcaaatcggcgcataccgaattgtatttcctttatctcagtttttttcccattggtgacttctgctttcagtttgtacagggccggatgaaattcatcccatagcagcatatcattccccataggtaataccatttctgtttccgtcactcctttgttaagtttgatttcttgttgtatggcgggaactatatgctttttatccgtattgaagctctctgctgataattttacttttgcagtgcctgtacctttgatgacgactttgacacgtgccagtttttgttccggttccggatatatttgaatatcatcgaaatatgttttcggagtcgtttgcagacagatgcgtcctacaatgccgttccagtttccttgggtctggtcggttatgctgtgcgaatccggtccgacattgatttctttgatacgattatccacccggatggtgatagtacattttccgggacggacataacgggttatatcatattgatggggaacacaaagactattctgcattcctgtcttttgtccgttcacccatacggttgtttctatatggggacgttccaggaacaacaaaatacgttcacctttccagtcggcaggtatattcacctctttctgataccaagcagctcctacataatgtttgtcgggagtcagaaagaatggaaatttaatattaccttctttacggtatttttccatgtatggattataatagtaggaactgtcatagagactgcctgtccattgggtctttgcggtaacctcatcacctttcagtttctcgggcatggaaccgggcaggttgatgaagtcattcaaagtgtggctgaaccatttttccttttctccattatcctgacggtctatactgaatgaccattttccggataagtcaataattttttgtgcgcttaacgagaagcacatccatactaggcagattgtcaataacgtttttttcatagtatctttttactttgaatttgatgttgctaaattaaggtcttttcatctgcatgtaaatagaaagaagtacatatagatggaaattcgtataaaatagaggtaatgtgcgatatatttgtacgattttacatggatatgccttgtatgtgcagaaaaaagtccaaatctctttttatctttgtatactcacaattaaatcattgtatacatgaaaaaacgattattcagtttgctctgcttgttaggaacggttgccggattatttgccggtgatacggcttatttgttctcttatttcattaatgacagtcgggacggtcttcatttggcttatagtttggatgggctgacatggactcctctgaatcatggaaaatctttcttgatacctacggtcgggaaggatcgtctgatgcgtgaccctagtatttgtcaggcgccggacggaacctttcacatggtgtggacttccagttggacagaccggattataggttacgcctcttctcccgatttaatccattggagtgagcagcgttctattccggtaatgatgcatgagcctgctgcacataattgctgggcacctgaattgttttatgatgaatcttcgcaaacttattatattttttgggcaacgaccattcccggacgtcacaaggaagtgccggtcattgagagtgagaaagggctgaaccatcgtatttactatgttacgacgaaggattttaatacattttctgaaaccaaactgttctttaatcccgatttcagtgtgattgatgcagctattgtacgcgatccggtgatgaaagacttgattatggtggtgaagaatgaaaactcgttgccggcagagaagaatttgagaataacacggacaacacggatagaggatggacttcctactaccgtttctccttccattacaggaaattattggtgtgagggacctgcgccactttttgtagatgatgctctttatgtctattttgataaataccgtaatcatcaatatggagctgtttgcagtcgtgatcatggaaagacatgggaagatgtgtctgaccgtgtatcttttccaaaaggaacccgtcacggaactgcttttaccgtagagaaggctgtacttgataaattgcttcgtatccatcacttcaatcctcttattccggataatatcgctgatccttctttatccaaatttggtgatacttattatctttatggtactactgatattgataaaggattgtcacaagcagggactcctgtggtatggaaatctaaagattttgtaaactggagttttgatggatcacatattgtgggattcgattggcataaaggacatgaatatgtcaatgccaaaggagagaaaaagacgggatattttcgttattgggcacccggcagagtagtggagaagaatggtgaatattatctttataccacttttgtaaaaccggatgagaatgcacgtacctatgtgctgaagtccgaccgtcccgaaggtcctttcctttttgccggacgtaattctatgtcttctcattctttggatgggtttgatcaatcttgtattgctccggatatagatggggaaccttttgtggatgatgatggaactgcttatttattctggcgccgccggatggctgcccgtatgactgacgattggcagcatttaaccggtgatactgttgtgatgagtacggctcgtcaagggtattcggaagggccggttatgtttaaacgtaaaggtatttattattacatctatactttgagagggaatcagaattatgtaaatgcttacatgatgagccggcagtcccctttgtcgggctttgaaaagcccgaaggcaatgatatttttcttttttcatccattgccgataatgtttgggggccgggacatgggaatgtattttataatgaagaaacagacgattatattttcgtatatctggagtacggtgacggaggaactacccgccaagtatatgccaatcggatggaatttaatgaggatggcactataaagacacttgttcctgatgaaaagggagttggttacttggctgtcagtcaggaacagcgcgaaaataaggcgctgaaagcttctttcagtgcatccagcgtacgttctccccgtacttctaaggttgaaatagaaactcagcctaattgtcctttggctgataaaacttcgcttgtcaaggtggaacgtacgcatatttatcatcctggaaatgcaggcgaccagtctaatggaacacgctggatggcagaaacaaatgatgatcatccttggctgatggtggatttgggtgaagccatgcaggtaacggagtgtcaatttgcctttgtacaccctgctgaaggtcatgcctggcatctcgaaaaatccaatgatggtactaattggcaaccttgtgccgaagtaaaagaggtgaaggcatgttcacctcatgtggcaacggtgggagataaagtacgttatttgcgtttgcacatagataaaggtgcagccggattatgggaatggaaaatctattaaattactattttatcatgaaaaaacgatttgtgaccgttcttttggcttgttctttggccggaggactttttgcacaacagccttggtttaaagacaaggatttgaccttgaccggtgcttattattatcctgagcattgggatgagagtcaatgggagagagattttaaacagatgcacgatttgggttttgaattcacccatttcgcggaatttgcttgggcgcaattggaaccggaagagggaaaatatgattttgcctggttggataaagcggtggctttggctgccaaatatgatttgaaagtcattatgtgtacttctacggcaactccaccggtatggctgagccgtaaataccctgaaattttgattaaaaatgaaaatggtaccgtgcttgatcacggagcacgtcaacatgcttcttttgcttctcccgtttatagagaactggcttataaaatgatagagaagttagctcagcattatggaaatgattccagaataatcggctggcagctcgataatgagccggccgtacaatttgattataatccgaaagccgaactggctttccgggattttttacgtgaaaaatatcatcatgacattaaagcattgaatgatgcctggggaacggctttttggagtgaggtttattcttcttttgatgaaataactcttcctaaaactgcccagatgtttatgaatcatcatcagattttggattaccgccgttttgctgccagtcagacaaacgactttttgaatgaacaatgtttgttgattaaaaaatatgcaaagaaccaatgggtgactactaactatattcctaattatgaggaaggacatataggtggcagccctgcacttgattttcaaagttatactcgctatatggtgtatggagacaatgaagggatcggccgtcgcggatatcgagtgggaaatccgttgcgtattgcttttgccaatgactttttcagacccatacaaggtacttatggagtaatggaacttcagccagggcaggtgaattgggggagtatcaatcctcaaccgctgcccggagctatccgtttatggatgtggagcgtatttgccggtggaggcgactttatctgtacttatcgttatcgccagcctctgtatggcacggaacaatatcactacggcattgtaggtacagacggaacaacggtaactcccggtggacgtgaatatgagcagttcatgaaagaaatcagacagctgcggggacaggttgcagctcgtgaggtgaaaccggccgattatttggcgcgtcgtactgccattctttttaatcatgaaaattcatggagcattgagcgccagaagcaaaatcgtacatggaatacattagggcatattgagaaatattatcgcacgttgaaatcttttggcgcgcccgtagattttatcaatgaaagcaaggagttctcctcttatcctgtgatcatagctccggcttatcaattggctgacaaggcattggtagacagatggactgattatgtaaagaagggtggtaatttggtcttaacttgccgtacagcccaaaaagaccgccatggacgtttacccgaagctcctttcggttccatgataaatgaactgaccggtaatgaaatggagttttatgatttattacttcctgaagaaccgggcaaattacggatggatggaaaagaatatacgtggaatacttggggagagatattgaaaccgggtaaggattcacaagtatgggctacttatacacaggaattttatgaaggaaaaccggcagtcactactcgtaagttgggaaaaggtactgttacttacgtgggagtggatagtacggacggattattggagaaagatattttgaagaaactatatgcgcaattgaatattcctgtgatggatttgccatacggtgttactttagagtaccgcaatggtatggggattgtactgaattatacagataaaccttataatttcgtacttccttcgggagccaaagtgctgataggagagccggtgattcctacagcaggagtattggtattttctattactgattgaaaacgtatgattgatagaacaaaaaggagcggcttcacagtcgctcctttttacttaacctaaatctaacctttaaatcatagtctatgaaaaatcgattcactaaccaatcatattattaatttaatttgtaaacctcacttccggcgagcaggaaacaccctactccaaaatcttcaaaatcgggtactttatcgtatgtgacaggttgactgtctttcggttcttttccggttccttgtacaagtcctaggaagccgttagggtgaacggcatccttcaccatagcattccatgctttcaacaagactggcaggtattcttttctgtccaacagtccgttacgtaccccccatgccatgccatatacaaataaagcggtgccactggtttctttacctccgaagtttgattcgtcatgcatacttacattccaaaaaccatcagtacgttggcaatttttgatagctttactcatggtcaggaaatcattgatatagtcggcgcgatgtttttcatcagtaggaatttcatccaatacacgtaccagtgctgcatatacccatccattaccacgactccaatagcaattcttaccgttaggttctttgtaagggggatcaaagtcttggtctctccaccacaaaccttctttttggttgtacatgccattttcaccatgtttgttacgggtatattcatacatatcccacattttgtcgaaatatttttgttctccggtcaattttcccagtttggcaaatacaggcattcccatttggatggcgtcaatccaccaccaatcatttacttgaggagtgttgaccagcatatctatattggctttgaccttacggattctttccggatcgggacaaatgttatataaatcaatgtaagtctggctggcacagtaatcatcagcattgcgagtggtggtaccgttgcggaatccccattcgtggtaatttgaccaatcgacagcgtatttataatagtcatcgcgtggatagacggagtaaagagccattaatccttcataatatactccgcgtgtccagatattactgggacgggttacattttttacaaaagaaggagtacgataatcggcatacttcttcatgaagtaatcattgacttttgtaacagtcttcaacgtttcttttttgtccggcaagtcttgtgcttttacaactccaaaacctaatgcaacaaaaaagaatgatagtattaattttttcttcatcatgttgttttagtgttttaatggtagcgcaaaaataggatggtctgggatttcctacaatggaaatgtgtacatcttccttgaatattatgcatgtgtacgcatttcgagtgtattttttatttatcagtgttcttattgggctatttgtctttatttgcagaccgttcataaatcttttctccttcttttatctctagttccaaacctttaaaattaacattggccacatttgagatgcttaatcctttttgagctttgatatggcaattctcaaaaaagaatgtatcatttccgaatggagcctctttaaaaccatacatggttcctgctgattgtgcttctccatttatattcttgaaatggatattgcgcaaacaggtcagcggataatgtgcaggtgaaatcggaggaaccatacgccattccatattgatatcaaagatactgcgcgctcctttgatggtaatatcttcaaaagtgatattttccacagttccgccgcggctgggctgacttttaaaacgtaaggggctccagttttcgttatccatcaggcaggaacgtatggtcacattgcgtattcctcctgatatttcactgcccatagccactccgccgtgaccgtatgcaaaatgacagttttctatcagaatgttttcactgggacgtcctactctgcgtccgtcctcgtctcgtccggatttgatggagatacagtcatcatgcgcctcaatgcgggtggaagtaatcagtatatcattggacgaatcaatatctatgccatcggaactgggtatatattccaatgcacggatatcgattccatctatagtgaagccatttgtgtaaagtacatgaagacaccatgaggcctgatttatcatttttaaaccggaaatcttacctcccgggcaatctgtgaaacataacagtctgggacgtccggagtttccgaatggaatttttttccattctactcctttaccatcgataactccttcaccataaactttaactccgtctgaatggtcaaaattcaagaaagcacatcgccaccttttttctataccttcaaaacgggtagggatgacaggaaattcattggggtcgacagtgctgattagtttggcgtttttttctatacgtaaatctacaccacgtgggaagaatagagcgccgcttagatactccccggcaggaataactatcgttccgcctccattgtgagctgcttcattaatgatacgttgtaaagtggctgtttccgaatagccatttccttttacgccatattctttaatgttatattctctgttattttttccgatagatatgagcttgctttcccatgcttccagtttaatggtcagacgggtacggttattgacaattgttgcatttatcggttggagtgtgccatctgtcgcattccattcttttgcgactcctactttatcaaagtctgctgtaaattctgtagctttattcccttcattgaatatgaagtagaggtcgccatcgggcattactctgcgcgtgtagcggatagaatcattggcaggtgaaatgattttcatttccggttccggaagggaagagcttacctgtgctgtccatctggtggatggctcaatcctgctattggttaaatctgatagggaaccgggagcagtgaaacttttgtcaatgaaagaagcaggcttccttccccaaaacaggacctttcctccacgtgaggaaaatgtttctatcactttccaggcagatgcggaaataacatctgatgatgggataatcaatgtttcatatctttgtccgcttttattttccagatagccggaacctatggtcagtgcttccgtaaaagcatcatcgtttatgtagtcaaaatctcgttgatgagttaacagctgttgggtaagagtaacgatatccttataaacttcattgttacccagccacatagtagatgtggggtaatacatggcaatccgtgctcccggcttcccctgactcatcagataagtggtgcgattcgtatattcattcaggcctttcataccgggatcactcatccaattgcgatgtttggaccctgccggccagaacatgaattcaaagaagttaatcccacgggcaatctgatgatctacaacaaatttggcttggggaatggtaggggagatgtggtaagctgcaaaactttcgctgaatgctctaggttttccataaacatgagctacagatgaggccagtttggggaaatcattaaggataccgggccatatttggttccagattgcatctactccgggtatttgaactttacttaaattccggaaatagtctccttcagctttaacacatgcgggcatttcatgttctttgttaagatgggtaatgtgggctactccattagccgcacaccaatcggcctgtaatttgaaaaaatgggtggcgaacaagctggaccagacatcccaataatcggcttttaccctttgttcctgtatggtgggcgaagtggtaaaaaaggaggccagatagggagtcggatcatacccttttgtatctttgaatgtttggacaatggaaggagtccagggtaaatgtgcataatcgggttcgtctccccggaaaccaagtacggtggtacccagctctttaccaaggtattttttatactgttcatgtgtccaatcaatgaattgttgtacggcaatagggttcagataatcacacagagaattagtggcatctttaccgccattgggattattaacggctcgggttacggccgtccgaaagtcgcttttgaccaataggatcttccagtcatccagtccggcgttgaaacttatttcaccattattaattgctacagttctgttaggagcaccggatgtactgacggctaccgcactgatgatttccggtgctattttatggtttgtcattacttctccccgttttacctgtatggtatcacctatcacaagagcttgcattctcaaatcgggacgttcctgtgagaattttcctcctgcaaatccgctgggatattttccttcatcaataatccagactttcatacctcgctttttggcttcaagtactccggtacgaatcgctttaaaccattcttcggaaagatatttgaagggtagtttgtaacctgcttcaaatattacggcacggaatcctttcttcttgatagaatccaagtcattgcaaatagtctttttatccattttcccttcccaaccccatattacgtggttggcaaattccacaggaggttctgcaaattgttgttctagacgggaaaggggtgtttcatgaatgccttgccaggattttatttcattttctgcgagtataaagttgaaataaaaaagggaagcaatgagtaatagtatcttttgcatgatgtttatgattaggtttgagtcttatatgcataagggcgcatcaaagcgcccctacagcaaaaggatatccgttacagtttttagaggaatccttcatgctaatcttaatattattctcctaaataataggagggaacaggagcttgtggatatcccatggaacgatgagctacataacttctatatattccgtcttgcatcaatgtggtacgacggtcttttgccggaagattggttgtgtagatacgtatttcaccgggcaatgcggtgattatttcttcacgccagtctccatataagtctgcgatcattaagatatcaccttcaattccttgtgtcagtgtttctcctttccattttacaatacttagtgaacgaccgtttgaagaggaacttgccccccatcggttatcgtcccctttgaatgtttcgcgcaataagtcaccgtcccaccaggcccaattacggcaggagggcacttcctcatttttacctaaaggtttaccgtcagccgaaagtagatatttgtctgtgctgcctcctttacggtcttcgctggcaaaacattccagacctttgtggaccggatcaaaatcagcaaccatcccatcgcctacatggaatgtcttatgaccgatattccataccggttgtcctgttctggcatccacaacacaaacgccacgtccgttctcgtgccaaggttccagacaaaggaacacttccataccaggacgatccgggtcgatatcagtcagatagattttatcagggtgtcctagtccggtagaccatagtaaagtcccgttatcatcaagcatgcatgagcctaacagaatttcatcttttccatcttcatccacatcaccacataccatattatgggaacccatgcttcttactacgggattttcttcatcgccgtcccatcgccatgcacgttccagtttgttatctttcagctgccatgcatctacagtcatcagtttgtaagtgccacgacatgccaatatataaggggtcttgccgtccagataggccattcctatttggttacggttctgccggaccagatttccatacctgtcattccgttcaggccagtccacgcgggtaatttcttttccggtcattccatcccatacacttagatactcttcaccggaatctacccgtcctttttcatttcgtttggttgtttccggagctgtttttaaggcaatttctgctttgccatctccattgaagtcgtatgcgatgaaaggggagtaccaaacaccgggctcgataccttgtcctaaatctttagaccataaaaaagtgccgtcacttaaataagcctcaatttgataagttgaaccatccaaagtaccgggcattccgggatccacatttttttccggggtgcggatgatataatcgtaaatgccatccccgttcaaatcagcaacggctattttgcctgcttttatattacggttcaatttaatggactgatagtttctcaataaagaacagtccacatccaatttggaagatgtgtcaattacttttttctttttatctaatgcacagatccaataggttgcttttccagaaacgggagtctggtcaacaaagtcacaggtgtttttaattggattttttgataaacgctgtgtcttgccgtttgcagaacggtagaggtggaaggaagtgtcagttccatcttgttccaatagtctccaactgaggtagatacctttcccgtttgcagatggagtggccgttaatcctctgtctaagttttcttttattctttctgttgcaaaacctttgatttccggtttgggctcatggcgtggttctagtatttcgtaataatatgtacgttcacgcaagtcttgggctgtcatgcttgttgatatgctaagcaatagtggtactgagcataatcctataagtaggttcttgtttttcatcattgatttatatattaattatttgtttttaaaatatttgtcagcaaagcgaaggaattgttcccaatcgtatggaagaacagcgtgaggtcctttgcgattgtggtatgcgatagggccattcatgtagggtgtatctacgggaggcatttcttcacaacctattccgcccaaaccatagagggcatatacaggttcagctcctttacctcctagaaattcacctttttggtcggaccagttgtcttcttctgcactggctatatatataggtcttggagcaattagggcaacaagttcgtgctggtcgaaaggtaagtatttttccctgtcattaaattgtttgtaattaccacagaaccaatgaggaaaacgtacattcatagcttctacagtctcaccgaaacaacgacgtgagatggcaactccacaacatcccgaattcccggatatgactaaagcaaaacgcggatcggaggctccggcccagacagcggttttgccaagacgagaatgacctatcacggcaacttttttagcatccacttttttgtctgtttccagataatccatggcacggctcatgccccatgcccaagctgcaatggaaccccattgatccggatctgggaaattctgccctttctcgtaataataaggatgcacaccattttggaagtcatcgtcaaaatcgggatccacatcattataacagaaagtggccagaccatatccgtgttccaaaattttatcaagctgccaggatttgtccattgatcccctgaaagttcttttcttcattttttcatctgttatttcggggacagataaatcgggatcatcatatatcgtgtaattgggcatgaagctgatgcctagaaaaaccggaatttttcctgatacatgattaggaagatacagttgcaagtcgatgtggggcccctgtggatcgtctgttaattggatggttatttctttccgggtggcacgtccgttcagagctttttcattgatccgactgactgtacaaggcagtttgtgttttaatacaggtgctttgccaaacatataagtcgtgaacaggtttaaaatttcggggcggcgtttttgctcccattgttccttggtctgaaccatttctccgtcgtggcacattaatacggaaggtaaggtatattgcggaaccttactttcatcataattagctaatttggcatagtcttttctaggagattttccattttgggcgtcagtataagttatactcaagaggagcataatccatatcattatgtttttcataagatccagtttttatagaagtttgataacgattttttataattaaatttgtcttacacctttcggaagttttactttggttgcgattttaccatcggctttcttctcgtggctgacttctatcacgccccaaggggtgggataagtacctttggcccattctaatttacccaagtgtggctcaatactgatctgcttgcgttccacgtccacgatttttatacctaatacatgatctgacagccatgtggtaggtcctgaagaccacccgtggcaaaggctgtgacggaatccgggatagcaataggcgccgaaatcgccatgtatgtctttttttccggctggaacaggttcgtctataggagcggcattaggaatccagtccagattgaaatcttcccaaaacgtggttgctcccaaatccagcatggccccccagaaagtattaatgatatctattgctttctcatactcacctgctttggctaatgcttccagcatataatacccgtaaaaagtggaaaaaccttttccaccgcctacagagacaacttcatcgcaagcctgttggggatccatcaatccggtgatggccattaatgaagctgcctgtttcagattgttgtgaggtaatatcttttttttcatccggttgataatgtccagacataattgagcatcagaggtgttgccaagttttaaagacaattgatgcgcatcttgcatggcccatacgatcagtgcgcgatagcctgcctcaactccggctttatttccgctggatggccagtccaaaaagcgggcaggcgctaacgtttcatttcccgcatcatccactttcccgtttatcagatggattaatccgctgatatagtcggaatgtttctttaaaaaatcaatatctccggtctggtgataccattcatattggttgatcagataccataggctgtatgcactcatgccattcatccaattgggtaaaggaaattgtttgcaagccaagtccaaactgttggggatcacctcattgtatccgaaaacacggctgatggtcattaattcaggatgcatatcgcccagccagactactcggtcacgtttgatgccatcccataaaaactcctgcatgttcaagtggacagtataggctccggtaatccatattttgtttaaacgttggtcgttgcattcgaaagatcccagatagggaatatcacggtagcgcaggatagctgaaatttcttttaaagagatagtggcgttgttttgcagcaagtcgaggcggacaaagcggaaaccggtattgcctatttcaatcatgccgtcacggggaatttccatgatgatatcacgtttggcatgatcgtctgttgaaaatcccactttccattcggaatttgaagtgctactgttggcttctccaacagattctccgaaacgtatccttaccaaagaaggctccctacggctggaactgcccatgacgagctttaatcctccatgcagttcactgccgaaatccagtaataaggatgccttttctgtttcagtagaggtcattatgcaacatctttttctgttcatttccgattggccgtttccacgctctaataaatagtgttcgtcttttattagattattcttacatcctgcgtatttggtaacaatacgtttgggggtgatgtaagcacggttcatgatatctttggtcattctttgtgaggcatcgctttgtagggtgggagggatacctgcatatagaagtgcgggtagcagaacgaatgcaattatgctttttctgattgttggtaatagttccatagtatctttgatttttgatttatgcaaatatagacgaagaaggtgtcttacctatggaattttattcatttacatggaatattgttcatcttctttctgttctttttccatatacggataacaatctagttattgatttttttggggggctgacagatagattctttatatgaaaagaaatagttgaaagatagtaagtgttcttttgaaggaaagaagccttgaatgcctctgtgttattgattttggtaccattggcatctttgcatttacctaaagtgcttagtgcggttgaattatcttcgtcaccacctgcgcttttcaagaaagccatagaaccatcggtgtagtattcgcgatcttcaccatttttccattcggcacgtgcacggagctggttgatggtagagatagcatcctggaagttaccggaacgtacttgcgcttccgcttttatcagataagtttcgcctgtacgggccataatgacatcacgatgtgcgtcccctttttctgctgtacgcgagccgtcatcagttttattgataccacagaagacattggactgtgctggatttccgctaacaccataggtgttcaatacatattgaccaccggcatatacagggaacacattcggcacccatttatttgtttcggggtttacaaaggagtgggctataccaccacgacctactgttccataatcggagtttgtagcgtctttaaaacggttgtcactttttttattaagaataaagatgatgccttggtcgcctagtgttggaacctgatcggctgtaataccgtttgtagccactacatcatctgctttcgatgcaatattattcaatccgtagacagttttgaatgttttccacatacgtgagtcattcacattgtcaaagatagcataagcgtattctgtagggtggcaacgttggaagtccataccaccaatatattggtcacgttgtgtccaaccaccggaaaagttggagaattgtgggttgaagtaactataagtacggtttccgaaacgtccggttgccgaagaagtgtgttggcatgacattaatatttcattagactcctcggctttgcagtctataccggtccatttggcgtaaaggttattataatcactttctaacggacattttgagatgaaaggccttacggaaagtacgctggatggatatttcaagaaaacggtagaactgctcaaacttctgtatgaagaactcaaacaggaagtcttttcttgtgactataacaggcagacgaaagcactgttccagtcattaatagggaaaagcattggggaccgataaggaatacttgtcgatagtaaggtcagtcatggagaaactggtaatcttccattacgacaagggatcgcagagcggaacggttatcgaatccctgacagaccaatatcactttaagggatagtttcaatgcgaaggttttgcagactatgaggtagccttcaagactacccccgatgtgtagttgctcaattgcttggtgcatatctaccatcattttgaacaggctttggatgcttaccctataccgatgggacaatataatgaaatgtttggaagacggacatctgcttggaaataatattttggtagaaaatgttatcagatcgataactatggaatagaaaaaattatctctttaatggaaaccatgaagcaacagttaatatatcggttgtatgttctctgctggctatctgtaaggtacagtatacgatgtaacgccaaggaagtatctgaatgatgttgtcatccgaatgtcctatcacaaaacaggtaacttatgaagacttgttgaatatacttccgtacaattggaaattgcaatacctggaatgtgtattgacaaaacaaaatagggaagctgacaattagtgctgatttcaacatataggttcatagtgacagtttctattgttatatataaaggtttaagacctgttgtttatcgaatgcttactgatttaaaaaatactgatatatggatttctcaaatagctttcaattgaaaaatccatatatcagtatttcatttctcaagttttgtataatatttttcttgactaactaatcccctaccgttttcatcggtaaaacttccgcaaattcaatgaagaatccaatgttttaaggaagcataaaatctttcaaagccattttacaatgtatttgttcttgtccggaaacggtttctgaattcaaatatacatcgataagatcgtcatcattcatacctttatcttgaaatttataataaatttctccaggcatttcaagacttataaacgaagaaattgagttattactactttgtatactattattaaaatacaaatttaaatttaacttattattagaagtttctatatccttttcgccatcatagtataataaaaagaaaaccggcttatataaatcatactcaaaagttggaacaatattcatataaccattttttatatagaatgctccggccgttttatctaatgaataaatactcttattttttagttggatagagtcttgaccgaatatttgatactcttcacttaaagtgtcaacatgaactgtaaaagtaggaatctgttggttcattccattcgtactgtttaatataacatcataagtttttccgtcctccaattgagttgtattttcattttcatccaataagttaaaactaactatggcacgttgcacttcttttaaccaaggtatacgattaagactttcttctgttggaactaaaattgcaccaaaatccgtgtataacttgtagccacgaatattgtctccaccaaccgtaacatatacaccattaaatttagaccattgcgcatcatcgtcattactgagacaagagcaaaatagcccgatacaaactacaaagaaaaagaggatataaaatctagattgtttcatgacatttctataaattataatttaaaggtaaaagaggatgctttatacatattgatgcatcctcttattgtacgtttattctattaccatcctgcgttttgagacaaattagggtttttcatacgttccgattgtggaattgggaaaagatacattttatcatcccaaacacgattgacaacatttcgtttataagtgatagtaccatcctcattttttgtaagtttcatttctatgatgctctttaatttatcaccatctttccatcttctcagatcataaaaacgatgtccctcaaaagccaattctaccatgcgctcattctgatatttattccaaaaggcatctgccgacaaacctgttggaaattccggcattttaacatcagtacgattacgtatgatatttaccgcttcacaagctgtcattccgaattcaccaccattatcagcagaacccgtatattggaatatggcttctgcatagtttaagtaaaattctcctaaacgataagtgatccatgaatggcggctggtttttgttgtactattagcactcagatcaatggctgaatccaaatattttttcaaataatatccggtaggggttgcacctgaaagaggttcagcattcaaacctccataaaaagtttcaataggattggcattctttgacggccattttgtatctccattctttacaatagtcatatcgaaacgtggatcacgtccggcatatggattagaagcgtcataaccacttcctgtttcattccacatttttccagtagctttcatttcataggcgtcaaccatattttgtgttgggcaattaccggagtttccacctggcactcccatcggaaaattatattcttccaatgtgctgatgttaccattatatcgacgaacaaaaatcatttcattatttgaccagttgttaggtccccacaattctgaatatttacttaatttaaaaccattagctgtacaagtttcaattacctctttattagcttcagccgctctacgccacaaatctttgttattttccggattaaataatggactggcagcatataaagcagcacgtgcttttaatgccaaagctgcataacaagtaacacgaccgttctctgctggggcaattccgtccaatccaagttttgtatagtctgcaggtaattctgtagataatttgtcacattctgctataatggcgttaaaaatttcctgtgcaggggtgcgtgtcagactgtttacttgatctgtagttaccatttctgtaaaatatggaacatctccataagcacgtactaaattaaaataaaaatatgcacgcaaaaaacgagcttccttgaaactgttggtataacggaacatttgtgcacgatagtcatcattcaattttagctcatcaaatgtcaatccttgaaattcagccagatactgattacatatctgaattgctttatagctactagaccagatgttagacattggattagccgggctccaagatccgtttacaaaatcacatatatcattgtttgtataagcatattcagcttcatcacaagcagatgccagcattccacctttatatgtttggccaaagtcatagtctaatatggaataaacattggtaatcataccaattacattttcataactttcatctatatagttttttccgtaattggcatattcgtgataatccagattacatgcagccaaagttaccatacatgctattccgctcactatttttttgattttcataatcatgtttttaatttaagttcaacaattaaaagccgatagttaatccagccactacactacgagttaaaggataagtcgctccataaacttcgggatcggcaatattaatcttatcaaagcacaaaagatcaacacctctcacataaatctttgcattgctcaatatcttgcttttctttacccatatttgtggaaacttgtaatacaactctattgaacgaagtttcaaaaatgagcggtctgccaaccacaaagtattagtttgataattgttctcattactttgagaactcaaacgaggatatttagcatcttgattttctggagtccaccggttatcataatattcctgtgaaatcgttgtattatttattaacggccagtataaactcttcgtatttaatacagcagaatatcttcctgtcccttggaacatagcatcaaagcctaaccctttccattctgctcccaaattgaatgaatagtaaatttcaggagcagtagtactatgtcctatagcaactttatcattcgcatcaataatattgtcaccattaacatctttatattttatatcaccaggttttacatcaccaaatgactgtttaggactattctcaatgtcagcttgatccttaaaatatccgataacttccataccataagtttgcttcagaggcttacctgtagttataagattatcatacatacgcggttcttccatttgctcgataatctcatttttggctaaagcaaaattggctcctatatttaaagtaatgtcagcaatttttttacgataattagcaccaatttcaactccccaactatcgacaataccaccattctcataaggagcagtaaatcctaagacacttgaataatgaccgcttgaagacacccaaatatctgaacgtctttcataataagcatcaaaagatacgtccaacccattgaacatactggcatctaaaccaaaattatatttatatgctttttcatgagtagaattcaaagaagccaaacgacctaatgaccaactttgcgttcctacagaataatttgtatcaaatggataataaccaccgccaccatatgtttgttcccaatagttagtaacctcactgtcatcatccaacggaagacggtcggtattaatgacaccaaacgaagccctcagtttcataaaattaatccaagaaagatctttcatgaaattttcttttgacataacccaagctaagccaacagtgggagatatagaccattggtgtcctggtgccaatttattagacgctgaagcaactacactcaaatcagcaaaatatttatctttgtatccataatgagtatagaaagaggcattctgacgataccaggtctgatcggtccctttggtattacggtattcatagtcccattttaattgactataaattttattgtccttatttatctgtttgtcataaaataaagttgctgcaaaattgaatacccgtgtaaatgcaatacatttagcatcactactcatcgaactttctttaccatcagtataataagtcgtacttgaaggtacaccattttcccatgcagttaccgaattactaccataaacaaaagttttagaatgattttcccaatattgggcatagttatcataagataacataccgcttgctcctagtcctggggttatagatgataaatcctgggtcagcgtcatatcagcgaacaatgtacgttcgtggaactttgtgtaagccgctgcttgtgatacagctaaaggatttttggtcccagcccaagtcgcactacctccccatgtaccattttccaaacgagcgggaaaagcagcggaaggtaaagtataaatcatatcccataaattagcacctccctgaccattcgctcccggagttctagtttctgacaggatacctaatacatttaatttcaattttgttttttctgtcagatcaatatccaaattagtacgtaaattggctctggagtattggtcctgtgtagaatatccatcattcatataaggattggcaataaaccctttattagtagtcaagttagccatagcataataacggaatttgcttgccccacctcggaaacttatattatatatattggtagcatccatatcgcgataagtttctccaagccaatccacattagcatacagatatggatattgaccactacgaaatgcgttcaattcatcttgtgtataacgcgctgttaacccgtcatttgccaatgcttcattcatggcatttgcataagaataactgtctacaaacttgggcttgcgtgcttgccaaccgaaaccatgatcataagtaaacttgatttcacgtgtattataaataccacgtttggtagtaatatttactacaccatttatacctttatgcccgtaaattgctactgcagcagcatctttcaatatagtgacagtttctacctcttcaggagtgacatctgtaatatcacgttcaataccgtctaccaatattaacggattattagtggataaactttgtagaccacgaataaaaaatgtaggttcggcatctgcatatcgtccgctaccttgcaaagtagtcaaccctgtaccatatccaaaaagcgaattagctatatttttagcactacgcttattgaaatcttcattatatacggtagaaattgatgaggtagattcttccagacgttgagctttatgatatccgatttctacaacttcatcggaatattttgccggcttaccggaagttatgctatcattgagttcctgtgcatacccttgcagactcaaaaaagcaaggagtgccggaataattaatctattttttctcataataattaattcaaattgtaattgaagtattcattagttattaccatccgggattttgaacaagcccgtatcctttattaacttctgttgacgggaatggagaaagataccatttagggtcaaatccatttgtccaccaataacgagttgggttattcaattcaaatttttcatattcaaaatgggtcggataagccatcttcccttcatcgtttccacgccaaggcaaatctcttcgtactccgttgtcatccaaacgataaatgaaaagtccatgcaattgtttttcaaatatatctgctcgtttatagcgaatcaagtcaaagaagcgtgcatcttccatacctagctcacaagcacgttcacgaagaagttcttcgataaaagcatccttgttactttgtaaatttttatccggattacattctgccaatcctttcattcctacacgtgcacgtacaatatctacttgagctatagctttatccatactgcctcgtgaactttgacacaatgcttccgcataaattaaatgcagttcagctatacggatacaaggccaatgtacatatctacgcagcatatcgtttcccattaagaatttgataggtgcatatcccgtagcaaatgaacctgtttgactggtaggaccattgccggcactctttccccccaaccacgattcaaaacaataacctgacatatttcctgtggtccaatccaaagattcttgctgaccgtttacaatgatttcttcatacatacgcgggtcacgggtcaattctatatttatcagtccgtcactggctgtgcccgttcctttcaaaaacatttcatccagttttccttcacttttggccttatcccaatcaaacggcgtaccatctttccaagggaacatttccatatattcttgtgtaggactgtaaccacgatgaattttcataagaggatctccccattggtgccaattataatgacttgatttgaatgcatcaatatcaattacacgtgtgtttatcaatacttccgggctatccaaattagcatagcctgcacgatatgccaaacgataatcttctggacgagtacctttcgcctgctgtaaactgtatccacctttagaagccagttcattaaagaattgttcacacgcttccagacagcgatcccatagttccggtttatagccaccataccaaatagcaggattgcctgtcgctcccgggtaataaggctggtcggaattaaataaaggtgaggctgcaaattgaagaacacgacatttataagctaaagctgccgctctagtccagcgtccggattcagatgcaggtgtttctacagtccaaggaagtacagcagcagcttcatccagcaattgtaccatataatccactgtttcttccacactgttacgaggcatttcatagcttgtatccgttccactgaatgtacctttaattaaaggaataccaccataatgacgaaatacatcaaaataacgggaagcaagaatacatttcgcctgtgccaccatagaagctttttcatcttctcctagccccggtacattatcaatattctcaatcaacatccatactccacgtacagcttcccaaacattatttcttaaataatcaaatttatcagaacgtttaccataattggcagtgtgagtacctttataatatggtcctgagattccacatgacggataagtgaaaacatacaaatctgttaaagcttcaggcttgcctacatattgattggaactttcctgattagccacattcttatatggaagcccataatattgcatgccataaagattagtcagaaattgtcgggtatattcagcattattaaatactgtatcttttgtaaccgaccctcccggagccttttccaaaaaagagttgccaaatttaatctcatcgacacatgaagtagcgatgacagatgtcagagccagtcctgaagcaacattaaaaatccatttattatattttttcatttgattgcattattaagattaaaaaccaagtttcaaactcaatgaatatgtttttgtcagcggataagagggagaattactagcctttgattccggatcactccaaaaatatggagtaaaggtcaataaattatatccacttaacgctaactgcatagtattcagtttcagttttttcataaacggaagattgaaattataagcaatttgcagatttttcaaacgaagatacttagcatctttctcccacaaagttgattccgcatagttattggtatcgttgataaatgtcgcacgcggatattccgcatttggattcggattctctggagtccatgtatgatctaacatatattccaacaaacctccttgatctgagtttgtacggtctgtaaaaggttggcggaatacacttgatatactgcggcttacattccatgcggcagtccattgcattgaaacatcaaatcccttccaactgaatcccatattaagaccggccatgtattccggatcatctgtgaaaccaaattgacgtgacatatcgttagaatctattttaccatcgttatttaaatcgacatatacacaatcaccattttttaaatcactgactaattgttctggcatatccgtaccatatacttctttgtaatgagcaggggttgtttccgaattataatattcaaagaatttatattgactgcgtgaaccaagacgacgtcctttttgatacatatactcttcattttgcggagcttcttttctctctaccacccgattttgattgtacatcaaattcaatcctacgttatacctgaaattgtcacctatttgatcattccattttaaagtgatttcccaaccccagcttctcatttccccaagattagctaatggaggagtaaatcctaatacagaaggagccgtaccgtcactcaacataatgtctgtacgtttttcatgataataatcaaatgaagtgcgtaaacggtcattaaggaaattagcatctacacccaaattggttttcaacgctttttcccatgtaatatcttggttattctttccattttcataagcagcaggacttactgtggaattattgataccaaacaaaaaaccatgaccatcacggttaattaaagaagaattattaactacataaggatcagacatatagaggaaacgttgtttgttcccgtcaaaactatcattaccaactagaccgattgtataacgaaatttcaagaaacttactactgattttataggtttccagaatttttcctcactaacaatccaaccaaaagaaccggccggaaaagtaccaaagcgtttgccgggtgcataattctcggagccattatatccaatattgaattctgccatatagcggtttttccaatcataagttgcacgtcccactataccaaccataccacgaggaatatcagaatatgcactaggataatatatcttagactgattgtataacaataatgctgaaacatgatggttaccgaattcccgggcatagtttaaggctgcctccatataccaatcacgtgatttagccggatccttatcttcatatttcaactgagaattttgtccatatttcttataagcaatcgtaccatcttcttgtaatacaggagtataagttgcaacactagcactagcctgtgtataagatgtaaaaccactattgtatgatcctttaatatggaatgacaatcctttagttataaaatccagtttttgttttaattggacatcagcatttaaggtgttattactggttcgcataaaacctccaccatagtatcccatgccgctaccaccagtaaaaggcattctcaaatccggatagtccgtacttgcattaaccagtttgccatcgacaagtcccgggctagaaaacggagtggaataatacatgtttattaacatcccggcactaccctgtccagtataaggtttagaagcattattcacattaccagcaatattcattgataatgttgtcgttttggttacgtcaatatctagatttgaacggtaattgaaacgattatattgataagacagattataaggcaagtcaaattctttaaataaaccgccttgtgtataagctcctgctgaaataaaataacgtacacggtctgtaccacctgatatattaacattatgctgtgtttgaagggtcatatcttttaagcaatagtctacccaatccacacttggaaaacgaacgggatctgaaccatctttaaatttctggattatttcatccgaaaacgtaggattcaaaccatcaccagtatttatttggttataaaaagtagcatattgataagaattagccattttaatactttcggtcggggcaataatacttgaggaagtcgtaaatgaaatcttagcctttccttccttacctcttttagtcgtaattaaaacaacgccatttgcacctcgtacaccaaaaacagccgtagcagaagcatcttttaatatagaaatactttctatttcattaggatcaatatcattcatactacgttccacaccgtctacttgaataagaggagcagattgattccatgtagcttgaccacggacaaaaatattcgctgcatcactccccggttcaccggaatactgtacggtagtcaaacctgccatttgccctgataacatattagaaatggagcctgttggagtttttgtcaattcttcaccttttacactggaaatagctccagtcacagaaacctttttctgaacgccataagctacaacctctacttctcctaacatttgagaatcatcattcaaaactatttcaatgttagattgttttacttctacagttttggaactatatccaatgaatgaaatcaataacttagctcctttaggaacatccagtttaaaaactccatcaatgtcggttatagtacctactgtctgaccttgtacaacaacattggcaccaataataggctctcctaaattatctacgaccttaccggtcactgatattttttgttgctgaataatattgtttgcagctactgccgactgtcctccaaaggaaaggggcagaggacctgcaaacagactaaagagaaaaagccaccgaaattttaatcgatgtcccaacagacttgaattctttctgtctttcatactttaattattaagttaaacaaaagttagttttctattctctcaggagaaataggtctcctacctgtgaaaaagtgttgcaaatatatgcgcgaatattaaaaaagccaatgtaggattgtacaaaagcatggaattttccgtcttttcaactgaaaaatagtacaaacttctgtgaacaatctcaaaatggatagtttcaagagcatttttgttatacaagagtgcttttatttctgattgttactttaatattgtattgtaaaacgtataaactaaaatttgaatatggctaatctttcaatagtaattgtacctgctaaaaaattatctaacggtagacatagagtcaggatcgcagtggctcatcgttcacaaacgagatatatttcaacccaattcattttggattctgcaaatcaaatgaaaaatggacgagtagtaaaacatgaaaatgcagctaatataaatgcttgtttgcgcaagttgattaatgaatacgaagagattctttcgtctattcattatcagtcgaatatttcatgcactgaattgatacatgttataactcgggaacaacaaaaaaaaggaataacctttaatacggtagtgaaagaatatcttttaatgatggaagcagacgatcgtaaaaaatcacataaattatataatatagcttgtgcaaagttccttaaacatatgaaaggtgattttcctttggtacaactcagtccgacacatatacaaagtttcgctgatgtaatgaaggctgaaggattaaaagaaacttctatcagaatttacctcactttaataaaagtaatattgaactatgccaggaaaatgaattatgtaacttatttagttcatccttttgttttatttaaaatgccagttagtaatatcagagaactagatctgtccgttgatgaattaaaaaaaatacgtgatgtgaaattattcaagtctgtgcatatcatggctcgagatatatttatgttaacttattatttaggtggcattaatctaagagacctaatggagtatgatttcactaaagggaactgtatgagatatataagacataaaacccgtaatagcaaaaaaaatgaaaatgaaatagctttcactatccagccagaagcacagacaattatagaacgatatatttctgaaaatgggaaattagtttttggcaaatatgaatcttatgaaaaagtatatagtttggtctttagacatatagggaaggtgactgatctggcaggcataaatagaaaggtttcatattattctgcaagaaaaacatttgcacaacatggttatgatataggtatcgaaatagaaaaaatagaatattgtattggtcatagtatgaaaaacaatcgtcctatatttaattatatacgaataatgcaagagcacgccgataaagtttttagagaaatcttcgatcaattgcttaaatagtcaatgttattatatatgcataaatgtctttcatatcatgtaaatgttattattgtattaccttaaaaagtaagtgtggttcataaatcaagcaaatgcacttagacagctgataaagtacacttactttttggagatattttttaagttcaagtcaggatataaactactccatataaatttgagagcaaagtaaaatatttcataaatactaactaaaagagttttttttccaacagcaataagagcactttatattctctattattgtatcatctatattataaaattcgatgaaatgggctttttttgatactttcaactttatatatcaagttaacttttgtttaacttaataattaaagtatgaaagacagaaagaattcaagtctgttg

SEQ ID NO: 4042 - DNA, 23638 bp, Unknown
  gut microbiota DNA sequence
gttgctttgttatccgtattggctgtaggggcctttgcacagagcaaaaccgtttcgggtactgtccttgacaagacaggtgagtctgtaatcggtgccagtgtggtggtgaaaggtactaccaatggtactattactgactttgatggtaagttcacattgaccaatgttccggaaagtggaactattgaaattagttttgtggggtacaagacagtaaatgttgcggtgaaaggacaatctaccattaaagtaattttggaggaagatacagaaacattagaggaagtggtagtggttggttatggtgttcagaaaaaaagtgatgtgactggtgctttgacccaagtaagttccaaaacgattcgtgagcgtcccgttcagaatgctttacaggctatgcaaggaaaagctgctggtgtacaaatcacttcaaataatcgtccgggtgagttgggggatgttcgtattcgtggtagtcgttctttgaatgcaagtaatgatcctctttatgtgattgatggtattcctatgtctgttggctctatggcagatgtcaatcctaatgatattgagtccatggaaattttaaaagatgcttctgctactgctatttatggttcgcgtggtgctaatggagttattcttatcacaactaaaaaaggtaaaacaggcaaggtaactattaattatgatggtacagtatctttttctaagattcattcaatgacagattggatgaattctggtgaattgatagactggaaccgtcaggccaatgtcaatgcgggagcttatactggtaagtatggtaatgctccagatcctgatattgatggtgatgcttattttgggggtgtttctcagtatccttatctacgtcctgtttttaatgctgcttttcaatttaatgctgatggaactcctgtattacgtgatgcaacacaatatgaaaaagaagtattaggatatgctgatagagttcctgtttataattcggctaatattcctactactccttggactgattatgtaacacgtacttcattgacacataatcatcagatttcattatcggctggtacagaaaaatcaaagttatatatgtctttggcatatttggatcaggaatctccgatgaaagatcaggattataaacgttatacagttaatatgaatggtgagattcaggcgacagagtttttgaaggtggggatgggtatcaatgctagtcattctatcaaaaattatggtattgtcagcaacttttcgaatacaacagctaaagattcttatggtttggctaccagtttgatgccatatgctccagcttttgatgaaaatggaaaaatattaagtccggatgatggtccgtcacgacataatgtgttgcttaatattgatgaagctttgaatgaaacccgttattatggttttatgctcagctcgtttgcagagttggattttggtaagatttggactccattagagggggtaaaatggcgtactaatttcggaacgcaatatcgtaattctcgtgagggaagttattatggagataaatttactaatcctttgggatatgcttctaccgaaccgaatgtagcttataacaatcataaccaaaaacttgcatggacattggaaaacatgattttttataacaaaacattcaataaaattcatactgttggtttgacgttgatgcagtcggctgaatattatcgtacggaaggtttggatgcacgtgcttatgaatctaaattccctacagctttgtggtatagtattggtgattctaataaagctaaattgggtgctgggtcatcctttaacgagcaacagcgtgcttcttatatggcccgtttaaactataatttgatggatcgatatttgttaactgttactgggcgttgggatggtgcttctatgctggcagcaggaaacaaatgggattttttcccatcagcagctttggcatggaaaatgaatgaagagaattttatgaaaaatattggttggttgaattctttgaaattacgtgtgggctatggtgtaacaggtaatgcttctattaactcttatcagactgcaggatctatggtatcccaatgggccaataaaccttttggacagggtggaatcacgactaatacgactggtgctaaagcctcggtattgcctaatcgtaatttaggttgggaaaagacagcttctaccaactttggtgttgattttggtttcttgaataatcgtattactggtagtgtggaatattatatagctaatacatcagatttgttgttgaatcgttctattcctctgatgactggttatactcaaattttgacaaatgttggtaagacacagaacaaaggacttgagataactttgtcaacgactaatattcagacggaagattttacttggaaaactgactttactttttctactaatagatccaaaatcgtagaattggctgatggtaaggtggacgatcctaccaatggttggtttattggcaaacctatggatgagatttggacatataagtacgatcgtttgtggcaggatactcctgaggacagaagaatgttggctatttataaagcaaaaggaaatggtattactatgttccctggtatggctaaattagtagaccaggaatttatagaggttccggaaggtacggaaggatcaaaaacagtgacattggaagatggatcaaaagtgacttatatggataatggttttggcaagtttgacaaggatgattatcatttccaaggttcgtttactccgaagtgggaaggaggttttactactacattcatttacaagaattggcagttgaatgctttcttttacggacgttttggtaatatgtattatggattgatgcaaacttatggacgtcgggtagaaaatgatacatggagtcctgaaaatacagatgctaaatttccacagccacgtgctggaggagaatcatttaccgattataaagaatatatgaattataccaaaggaaatatggtggctgttcgtaatattgcattatcttatactttcccggaaaaatggctgggtaaaattggtgccaatagttgtcagatctatggtcaagtattgaatccgtttatttggggtggtgatttggtaaaagctggaattaatcctgacgatacaactggttggggagctgaaggtggacgcagtaacggtacatataaatatattggcggccaaactaataatacagtattgacccgtagttttgtaattggtctgagacttggattttaattattaaaaatagagatgtaaattatgaaaaagtatatattgtgttctgtaattgcattaggaagtctttcttgtactgacagttttttagaagaaaaaatggtttctaccattacgcaggattattttgaaacagagcaaggattggaacaattgattgtagggacttacgatgctttgcgtgtgactaaacagtatgaacaaggtccttccacttttatgtctggtgtggataactttacaaataagactcctaatcgtggcatgtattcgcctagtgagtggaatgctactgggcggtttgctaattgggcaaattctctgtgtggggagaattctaaatcactgttgggattttatccgattattaataattgtaaccgtgccatattgtctattcgtgaaggaaaggcattgggtaagtttgctactgatgcggagtatgcagcgaggtctttaagcgaggctttatttaatcgcgcttattctgtttatattatgagtacaatgtatggtgctatttatgtaccccaaggatatacaacagaactcccttccaattataactatatgcgtcaaagtgttcctagtatttatagtatgttgataggtgatctacgttatgcttatgatcatttgcctgatgttagcgaacagaatctgagtgctgattttggacgggccactaagggagccgctgctcattttttggcaaagttatatttacagcgtgcgcaggctgaaaaatttggaacagcagagtatggggtagatgtaaatggtaatgttgatactagcaatccgaagtcatatcttggtatgttatataaaggtaagggaactgctgatttggattcatgtatttattatgcttctgcagttattgataatggttattatgaattggagtcagattttggcaagttgttcagtcatcctttgaatgattattctaatgaaaatagccgtgaattaattctttcatgtgtatatggtcctgtaggtagtgctgataatggccgttttggtaatcgtttgccttacttttttggtggggattatgctaacgcatcttggggaattcctgaattctgctgggaatatcccacaaaatcagcatcacgtgtaggctatacaaatgattttggttttgatctttatgtaaataagcaagccgattcacgttatcaaaagtctttccatgtggaatatgtgacggcactacgtggtggagattctaattccagtccggctgctaataaagattattatgcttataataatagcagcaatgctacttatgaatggacggcagagatggctgactattttaatgagcatattcttcctggttataatcgtgcttcgtggagaggtcgtcaagccgtagctggagaacataaaatgggtactggtgatttggctttcgcttatgtggaaaatacgaaagaaacagcaattgatataaaagaagcattggctcagccttttgtcctgattgcccgttggattaaagatggcagtaaatattactatcgtgttccatatcaagctagtggcaaaagttatacttataatgataagagttatggtggcttagataaatttggttctactgtttgtcctgctactgtgaaatatgatgaacctaatcgcagtaactatactcattatgagtctggacgtgatgtacctttattccgtttggctgaaacttatttgcttcgtgctgaagcttatggacgtaaggggaattataatgcggctatagatgatataaataaagtacgtgcccgtgcagcgttcaaggctggtgaaactcgtgcagaagttcttgcacgtttgcagcctggatatgaaaaactgacacaggcagaacagcaatggccgtatgaagtggagaaagatatgacatccacgatgttggttgatgaatcttattgggatggtggttcggcaaattccaaagccgaaatgtatccggaaacagctactacgactgaagaccgttttgtgaatttcattttaaatgaattggcacgtgagttgaatcaagagatggtttattatgagaatttgcatcattcagggtggcaagctgatcgtataatctatcatgatcaattagcttcacctaaacaagggttgtgggataattccgataatttgattaatggtattgggcagacaggtaatggtatgggaatgtttgaaccgtattttacttttaagccttttgcccagactatgcttgacttgcttacagatgaaaatggtgtgttgttagatgaagctgctaagaaagcttaccagaattatggttattgagatgccgctgtaggtgtttaatatttatagtaaaagtggaaagagttattattactttttccactttttttatgggagcagtatatcagtgaaaaaatctaggatatatagagaatagttggtttaaagtgaacaattaaccatataaatggataaaattctatttgatataacttttctcgtgcataaatttgtcgtatcagataaaaaatgacatgctatgaaaaagacattttttgctattacattatttttagcttttagtaaagccgcattggctcagtttggaaactgcactgcatcggaaatgcggacttatgtagatagtgcgaccggcaatactatcactatgttgaccgacacgatgaagaatgaccgttttctttatcagactgatcccatgtggacggctgatggtaaatacttattgttcaggtcttccagccgtggaaatgacaaagaggtggaaagtacgcttcctaacggagaaaaacgtaaatggactcctacacagatttactttattgaaatggccaccggtaagattattcaagctacggaaggaccgaacttgggcagtgcttttttggctaataaaacgaatcgtatgtttgtcagccggaaagaaaaagaaaactggaacatgtatgtaatggacttgaataaattctttgccgatgtaaaacaaggaaaagtaggtaaaccatcctcttatgaaactttcataggcactttccccactgagatgggacgtccgggaggatatgctgtggattgtaatgatgattatgcctacataactgttgagcgtgagggtacggaagaggaaaaggaacgtatgatgaaaaacgctttcctgcctgaaagtaaccagccggtaaagataaagccaactctttgcggaattcgtaaaatgaatctcagtacgggagaagtaactaaggttattgatacggaatttaaaacaggacatatacaagccagccgttttactccgggtgaaattgttttttgtaacgaaaccggtggcgatgcccatcagcgtatgtggttttgcacggcagatggaacagtctttaaacctttatataaagaaactccgctagattgggtgactcatgaaacttttgcaaccaaagattttgtatatttcaatatcttaggatttcagccgcgccttcgcaaacaggcgagtggtattgtgcgtatcaatttgcgtacggatgatgtagagttgatagggcaggtggaattagaaaaagaccgccaagcgattgacggccaattggtaggaagaggcttctggcattgtaatgccagccgtgataataaatgggctgccggagatacttttggaggtaatgtatggctggttaatgtgcagaccggggagcgtcattggttggcgtcggataccaagatgaaaccggatcatgcacatcccagctttagtccggatggtacgaaagttcttttccaatccggacattttacaaatggaaaaagattgaatttaatgatggtggatatttcatcctttaaataaagtaaggttggatatgaaaaatacacgtaagatattattttccgcagctttgttgtcttcagggcttacgatggcccagactacaacggtagagaaattgcctaatgttatttatattatggcggatgatttgggcataggtgatttgggatgctatggtcagcgtcagattaagacaccgaatattgatgggatagctcagaacgggatgaagtttatgcagcattattccggttctacggtcagtgctccgtcccgttgtgctctgattacaggaaagcacatgggacatgccgcaatcagaggaaatgcaaaagtggcaggttcggatggattgttatatgaaactccgcttcctgccggtgaagttaccgtagccgatatttttaaaacaaagaattatgttaccggatgtgtaggcaaatggggaatgggaggaccgggtacggaaggtgtgcccggcaaacatggttttgattatttctacggttatctggggcaacgttttgctcatggttattaccctgagttcttgcatgagaatgagcagaagattatgctggatgggaaatattattcgcatgacttgatgttggaaaaggctttgaattttattgatgaaaatgcgcagaaacctttcttcctttatttttcaccaaccataccccatgcggatcttgatataatgggggaagcgatgacggaatatgagggggaattttgtgaaactccttttggaggaagcagagacggttataaatcgcagcaaactccgcgtgcggcgtatgcggcgatggttacttatttggataaaactgtgggcttgattattaaagacttaaaagagaaaggtttgtatgatcatacgatcattgtttttacttccgataatggagtccattcggagggagggcacgatccatcttattttgacagtaatggtccgttcagaggtcagaaaagagatttatatgaaggaggtatccgtactccgttcgtcattcaatggccgggagttattccacaaggggtagttaccaatcatatttctgcattttgggattttttgcctactataggtgaattggtgcaggcggatattcctcaaaatattgatggtatatcttatttgcctactcttacgggaaaaggcattcagaaggagcatgattgtatttattatgagttctttgaatttggaggaaagcaatctattatgacacctgatggctggaagttggtgagactggaagttagtgatccgtctaaaacctacgaagaattgtataatatttatacagatccggcggaaacttccaatgtgataaaacaatatcctgatgtggcaaaaaaattaaagaatatgataggtggtcaacgtgttgaaaatgcccgtttccatttttaaacaagtaagatttatgaagcaatccttatttttaaagaaatgcagtaagttctgttatgtactttttgcagtttgtggctgtttggcttgtacacagaatcagaagattgaatggccgcaagtgactaacgagaccaagccttggacgcgatggtggtgggaaggcaatgcggtcaggactactgacttggatacggttatgcgtaagtaccaggaggcaaatctgggtggattggagatcactcctatttatggaatacatggttatgaggatcgctttaaagattttctttctccggaatgggttgatttgtttctgtatactttgcaggaagcgaagcagttggggttaggaattgatttggctaatgcttcgggatggccgtttggaggaccttgggtcactcccgaagatgcgtgcaagacggtggcttataaaacttatcaattgaaagaaggcgaacaactaagtgaacctgtccggtataaggaagaaggctttgtcagattggcagggcatactccggtaaaactggcggatttgaaagaaccggtcagtgcgaatgctgatttacagacattggcattggatcaggtacgatataaaaaggaactgcctttgattatagtgaccgctaatagtgataaaggtgaatgtctcgacttgacttcaaaaataaagccggatggtacattggactggacggctcctcaaggtgactggactatttgcgctctgttccaaggtcatcatggaaaaatggtagaacgtgcaggacctggtggtgaaggtgatgtgatagatcatttttcagcttcggccattgatcattatctcagtaaatttgatgaggcttttaaaggaaaggatatcagttatctgaggtattattttaatgactcttatgaagtggacgatgcaagaggcgagtcgaattggactcctgctttttttgacgaattccaaaaatataggggatatgacttgcgtcagtatttacccgcattgttaggtatggatacaccggacaagaatgcaagggtgttgtatgattatagacaaaccataaacgatttattgataaatcattattccattcgttggcaacattgggcggcaaaacaaggaaagggtataaggaatcaggctcatggttctcctgccaatattctggatttgtatgcagtgagtgatgtgcccgaaatagaagggcgtgatttggtcagtataaaagcggctccgtctgtagcccatacggaaggaaagaaactctcatcttcggaaagtgcgacttggctggatgaacatttccaatcgaatctgggagatgtaaagaaagcacttgatcttttctttctgggtggggtgaatcatattttttatcatggcacttgtttcagtccgcaggaggctccctggccgggatggttattttatgcggcagtccattttcatccgaataatccgttttgggaggattttaaatatttgaatcagtatgttactcgcgtgcagtcatttttacaggatggcactcctgacaatgatgttcttttatactataacatagccgatgtgatgtctgaacaagggaacagaagtcttcagcattttagcggattggatcgtaatatgttggaatcttcggtcagagaaagtgcggtaactttaacagagaatggttatgcgtgggatatgatttctgacaagcaacttcttaaaactaatattgagaaagaaatgattgtaacgcccggtgccgcatataaaaccgttcttgtttcggcggcgcaatatattccttatgaaacaatggaaaaactgatggctttggctgatgaaggtgctaccgttgtgttttataagggaattcctcaagatatggccggaatgattctttcggaagagaaacaggctcattttaaagaaatgctggatgctttggactttcatgctgaaggtgctgttaaatgtgcacgggtaggtaaggggaagatttgtttgtcagatgatattaatgctctgatggatgaggcgaatgtgggtgctgagaaaatgtatcaggcaggtctgcaatgtatccgaagaaatagtgcgacgggaaaatattactttatagaaaatagtagcgaccgtaaaatagaggattggattccacttcgtacagaagctcggagtgcggcgattttcaatccaatgactggtgctagtggtttggctgctatgaaacgcaatgacgggcaaacagatgtttatctggaattgaatccgggtgaaactgtcattgtatcaacttccggtcagcattttacaggagatgcctatgcttattatcaaaatgcaggtgagcccaatcctgtttccggcagttggactgtttcttttgttcaaggaggtcctcaacttcctgcttctataacggttgacagtttgggctcatggactgattttgtaggggatgaatataaagctttttctggaacagccgtttatacgactactataaataaggtgcctgtagcggatgtgatcaaattggatcttggctctgtagcggaaaatgcatctgtctatttgaatggagattatatcggtacagtgattgactctccttatcaattgtatatccctgctgaaaaattcaaaggacaggatgagttagttgtcagagtagccaactctatggcgaatcgaattgcttatatggataagaagggagtggactggaagattttctataatgtaaatatgtctgcaagaaaaaaggaaaatgtgaaaaatggtatctttgatgcttctgattgggaaccaaaatcttcagggctattgggacctgtaacgttgactccggctatggtgaagcaatgaattatatagtcctgatgttgcaacctatagaataaatgtttcagggtatttgtgtaatatgttgagtattaatgtgatatgtgaatatgcgcaacatgaataccctgaaatttcgttttgaacgaatttctatataaatgtatcttattctatggtaggcaagaggactttatgctagttttgcaacaaacaatttgagatagctatgagaaacaaaattcttttatttttattgacttttataggaataagtcagattgcggcagcatcatctgtccgtgataaatacaattttaattctgaatggttactttatgttggcgatataccggaagccaaagaggtacgttttcaggatacggattggaagaaagtaacattaccccgtccttttaatgaagatgaagcttttcgtttgagtatagagcaattgacggatactgtgatgtggtatcgtaaacatttccgtctgcctgccggcagcaagaacaaaaaagtctttgttgaatttgagggggtccgtcaaggagctgatttttatatcaatggcgaatatatcggcttgcatgaaaatggtgcgatggctgtaggtttcgatttgactccttatattaaatatggacaagagaatgtaatggcggtccgtattgataacaattggaattataaggaacgtgctaccggcaccaaatatcaatggagtgaccgtaatttcaacgccaattatggaggtataccaaagaatgtatggcttcatgttactgataaactttatcagacacttcccttgtatagtaatttaaaaacgaccggtgtctatatctatgcggaagatatccgtgtgaagtctcgtaaggctgtggttcatgcggagtctgaaataaaaaatgaatataatcgggataagaaagtcgcttataaggttgaagtgtttgatcgtgacgggaaaagcataaaaagttttgagggtactcagacggtagtaaaaccgggtgaaactgcgactttggaagcttcagcagaaatagacggacttcatttctggagttggggatacggatatttgtacacagtaaaaaccagtttatgggtggatggcagaaaagtagatgaagtggctacccgtaccggtttccgtaaaactcgtttcggcaaaggaatgatttggttgaatgaccgggtgattcagatgaaaggttttgcacagcgtaccagtaatgaatggccgggagtcggtatgagtgttcctgcatggctgagtgattatagcaacggtctgatggtggaagataatgccaacttggttcgttggatgcatatcaccccttggaagcaggatattgaatcgtgtgaccgtgtcggattgattcaggcgatgcaggccggtgatgcggaaaaggaccgtgaaggccgtcaatgggaacaacgtacagaattgatgcgtgatgccattatttacaaccgtaataatccgagtattttattctatgaatgtggaaacgaatcaatcagtcgtgaacacatgatagaaatgaaagcgattcgtgataagtatgaccctcatggaggccgtgccatcggttcccgtgaaatgcttgatattcgtgaagccgaatatggtggcgagatgctttatatcaataagagcaaacatcatccgatgtgggccatggaatactgccgtgatgaaggtctgcgtaaatattgggatgaatattcttatccatatcataaaaatggggaaggaaataattcattccgttctgcaatgactaataaggtccagaaaaaggtggatgcccgtgcttataatcacaatcaggattcctttactattgagaatgtgattcgttggtttgattattggcgtgaacgcccgggtacaggtgaccgtgtcagctcaggaggtgtgaaaatcatcttctcggatacgaatacacattatcgtggtgtggagaattatcgtcgtagtggtgtgacagatgccatgcgtatccctaaagatcctttctatgcacatcaggtgatgtgggacggatgggtggatatagagaatccccgtattcatatcgttggtcattggaactataaagaagatgtggttaaacctgtttatgtggtatccagtgcagaaaaagtggaattgttcctgaatggcaaatctttaggaaacggtcaaagagattatcatttcttgtatactttcaaagatgtggcatttgttccgggcaagttggaagctgtagggtatgataagaatggaaaagaatgttgtcgcgctgaattgcagactgcaggcaagccggaacagattaaactcagtgtgattcaaagtcctaaaggctggaaagcggatggagctgatatggtattgcttcaagtggaagtgatggataaagatggcagacgttgcccgctggctaatgatctgatacattttgacgtagagggaccggctgaatggcgtggtggaatagcacagggcaaagataattatattctttcaaaagatttgcctgtagaatgtggaatcaaccgggctttgatacgctcttttacgactccgggaacagttcgtataacagccaaggctgatggattgcaatctgccgaaatcagtttttcttccgcaccggttgaagtgaagaatggcttgagtaactatattccgggagatgaactggagggcaggctgacccgtggagaaactccgttgactccttcttacaaagatacgaaagtcgatgtgaatatcttatcggcggttgccggagccaaccaggatgaagcgataaaaagtttcgatgataatgaattgagtgaatggaagaatgatggcagactgaacagtgcatggataacttatagtttggaacgtgcggcccgtgtggatgaaatttgcatgaaacttaccggttggcgtttgcgtagctatccgttggaaatatatgcaggtgatgaactgatttggaggggtgagactgaaaagagtttgggatatatccacctgaatgtaaaacctgtattgacaaatgagataaccattcgtttgaaaggtgccagcaaggaaggtgacggtttcggacaaattgtagaagttgctgcccctgctgcgggtgagttggatttgtttaaggcaaaaaatggcgataaaaccaatcacgagttacgcattgttgaaattgagtttaaagagaatttgtggcaatagagatgtggatattttttagaggtaaagattgatagacaggagtttcttttttaagtagataggcggggaaactccccgcttgtattaaggttttataaattgttagatgaaacattgggttatgatgaatatgcttctgcttgtcggaagcatattcgctttctcccaaccttatagtggagaaaagctttcaagaggattgattggaattcctacagaggaaggaatgtattttagctggcgcatgaccttggaggatgcagccggattacaatttgatttataccgtagttccaatggaggtgcggaggtaaagttaaataaagaaccaatagatcggacttccgattttttagatcgcacggttgattacacggtggataatcgttggactttaaaagcaactaccggggaagttgctacctggactcgtctgaagggagaggaacggaatccttatttaagtattcctatttgtaaaccggaagacggagaaatagcaggtgagccatttacttatacagctaatgattgtagcgtgggcgatctggatggtgatggagagtatgagattattttaaaatggtctccttctaattcaaagcgaccgccacagcggggctttaccggtaatacctatttggatgcatataaaatggatggaaccaggttgtggcgtattgatttggggccgaatgtacgttccggagcagccacgactaattttctggtctttgattttgatggagatggatgtgcggaaatttgttgtaaaacgggagatggtactgtcgatggactgggacatcggataggagatgcccaagtcgactggaggacatgggataaaaagagtcctacgtatggtaagatagtaaatggtccggaatatctcacggtttttgaaggacgtaccggaaaagaactggattcgaaagaatatattccaacccgttatcctttggatggttggggaggtgtaggtggcaattgtggtaatgacaatactggtggtcgttcagaccgttttacagccggagtagcttttctggatggaaaaacgccttcacctgtcatggtaagaggatggtacggacggacggtggtagctgcatggacttttacaaacggggcattgaaacatacatggacttttgatagcgcggcaccgggttgggagacctattcgggtatgggaaatcatagtgtgaccgtagcggattttgatggtgatggttgtgacgaaatctgtgtgggggctatgactgtagaccatgacggtaaaggactgtttactacgggcttgcgtcacggggatgccttgcatgccggacgttttattccttcccgtcaaggtatgcaggtttttggcgtgcatgaaaatgaaggcgataatgaaattgtaaagcgtactcctgccgtagctatgtttgatggagcgaccggagaaattatctggcaggatggcttgggacaagatgccggccgtggagtagctgccgatatcgatccgcgttatgatggagcagagtgttggtgcaatataggaggtttgagaagaggggacaccggagaaataatctgtaatagaaagcctgattcctgcaattttaccatttattgggacgctgatcctttagcggaattactggatcatgtttccatcagtaaatggaattggaatgcggaaagtacagatttattattgaaagccgagggagttgtttccaataatggaacaaaaggtaatccgtgtttgtcgggtgatattttaggagattggcgagaagaggtcatttggccttccgaagaccagacggaattacgtatttattctactaccataccggctgtggacagacgtgccacatggatgaatgaccgtcagtacaggttggcgatagcttggcagaatgtagcgtataaccaaccgccgcaccctagtttctagccttgtcgctactctgattaggatatatgtactatttggttgaacgaataaacaggaaaatgaatgaatttctattctccggtttgttcgttcatcttatttttgtgaaagatttgaaatacaataaaagaaaaacactataaatgtcatgaaaggaaacaaactttgtttatgctttttgttagctgccggagtaggattgggagcacatgctcaaaataaaatagctgctccgatgaaggatgtgaatcaagtcgttgataatacacttgatagtttgaatgtggcgcgttccgcccgtcctgtttcaggttccagccggaaaggggataatccggtgttgttccttgttggaaattcaacgatgcgtaccggtacgttgggcaatggaaataacggtcaatggggatggggatattttgaacacgagtattttgatgaaaataagataaccgttgaaaatcacgcattgggaggaaccagcagccgtactttttataaccggttgtggcctgatgtgttgaaaggagttcgtaaaggtgactgggttatcatagaattggggcataatgacaatggtccgtacgatagtggccgtgcccgtgcctctattccgggaattggcaaagacagtctgaatgtgactattaaagagacaggagcaaaagagaccgtatatacgtatggggaatatatgcgtcgttttattcatgatgtgaagaaaaaaggcgctcatcctattttgatgtccctgactcctcgcaacgcttgggaagatgcagacagcactattatcacccgggtgaatcagacatttggattatgggcgaagcaggtagctaaaaaagcgagagttccttttattgatttgaatgatatctcggcacgcaaatttgagaaattcggcaaagaaaaagtaaagtatatgttctatctggaccgcattcacacaagtgcttttggcgcacgtgtcaatgcagaatcagcagccgaaggaatccgtaattataaagggttggaactggctcgttatttgaaaccggtagaaaaagatacggttacgggggctacccgtaaaaaggggaatcctgtattgtttacggtgggagacagtactgtgaaaaatgccgataaagatgaaaagggtatgtggggatggggaagtgttattcacgaactgtttgacacagaaaagatctctgtagagaatcatgcgaaagcgggccgcagtgcgcgtacttatttagatgaagggcgttgggataaaatctatcatgcacttcagccgggagattttgttttgatacaattcggacataatgatgcaggtgacataaacacagggaaagcgcgtgcggaattacccggttcaggaaatgaaagcaaggtcttcaaaatggagaaaaccggcagctatcaagtggtttattctttcggctggtatttgcgtaagtttattatggatgtaaaagaaaagggagctgttcctattgtcctgagtcatacaccccgcaataagtttgataatggtgagatagagcgcaataccagttcttttggtaaatggacgcgtgaagcggcagaagcggccggggcttattttatagatttgaataaaatatcaggagacaagctccaggatatgggatacaatcaaggtttgcgtgtagtaggaacgtatttcaatcatgaccatacccatacctctttgaaaggtgcccgcatgaatgcccggagtattgctgacgggctgaaagctacggactgtccgttaaaagactttttaaagtaaatgaaaacaaaacaacatcgtatgaaaaatctgtttctgtttttatttctattagttgtctttacgtcaaaggcacaggataatagggtttccggtttaaattcccgtcagtttactaaatactggaaggttgaatcggaatcgcctgattataaagtaacgtttcagggagataccgctgagatagtatctcccaagggattgactctctggagaaaagagaaaatgagtggaaaagtgaccattgaatatgatgcatgtgtggtggtggagtcggatggagatcgtctgagtgatttgaactgcttctggatggcatcagaccctcaatatcccgataatttatggaagcgagaaaaatggcgtagcggtatattcctgaattgttattctttacagctttactatttgggatatggtggcaatcataactctactacacgtttccgtcgttatgatggggatgagtcgggtattacaaatcctaaagcccgtcctgctattctaaaggaatatacggatgccggacatttgctgaagccgaatcattggtatcacatcaaaattaccaacgagaacaatagggttagttattacatagacggtgagcgtttggtggatttcagggatgctgaaccgttacgggaaggctggtttggttttcgtaccactttgtcgcgtactcgtattacaaatttcagttatgaatgctcatcgcaagaagcggctgctgttcctttgcaatggattggtgaaactccccgtcaggataaggccgtaagtttcggagtgccttttgataaaggggaagtttttccggaaaacaagttacggctatctgcagagagtggtgaggatattcctattgatacctggactttggcttattggccggatggttctgtaaagtggggaggaatagctggagttattcctgccggaacagaaaaactgactctggaaaaggcggtaaagaaatctaaagcgaaatccaaactgccggatacagataaaaagaagtccgtttctgttacagaaacatcacagggtattcatatctctaccggagtcatttcagcatatatacctcgtcaaggcgaatttttgatagatagtctgttatataaaggtgtgaaagtaggagaaaaggctaggcttatctgccatacgcaaagtgaaccggtacttgaaagtacttctcaagtttctttcactaattatataggagaactgaaatctgtgactgtagagcgcgccggttctgtgcgtgcgcttgttaaattggaaggggtacacaaaagtccgaagggtcgtgagtggttgccctttgtggtacggctttatttttatggtggcagtgagcaagtgaaaatggtgcatagctttgtatatgacggagatcagaacaaagattttattcgcgccttgggagttcgttttgatgttcctatgcgtgaggctttatacaatcgccatgtagctttctcttgtgccgatggtggagtttggagcgagcccgttcagcctttggtgggacgacgcatacttacattgggtaaaaccggaaatggagaatcttcgttacagcaacagcagatggaaggaaaacgcattcctccttatgaagcttttgacgaaaagaaccgtgctctgcttgatcattgggcttcttgggacagctatcgtctgtcccaactgacagcggatgcattttcaatccgtaaacgtgccaatgacaataatccttggataggtactttctccggtacccgtagtgagggttatgcctttgccggagatataaccggaggcatggggcttgagttgcatgatttctggcagtcttatccgtcttctattgaaatctcggatgcaaaaactccggtggctgctcttaccgcatggatatggagtccggatgctgagccgatggacttgcgccattatgataatgtggcccatgacttgaatgccagttacgaagatgtgcaagagggaatgagcactccttacgggattgcccgtacaacgactcttaccttgatacctcagggcggttatagcggaaagaaagcttttgcagaacaagctaaacaacttgccggaccgggagtgctgatgcctgtacctgactatttgcatgccaagcaggcatttggtgtttggagtcttcccgatcgtagtactcctttccgtgcccgggtggaagacaggttggatgcttatatcagcttctatcaaaaagcaatagaacaaaacaaatggtatggtttctggaattatggggatgtgatgcatgcatacgatcctgtccgccatacctggcgttatgacatcggaggttttgcttgggataacacggaactggcttctaatatgtggctatggtataatttcctgcgtaccggacgtgctgatatctggcgcatggcagaagccatgacccgtcatacggcggaagtggatgtatatcatatcggtccgaatgcaggattgggtagccggcacaacgtcagtcattggggatgtggagccaaagaagcacggatcagtcaggctgcctggaatcgtttctactattatcttactacggacgaccgatgcggtgatttaatgaccgaagtaaaagatgccgatcagaaattgtacacgctggaccccatgcgtctggcgcaacctcgcagtcagtatccttgtacggcacctgcacgtctccgcatcggtcccgactggttggcatacgccggaaactggatgactgaatgggaacgtaccggcaatacggtttaccgtgacaaaattatagccgggatgaaaagtattgtggcactgcccaaccgtatctttacaggtccgttggctttaggttatgatccggctacagggattattaccagcgaatgtgatcccaagttagaaagtacaaatcatttgatgactatcatgggaggttttgaagtcatgaatgaaatgatccgtatggttgattatcccgaatggaatgaggcatggcttgatcttgccgcccgttataagcagaaagcatgggagttaaggaaaaatcgtttccgtatatcccgtttgttgggatatgcagcctatcatacccgtaatgcaaaaatggcggaagaggcttggacagatttgttttcccgcttggaacatactccggctccacctttccgtatagaaacagttcttccgccggaagttcccgctcctttggatgaatgtacaagtatcagtaccaatgatgccgccctttggagtctggatgccatttatatgcaggaagtgattccggtggatgatatgagataggatattttcgtatctgtttgatgatatcattgtatagcttatcatcctgaacatgagtgaagaatctgtttacaacaactcttttattgtttacagattcttcactgatattcaaaataatagaaatgacagaatcattattcaacaatccatttttcaatattccgtgtttcagcactgaagttcactcctattttaaacagtcttcgtccgtctgtttcaaaaggaagtgcgtaatgcttgtcgttaatctgctgtaaggcttcttccgctgttccgttcagtttaaactccattatatagataaacttgtctgtctgcaaaacgaggtctatgcggcccctgctggtgtgatactccactttgacatagaaacctaccagcttaaagatgatgaaaagtacattctcgtaatgcagttcctgttcacggataatctcgtatgtagtgtctgcaaagaagctttgcaggcgttggaagaaagaattgtagtcgccggaacgtatttcacggacaaacttttgtatctcaaatggagattcaacgttgttcatgctggtataataaggtacaagaaactgtatgaacccttcttccacttctttgtttggaaagcccaaatgatagataccgaactcttcatcatatccttttatagtaagatatccactttgatagataacaggaatgggactggttgactccgaatcaatgctgttcaacacttgggcattggtctcttcgtgtgccatccgttccagattgtaatgatgtctttttagcagttccaccaagtaagtaggagtccccgtctcgaaccagtaactgccaaattccttgcgcttgaaagcattgagcagactgaacggattatacatgccgatggagttgtgggtgaagtgatagccatcataatattgtcttagtttttcgcagaagctgtcataggtcatcttctgtacatctgcaaattcatgaagttcggtttccaaattcttatgaatttctttttcgctgatgccacataattctatatattcattccacatcgaaatatcatccaggttattcagatcactgaatacacttacttttccaaacttagttactcctgtcagcatggcgaatttgatgcagccatccttgcttttcaatgctccgtagaatgctttaagtgtttcgcgaaaactattttgcaattctttattgccgatggcttgcaacatgggcttgtcatattcgtctaccagaatcactacacgttggcctgtttgttcataagcgcgctgaatggtgccttcaaaacgcatggacaaggaatcttcggcaggctcgcttccatatagcttttcccaggttaccaatgtacggttcagtttgctttccaaactttgcggactatcatatttctgtgtattcaggtcaatgtgcagtatgggatattttgtccagtccttttccagtttttccatagccagtccttgaaaaagttcctttttcccttggaaataagcttccagagtggagataagcaggctttttccgaagcggcgtgggcggctcaggaaataatagcgtccggatttcaccaattgataaatcaatgctgttttatcaatatagaaatagccatccaggcggagactttcaaaattctgtataccgataggataaatcttattgcccatacttttttgtttttaaatgataacatacaaagttactgatttcctttttatttcctgtattttcagcgaattcttttggaataatgttttgtttttaagtaggtatgtcacagaggggaatacagaaacttttcatcttttgttctctcctaaaaggattttatgatcttttgtttcttaacctacattattcatagtggattcatttcaggttatca

SEQ ID NO: 4043 - DNA, 294 bp, Unknown
  gut microbiota DNA sequence
cgtggtcgcgccacttatctccatgtccgtaaacgtaaatggcttgacaagtcttccaatgaaatcttcagctatgactgggatttatccgattttgacggtacacggctcaattctgagttcgtctcttttttaaaagaaggagattgaatctactcctgtgggcatctgtgtgcttgcggaacgttatggcgtaaaagggcagactcttcgtaaacaatacaaggagaaaatcagtgattaccggaactgggaccaactcgaacatgcgcatgactacctcctttatcctga

SEQ ID NO: 4044 - DNA, 215 bp, Unknown
  gut microbiota DNA sequence
gttcttttcatatttgatggcggccgtcgttataaagtttcgtcttccagccttggtatccattcccctcaggacctacttctccctttaggccttggccttttccgcagcagtcctttttgatcttattacctttatccccaaggttgtaatttccataaaggtattgacggtctttgtggcgaggtcatccgacacacgggttcctgcgtgtc

SEQ ID NO: 4045 - DNA, 766 bp, Unknown
  gut microbiota DNA sequence
ccttagaagcgttcttgtttacgcttctaaggaattttgaataccgtcaaaaatggagaatgtctcttcaatcttggctactatgcgctgttgctcggcaagtggaggtaggggcaatatatattgttttgccttttcaatcgtaatggtatcaacagttgtaccctttgagttatcatacatctgttttagcatatattcgcttctcatgatgtggtaaatatatttcgtatttatttgatagtcattacacaaacaaagtacacttgcatccttgtaatagaacttatcagactcttttacaatgtagcatttgccaatagtaccaacggcagaaatcataatatctgacgctttgggtactggaaatttctcctttaatgagttataatgttcctctgaaatatataattcattatctacaagtccataaatagacagcttggctatttcacgtgctctataaaatggaacaccactatgcttccaatctgacttcaaaattcttttagctgatacgacattaaatattgaccctaaatttgtcgttatccacccgctcggaacgtcaaacgtataatgcccgttatcacaaggtgtgaagtcgggatttatacgtttcaacagttcaatggcaggctcgtcattcgggtcttgtggtactagcttgccatgaatggcaaggtcgaggattttgcttttggtttgtttgatgatggtctgtaagtcggctttgccttgttctatttggtcaatcaactcaaat

SEQ ID NO: 4046 - DNA, 596 bp, Unknown
  gut microbiota DNA sequence
caggctccctaagactgcaaaagggaagaaggtctttattgagtttgagggagtacggcaggcggcggatttctatttgaacggcaagcatataggattgcatgaaaatggggtgatggcggtaggctttgatctgactccgtttctgaattttggtggagagaatgtgattgctctccgaacagacaatgactggaggtataaggagcgttcgactggaagtttgttccagtggaatgatagaaatttcaatgccaattatggaggagtacctaaaaatgtatggttgcacattactgataaattataccagaccttgcctctatacagtaatttacagactacagggacttacatctatgcatccgatattaaggtaaggacccgtgaggcggttgttcatgcagagtcacaggtgcggaatgagtatggcaagtccgttcatgtggattatgaggtgagcatttatgattatgatggaaaaagggtcagtacattccggggacaaccgacgacagtgcagtccggagaaacggttgtattgaaagcttctgcaccattaaaagatcttcatttttggagttgggggtacggct

SEQ ID NO: 4047 - DNA, 62427 bp, Unknown
  gut microbiota DNA sequence
ttttttgtttctttgtaatctatttatatactaacacaccaaaggaatggattacaccgaacagtttatccggctgaattgcagtttgatgtcggattacaaaatgatgaagctgaatgccgaaatgaaatgcatgggaataggattatatattcaaatgatattgttcctgcgaaggcaacaggaatacaaacacgattttaacgaactggatttgttggctgaacaatggggggctacagtggaagatctgcagcatctcattaaagactttaacttgtttgtcataatggaggacggatatttccgatgcctgtatctggatgaggtgatgggttatcagaataagctttcggagcaacgtgccgccgccggtagcaaaggaggaagaagcagcaagaaaaagactgtgcagacagctgaaaaagtaatcacttctactgtcctcacggcagcggataaagaagcgaatgacgatgcagacaataaggaaaacaacacggaaaacaatgcggaaaacagtgtaaaatgcatgaaaaacacgattgaaaaaagtgatgatgaaaatgtaaccgaaaatacactgcaatgtattgataatgaatgtgttaataggagtttgcaagcaagctttaagcaaaactttataagagaagaaaagaatagagaagagaagaaaaacaacagtaacaaagaaaaagaaataactgttgttgctgttgttgaactcttcaaaaacataggatttgcacctcgacagaaacgctatatcaatgagattttccctatccgggttcgggtggatacaccacgcacgattccggatttggaagaaagaggagttggaccgcccatggataaatgcatatcgtatctttgttgaatgctatttgcccccccaggtacgcgccgttaatcacggaagatatggatctttcacgtgtaagatgctatatcttacagctgtaagattataaatctttcaccttcatcgtctggacattgcgaaagagttcagccggtctgtgcgtggtggaatataaccgtctgccgcttgttttcacgaataccgtctggggtatctcaagaagatgctcagcagggcaaatatcccgatggctaccggatagtacaagtattcgataatgctcaaaggagacagggaagccagtttggcagcaatcagcatttgtgctccgtaagggatgattccctggatgacacacgagaaagtatccagaatacttgcactcttgcgtttgtccaccctgtagcgggtagcgatatcgttggcaagcggtcccactgtgatgatggctatcgtattgttggctgtgcagaaattggcgatactcaccaaagccgcgatgcaaagttcggctccgcgtttgctgttgacgtgtttggtcagtttttggatgatatagtccactccgccattaaaacggatcagttccagcataccgcctgccatcaaggtgatgatgatgagctcacccatcccggtgatccctgtgcccatggagccgagccagtcgaacaggccgatgctccccgtgaacaggccgatcactcccgttgtggcgatgcccagtatcagtacgagtgccacattcatacctgctatggcggttcccaacacaaccaggtaggggaggattttgatccattccaccgactggatgtcgtgggtggtcatcacgtccatccctctgaaaatatagtagccgaaaaccatcagagcggccggaagggctatcatgaagtttacccggaacttgtcacgcatggcgcatccctgggtacgggtggcggcgatggtggtatccgagatgaatgaaaggttgtcgccgaagaaggctcctcccaccacgatacctgtcatgaaggccaggttcatgtcggttttctctgcgatgcctgctgccacggggactagtgccacgatggttcctaccgaggttccgatggagagtgagatgaaacaggcagccaggaagatgcctgccagcagcagattgtccggcagcaggagaagcgtaaggttgacggtcgcgtcaatggccccgatatctttggcactttgggcgaatgcgcctgccaggatgaaaatccagatcatcagcatgatgttcttgttggctgcgccgatggaatattgcagcattcgctcattcaggctcaggcctttggtgatgcataccgcatagaccgaggataccatgaaagcaatcgtgatggggactttatagaagtcgtttacaatgatggaagtcaccagatacaggcatagaaataccagcagtggactgagtgcccatagactgggcttattggttattggagttaatttttcaccgttcatgaatttgtattttataaaatgaggtgcaaagttacaaaaagacttgctgtataacaatatatgggggaaaaaggtcacagccccaccttcgtaacagggaaggcagggctgtaagggtattgggaaagttggggataaaattggattatagtgtcacgcctgtcttgaagatggcgatttcacgataattcttcttttcattgtttaccggttctccgctggcaacacggatgatatagtctataaagcgttcgcaggtcttttccatcggttcgttttctacgatgactccggcattgaagtcaatccatcccggtttgtttttagccagagtggagttggtggaaatcttcatggtaggaacaaacgtaccgaacggagtaccgcggccggtagtgaagagcaccatgtgacagccgcaggaggcgagggcggtggcagctaccaaatcgttgcccggtgcggaaagcaagttcaaacctttcactttcaggcggtcgccatagcccataactccgtcaacgtatgctttgccgcatttttgggtacatcccaacgctttgtcttccagggtggagataccacctgccttgttgcccggtgacggattttcgcccactggttcgccgtgtgacaggaagtattccttaaagtcattaatcaggtgtacggtctgctcgaacagttccttggtgcggcaacggttcatcaggatggtttccgcaccgaacatttcgggaacctccgtcagtacggaagtaccgccctgtgcaatcaggaagtcggagaacatacccagcaacggattggcggtgatacctgagaagccatccgaaccgccgcatttcaagcctacacgcagttcggacaaaggaacatcctcgcgtacatcggtcttggctttggcgtacagttcacgcagaatcttcataccctcttcaaattcatcccccactttctgagttaccatgaactttacgcggtctgtgtcgtaatcgcctagaaattcgcggaaaacatccggctggttgttctcgcagcccagactgacaatcagtacggctcctgcattaggatgcagaatcatgtcgcggagaattttcttggtattctcgtggtcatcgcccagctgtgaacagccatagttgtgagggaatgccacgatagcgtccacaccttcgcagttggtttcgcggcgtaacgcttcggccagttgtccgatgataccgtttacacaacccacggtggggataatccatacctcgttacggatacctacatcaccgtttttgcggcggtatcctttgaacgtcaggtctttcttcgggatattgaggtctacgctgaccggattgtaggtgtaatccaacagtccggcaaggtttgtctttatctgggtttcattgatccagcgtccttgttccacggcagtcacggcatggccgatggggtaaccatacttgatgatattctcgccttgggcgaaatctttcagtgtcaccttatggccggcaggcacgtcttccttcaacgtgatggcatgaccgtctaccgtgatggcctcgcctgcttttaaatccgagatagccaccactacgttatcagccggattgattttcaaatactttgtttccatttctatttttagttatcagatttactttttatgcgcatccagatagaaatccacgttctccaccgaaagcagggtgatgggcatgtaattgcattgtttcacctctttcttgaagatcaggtgattgcacaggctctctacgccgctgtatccttgtgcggtaggttgctgagcaatcaggaaatccactgcgccctctttcagacaagagacgttccggtataataaatcgtacccaatcagtttgaaatttttcatgttgtgtccgatgagatattctcctataatgtacactttcgagttgaaagtgatgccgcacgtaacctgtgggttctcttggaaaaagcggttcatcagcgcctcgtcctcgtccggacgcttggcgtagaggttcagttccactatcttgcagtcgggaaaatgctcctgcatatattttctgaatcctttttcacggttttcctgctggtttgatcccaggcggccttcgttgatttgtctgaagataacgatttctttgggacattctcccaacatcatggccatgcgggcggcaaagtatccgctttggtcggatttctgcccgaagaatgccagcgggttcagactggccacgttggagtctataaatatataaggtatttcccgttcttgtaacttgtcggtgaatctggccgtcatctcaggaatagtgggggcgagcaatacgccgtccggctcttgtttcagtatttcctcaccggcattgatgaaggaggaatattcatattggtcatagtacatcacggacagggtgatgtggaaatccgaaaaggtttctacggctcttttcatccccagttccacatcggtccagtaatcgccttccttgtgctgtggcagcaggcagacaaacagatactttttgttggatgccaatgcgctggcatacatattgggctggtaatccagttgcttcaatatttcttccacccgtttccggctggcttcggatacccctgtgcggccatgcaatacacggtctactgtgccgactgacacatctgccaggcgcgcgatatccttgattctgattctttcgggcagtttattcataccttaattatatatattgtgctcgtgcacactgataatttattttttttcgatacaaatatataacaatttttggttttaaaaaaataaatagtacctttgtgcacgcacacggatgaattatttgagtggtctgttgagtacaaggttacgatgtgattcgtctatggatatgtaaaccagtattttaattgggttgaaagttaaacgaataaatatataacaatttaaaatcacgaaattatgggaaaagtagtaaccttaggtgaaattatgttgagattgtcaactccgggaaacacacgttttgtacagtcggattcatttgatgttgtttatggcggtggtgaagcgaacgtagcggtgagttgcgcgaactacggtcacgaagcttatttcgtaactaaattgccgaaacacgaaattggacagtctgctgtgaatgcattgcgtaaatatggtgtgaagaccgatttcatctgtcgtggtggcgaccgcgtaggtatctattatctggaaacaggagcttccatgcgtcctagcaaagtaatttatgaccgtgcccactcggctatcgccgaagccgatccttgcgatttcgactttgacgctatcatggaaggtgcggactggttccactggtcgggtatcactccggctatttctgacaaggctgccgaactgaccaaactggcttgtgaagctgcaaaacgtcatggcgttacggtatctgtagacttgaatttccgcaagaaactgtggacaaaagaaaaagcacagtctatcatgaaaccgttgatgcagtatgtagatgtatgtataggtaacgaagaagatgccgaactttgtctgggcttcaaaccggaagcgaatgtggaagccggtgaaaccaatgcggaaggttacaaaggaatcttcaaggctatggcaaaagaattcggctttaaatatgtggtttctaccttgcgcgaatcattctcggctactcacaacggctggaaggctatgatttataacggagaagaattttatgaatcaaaacgctatgacatcaacccgattattgaccgggtaggtggtggcgactcattctccggaggtatcattcacggtctgctgaccaaaccgaatcagggtgccgcccttgaatttgctgttgccgcttctgctttgaagcatactatcaacggtgatttcaatttggtatctgtagacgaagtggaagcattggccggtggcgatgccagcggacgtgtacaacgctaaatttgttttttataggaacacgaatgacgcaaataacgcaaatttttgatacatgttttatttgtatcatttgtgttcctatctttcatttaaactaaaatataacattatggctcgttttgataaaatagcagtgttggacaagattggttcaaccggaatggttcctgtgttctaccataaagatgcagaagtggcaaagaaagtggtgaaagcttgttatgacggcggagttcgtgcattcgaatttacaaaccgtggtgactttgctcatgaagtatttgcggaagttgtgaaatacgcggcaaaggagtgtcctgaaatggctatgggagtaggttctatcgttgatcctgctactgccgctctttacttgcaattgggtgcttgctttgtggtaggtccgttgttcaatcctgaaatcgctaaagtgtgcaaccgtcgtttggtggcttatactccgggatgcggaagcgtgtccgaggtgggtttcgctcaggaagtaggttgcgatctttgcaaaatattcccgggtgatgtattgggagcaaaattggttaaaggtctgctggctccgatgccttggtctaaactgatggtaaccggtggtgtggaaccgactcaggaaaatctgacttcttggattaaggcaggtgtgttctgtgtgggtatgggttctaaattgttccctggcgacaaggtagccgcggaagactgggcgtatgtaacggcaaaatgtaaagaagcattgggctacattgcggaagcccgtgcaaataaataagaaaaagatcagctcatgcccgcaaggggttagtgaattagggcgtgggtatcattttgtttaaaggtgtatataaaatgggtaagggccatcgcgaagtggattcgcgatggcttttcactttccggcgggtgcttgaggcggggcgttggcaaaaatattcttgtaaagattggtagatagaataaaaatgtgttcttttgtaccgtttcttaagaaataaaatgaagcgtttaatctaaaacacacaaaaatgaaaaaagcattattaaaggtggccgtcatgctgttatgcttggcgggggtaactcctgcaatggcccagtttaatttgaagaaggcagtggggggagccgtgaaggctgcaaaagcggtgactttgaccgatgagcagatgacagagtatgtaaaggagtacattgactggatggataagcataatcaggtttgtgcagacgatgatccgtatactgtccgtttgaaaaaactgactgaagggttgaccgaagtggaagggatgccgctgaatttcaaagtatattatgtgattgatgtaaatgcgttcgcctgtgcagacggtagtgtgcgggtattctcttcattgatggatatcatgacagacgaagaactgttgggggtaataggccatgaggtaggccatgtggcacacaaggactcaaagaacggcttccgtaccgcattgctgacatcggcattgaaagatggtatttcatcacaaggaggaaaagcggctgctctgacagattcccagttgggtgatttgggagaggcattggtcaatgctacttattcacaaaaacaggaacgcgccgccgatgattacggttacgaatttctgaagaaagcaggtaagaatccttgggcgatggcattgtcattccagaaattgaaaaaattgcaagaagaggcaggagcaaagaaaagcagcaagctgaatcagttgttctctactcatcccgatcttgacgcacgtatccagcgtatggaagaacgtgctacaagcgaaggtattgaaaaacctgaaaacacgatgggggaaacagggaaataaatggtttcaggcaatgtggattatacacataatagagggtgtccgtttcaatggcggacaccctcttctttttttgggagatttttttgcatgaccttatcttgcctcccggcgggataaaatctgaatttattatgagagaaatccttattgggagaaaatcaaagtccaaagttcaggttaaaagaatcaagtgttctttttcgtctagattatagaaggaaatctcttggcacaaagatacgcttattttaatggttgacgaattccctgtagggttatatcatagctagatttcctaaaatgatggcaaaaattccttttttctttctgatactttgcctcctctttacattgtgatatgtgctatgcgttgtaaatcagattgttaattatgtgtattgcttctggactgtgcaataacagggtggtttaatataagtgaaaatcactatctttgtataaaccaacagaaagaaatgcacaaaacagtttagccatgatgaattacgcatacgatacatctttgcaggaaacgatgatactgactgaagcgtttcacacagacagggtcatctgtgacaatggtagtctgtataagtttatatgggtccaggaaggcaaactgacattgatagtagaccatgtggaaatagagatggagcaggatgaaatcatctctgtgagtaatcttcaccgcacggagttcaagaatgtatcgggcaggtatcttgctcttcttttcaacgagaatttttacggcatttacaagcacgagaaagaagtatcgtgcagcggagtgctgtttaacggaacttccggtatagtgcatctgcggctcccgatagccgattccgaactgttgcacgaggtggtggacagaatggttaccgaatacatcctgcgggataacctgcagggagaaatgctccgcctgctgttgaaacgtttcatcattctgtgtacccggctggcccgtaagcagttgtccggctttccggttaatgaaaaaggttttgacatcatccagcgttattatgtgttggtggacaatcacttcaaggagaaaaaacaggtacaggcatatgctgctttgttgcatcgttctcccaagacgctttccaatttatttgccgcctacggtatgccttcccctttgaagattatacaagaacgagtggtgaccgaagcgaaacggctgttgctgcatacctcgcacagcatcaaagagatatcggtgattttgggctttgaaagtgtgggtactttcagccgcttctttaagaatatgacgggggaaaatacctcggcataccggaaaagactgcaataacaagaaccggtccttgttgctgttgattttgataagaacaggggcttttcccatgccttatgcagttattctgaaacagtatccgttatctgattaaaaaaacaagcgtcaaaactttctatctatctaattttcttgtaaatttgcaccttaatttttggaaggcattgccttttagttagagaatacaagaaaacgatataaaattatgagtaagaaatttgctgaacactcgcaactcaacctatcacaggtcaataaagatgtgctgaagaagtgggatgaaaacgatgttttcgccaagagtatgacagaacgtgaaggatgtccttctttcgtgttttatgaaggacctccctcggccaatggtatgccgggtattcaccacgtgatggcgcgtaccattaaagatactttctgccgctataaaaccatgaaagggttccaggtaaagcgtaaggccggatgggatactcacggactgcctgtggaactgggtgtggaaaaggcattgcatatcaccaaagaggatatcggaaagaccatttctgttgccgagtacaacgcagcttgccgtaaggacgtgatgaagtttaccaaagagtggacagaccttactcataagatgggttactgggtggatttggagaatccctatatcacttatgacaaccgctatattgaaacgctgtggtggctcttgaagcagctttataacaaaggtctgttatataaaggctacaccatccagccttactctccggctgccggaacaggattgagctcgcacgagctgaaccagccgggctgttaccgtgatgtgaaagacaccactgtggtaggacagttcaagatgaagaatccgaaacccgaaatggcggaatggggaacgccttatttcctggcatggaccactactccgtggacattgccttcgaatacggcattgtgcgtaggaccgaaaatagactatgtggctgtgcagacttacaacggatatactggggaaaagatgaccgtagtgttggcgaaagctttgctttatactcactttaacaagaaagcggaagaattggcgctggaagactataagccgggtgacaaactgattccgttcaaagtagtgggtgaatataaaggaccggatctggtaggcatggaatacgaacagcttattccttgggtgaaaccggtgacagtggatgaaaacgggaaatggcaagaagcggccggtgaggcattccgcgttattcccggtgactatgtaactaccgaagatggtacgggtatcgtacatatcgctccgacattcggtgcagacgatgcttttgtggcacgtgcggcaggtattccttctctgttcatgataaacaagaagggggaaacccgtcctatggtggatctgactggtaaattctatctgttggacgaactggacgaggctttcgtaaaggaatgtgtggacgtagagaaatataaggaatatcagggccggtgggtgaagaatgcttatgatcctcagtttactgtagatggcaagtatgatgaaaaagctgccgctgccgccgaatcactcgatatctatatctgtatgatgatgaaagccgccaacaaggcgttcaagatagaaaagcatgtacacaattatccgcactgctggcgtactgacaaaccggtgctctactatccgctggacagttggttcatccggtctaccgcagccaaagagcgcatgatggaactgaacaagactatcaactggaagccggaatctaccggaacaggccgtttcggcaagtggctggaaaacttgaatgactggaacttgagccgttctcgttattggggaactccgctgcctatctggcgcagtgaagaaggagaggagctttgtatcggttccgtagaggaattgtataatgaaatagaaaagtcaatagctgccggatttatgaccgtcaatccttataaggaaaaaggttttgttccgggcgaatataacggggggaactatgacaagatagaccttcaccgtccgtatgtggatgatatcatcttggtatctgaaagcggcaagccgatgaaacgtgaggcggacttgattgatgtgtggttcgactccggtgcgatgccttacgcgcagttgcactatccgtttgaaaataaggaaattgtggacaaccgcacttattatcctgcggacttcattgcagaaggggtggaccagacccgtggctggttctttacgctacatgctatcgctacgatggtattcgacagtgtggcttacaagaacgtaatctctaacggcttggttctggacaagaacggaaacaaaatgtcaaaacgtctgggcaatgcggtagatccgttcggcgctatcgaacagtatggctccgatcctttgcgttggtacatgattaccaattcttctccgtgggataacttgaaatttgataccgacggggtggatgaggttcgtcgtaaattcttcggtactttgtataatacctattcgttcttcgcactttatgccaatgtggatggtttcgcttatcaggaagcggaagtgccggtaaatgaacgtccggagatagaccgttggattctgtctgttctgaattcattggtgaagaacgtggacgcttgctacaacgattacgaaccgaccaaggcgggacgtttgattacagacttcgtaaatgataatttgagtaactggtacgtgcgcttgaaccgtaaacgtttctggggtaatgccatgtcacaggataagctgtccgcttatcagacattgtacacttgtcttgaaacagtggccaggctgatggcgcctatcgctccgttctatgccgaccggttgtatacggatttgattgcggctacaggtcgtgacaccgtggtttctgtacacttggccaagttcccggaatgtaatgaggcattgatagacggagaactggaagcgcgtatgcagatggctcaggatgttacttctatggtattggcattgcgccgcaaagtcaatatcaaagtgcgccagcctttgcagtgtatcatggttccggtggtggacgaagagcagaaaatgcacatcgaagccgtaaaagacttgattatgagcgaagtgaacgtgaaagaaatcaagtttgtagacggagccgcaggcgtattggtgaaaaaggtgaaatgtgactttaaaaaactcggcccgaaattcggcaaacagatgaaagctgtcgccgcagccgtagccggaatgtcgcaggaagctattgccgaattggagaaaaatggtaaatatacctttgtgcttgatggtgcggaagcggttatcgaaacaacggatgtggagattttcagtgaggatattccgggatggctggttgccaatgaaggtaaactgactgtggcattggaggttaccgtaaccgaagaactgcgtcgtgagggggttgcccgtgaattggtaaaccgtatacagaatatccgtaagagcagtggttttgagataacggacaaaataaaagtggcattatctaaaaatcctcaaaccgatgatgcggtaaatgaatataatacttatatttgtaaccaggttcttgctaactccctggaattagtggatgaagtgaagaacggtacagaattaaattttgatgatttctcactttatgtgagtgtcgtaaaagaataattaaccttttaaaactaagttatatggctgaaaaaactagatattcagatgcggaactggaggaattccgtgccattatcatggaaaaactggaattggctcagcgtgactatgatagactgaaaagtagtatcatgaataaggacggtaatgatacggacgatacttcccctacttataaagttttggaagaaggtgctaatacattgtctaaagaagaaacgacccggttggcggcacgtcagctgaagtttattcagggattgcaggcggcattggtacgtatcgagaacaaaacttatggtatttgccgtgaaaccggcaagttgattccgaaggaaaggcttcgtgcagtacctcatgcaacactgagcattgaggcaaagaacgaaggaaagaaataaaatagtggttaatggttagtgattaatagttaatgagtttcactgtcatgttacagtattaaccgctaacggctaatcattaaccattaattaattttcaatttaataaatgaagaaactactcacccaagggcagctctctgttcttatcgtctttgcagttctgattatcgaccagataataaagatattggtaaagaccaatatgtactggcatgagagtatccgcataacagattggttttatatctattttacagaaaataacggcatggctttcggtatggaaatattcggaaagttattccttactaccttccgtattgtagctgtgggattgattatctggtatctggcaaaaatagtgaaacagaattataagactggttatattgtatgtatctctttaattttggcaggggctatcggtaatattatagacagtgtgttctatggcgttgtttttaatgaaagtactcatagtaccatcgcttcttttgttccggtaggtgaagggtattcggaatggttgcatggtaaggtggtggatatgttctattttcccattattgaaaccaactggcccgaatggataccgggaataggaggggaacatttcatatttttcagtccgatatttaattttgccgatgctgccatcagttgcggtattgtggcgttgttgttattttacggtaagtatctgaataagaatattcacccgtcagcagaagaaattaaaggataaatgatgcgtcgcaggaatattacttgggtgtggctgctgggtgcggcttttatggtggggtgtggcaagcaagtgcctgaagatattatccagccggacaggatggagaatatcttgtacgattatcatttaagtatctccatgggcaataatctgagttattctgataattatcaaaaggaggcgtataagaattatgtcttcgagaagtatcatattactgaagctgatttcgattcgtccatggtgtggtacacacgtcacacggaggaacttgccggtctttataaaaaggtgggggaacgcttccgcagtgagaaaaaacgcatgcaggagttgctggcgttgcgtgaggataaaccggctgcatcgttgccgggagatactgtggatgtatggtatgaccgtaaactttattggctgacagatgttccgttggcgaataaggtgacttttgagattcccgccgatagtaatttcaaagcaaaggatgctttcctgtggtcggctgattatatattcctttcggaaggggaacggagagccactatggggttcaatattttgtttgataatgattctgtggtggggcgtgtgaaggatatcacgtgttccggtgtgcagactttgtatataaagcctgattctgcttttgccatcaagagtgtgagcggatttatttactatatggatagtgattcgtcaacgaataagccgggactgattatcaataatattgctttgacccgttatcatgaaccggtagatacaatgacagttgccggaaaagatagtttggctgtggaacagcgtgttggaactgattcggtggtaacagagaagaaagcagattcgattcaatcggtggatatcaggaaaaatgttcccgcccgtatgaatccacgtgaaatgaaggagaataatgcggcagatcattctcactcagatcgtcctcagagaatcaagcgcagaaattaattatcttttgtgggtatgagacgttttgcttgtcattatctttatgtttcggcggatggctgttattctaaatatgtagtggagttggaagacagcggtagagtgcgtgcatattttccattgaaggaggagcttagtgcgacacaatggataggcggagtgattattatttctccgatgtatgggctggagatttgttccggagagaagtttgctgatttcctgcaccgtgccatgctggaaacaggatgtgaacagcctgtatatgcatggcatatagctgattttgatttgccgggaaaggagtttacaacgggaagcagactggtacgtttataatatatgcttagggtagcgttatagtatttcccattcagaaattattgcatataccgatggaaatatgaattttaaggcaataaacgtcttctgaactccgagcaaaccactgctgtggcaattgccacattcaacgattcggaggtttcccgttcttgaggataattgggaatatataacttcttgtttatcagtctctctacttcagggcttactccttttccttcatttcccatgacaatcaatccatgggccgacagggattctgcataaataatgttcccgtttaaaaaggtgccgtatacaggaatatcggtcaggctttcaataagctgtggtaaagaacagtaatgaacttttactcttgccaatgcccccatggttgcctgtacggttttgggattatacacatctgctgtccctgtcgagcagaagatatgttcaatgccaaaccagtctgccaagcggataatggttcccagattccctgggtcttgtacatcgtccagtgccaggcatagagaacttttaataacttccggatttaaatcataagaaggttgtacaaaaacggccaatacctcttggggcgtcttttgaagactggcacgtgacaactcttcttgtgttacttcaataatttcgttggccgtggcagagtggttcattttcagccaattggaagtggcaatcagtaacttgcaagggaagtgtcccaataaatcgcctaccaatttatgcccttcggccacaaaaacttgttcttctttgcgtttttttttcagttccaacgaacggatatattttattttgtttttgctcagcatgataatttctatttaataacaaatatttggagcaaagctaagaagatattttcaattaatatctatctttgtagataaatttgcgaaggttacggatttgtatgaagaaaagcgcacgcccatatatatgcacatttattatagcactatgcacctcgtgttcggtcagtaaatttattcctgaggataaatatttattggatgaggtcaggattgtatctgaaacgaaggaggtgaagccgtcactattcaattcatatattcgtcagaatcctaatgccaaatggttcaatttggttaagatacctatgcgtacttattgcgtctcaggcgtggactccactaaatggattaatcgtttttttaggaagattggtgatgctccggtaatctatgatgaatctgttgccctgaaatcccaggaggaaatagagaaagcggtacgtaatatggggtatatgggggctactgtgcacctggataaaaaaacgaggaagaacaaattgaaattggcttaccgtattcatgccgggcatccttataaggtacgtcatgtggtgtatgatatagatgatttggttatcagtgactacatgcggcaggattctgcccaaagtttgttggcgcccggtatgctgtttgatgtgaatgtgctggatgctgaacggcagcggattaccaaattattgcagaataagggttattataagttcaacaaggattttttggtctatcaggcggatacggctagaaatacctatttggtggacttgactttaagattacttccttatcagcgtagaaaagaagatttgccgcagaagcatagacaatacaaggtgggagaagtgaattttctggcggatgatgaaatcatgtcggtacaggaaggtactttggaagaatttgattctttgcgatacaaaggatatagtatgtattacaagggaaaggcttttctccgtccgcaagtgttggttgatttcaatcgtatccgtccgggagaactgtatagtgaacaggatgtgcaaaacacctattccaatctggggcgtttgcgtgccttgaaatactctaatattcgttttcgtgaagtgaatggagaaaatagtacgcagctggacgcatacgtatttttggcgaagaacaaaaataaatccatggcgtttgaagtagaaggaactaattcggctggtgacttgggagcggctgcctcggtttcttttcagcaccgcaatgtattcaaaggttccgaaatctttatgatgaaagtgcgtggcgcttatgaggccattacgggattgggggtggcttcacaggattatgtgaatgataattacatggagtatggggtagaaagcagcttgaatttccctcagttcatgtttccttttctatcatcgaattttaaaaagaaaattagagctacttcagaggtcggcttaaagttcacatcgcaagttcgtccggaattctcgcgtacactggcttctgcttcatggagttataaatggactgacaggaaacgtatgcaacaccgtttggatttggtagatgtcaattatgtatatatgcctagaaagtcatcggcttttcaggaatatttggacagcatgagtctgaggaattcagctttgaaagccagttatgaaaatcagcttgttgtgcgtacagggtacagctttacctataacagtgcaggaaacgccatgatgcgtacacctactaaaaattcctattctattcgtgccaatattgaagaggctggtaatttattgtatgctgcttccaaattggttcaccctaatccgaaagatggagaagattatgtgctggcgaatattccttttgctcaatatgtgaaagcagattttgattttgcaaagaatttcatgatagatccgcgtaactcatttgtgtttcatataggagtgggggtggcttatccgtatggtaactctaaaatgcttccttttgaaaagaggtatttttccggtggcgcgaacagtgtacgtgggtggtctgtacgttctttaggacctggtgtttataaaggtagtgaggatgggagaatggactttatcaaccaggctggtgatattaaattggacttgaatatagaatatcgtactcatttgttttggaaattgaatggagcggcttttgtggatgccggtaatatctggactattcgtgatgactccggacaggaaggtggtttattcaaatttaacgagttttataaacagatagctgtagcatacggtttgggaatccgccttgatctggattatttgattttgcgttttgacggtggcatgaaggccataaatcctgtggaaacaggtaaaaagcgatatcctgttatccgaccacgctttagccgtgattttgcttttcactttgcagtaggttatccattttaaagaaaatatatataatatgataaaagaaagaaagagaacatatactcaagaagaggttaatgagttgaaaaaatggtttgattctcaggaacttcccccaacaatgcagatagataaggctgcttttactcctaatttaaaggatacggtagatatgctgtttgaacaggcctatgtatgttacgaaaatcccaaaatgcagggatgcctttatttgttagagaaaattaagagcaatttggaaaaaaacgggacaggagcgtgagcaattatcatttcatattgttatcaaggtattataatttaatactggcagtatgaagaagaatttattattgtatggtgtgtttctttgcgccctctccatatcctcttgttccggtggctccaagagtagtcacgttatggatagcagtagcatgagtgtggagaatgcgaatgaagtgatgaagtattatgatacctcattgaaaatcttgaaagacttagttaatgagaatgagataaaagcggtgctgggctatttggatcagaagatgccggtagattctctgcctgtggtatcacagcctgtggtttctgttcaagatacagtgtttgtttctaatccgggaaattacttcagtgagaatgatcgtcagaatctgaaggaaaattatggccgcttgttccggtctatttccgcattttatgaaaactataagacttaccggctgtatatgcaggatcaatcatataaaaaggataataatgctttggcggataagataagaaaagaggagctattattgagtattgctttatctgaatacaaacaggttatttttgatatattaactccgatagttgaaggggctaaaataaccctgacccctataaagggaaatgttaaagataaatagaagtataacaggcagccggaaggctgcctgtctggattgtattatgtaaattaaatccttgttgttctctgctttgttgttaaggaagctatttcatttccaatcttcttgatttttctctcttaactattttcagcctgttcaggaactatttttagatacatcttttatacgtttcccctttggagaaacttgacattccggtaggagatgcttgcttgtggattttattgtttaagcttgtgctataatgatggaaaaaaacagaaggtaggtatatgggataaatagaactcggatggatcactgatattgttttaattgttcatttaatagcttgaatataataaaattgttaataactttcacataacttttctataaataatgtgaagtttaataaggggttttttatctttgtagcagattaattgtaaaaaagtactgtaatattatttgttatggaaaaatcgtatgttataaatagaattaaagaattatgcaataaaaagaatgatagggagatagctttggatttcttttataataataggatatttcatgcaaaatatttatttttaggcaatgacctttatgttacagatacactaaatgttattgagttaaaggatttggatatgggagttttgagcagaattagcgaattattaaaaatataagataactgattttccttgtgcagtcattaatggctgtacgctcatttgtattttaaagcggcggcccgggaggggtagccgcttttatttgacgggcttataaaaaaaggaataaccgaagttactccttttgtacaccctcagggattcgaaccctggacccactgattaagagtcagttgctctaccaactgagctaagagtgcaaaatgcaaaccatttttgtacaccctcagggactcgaaccctggacccattgattaagagtcaattgctctaccagctgagctaagagtgcaaattacaaactgtttttctttcgtacaccctcagggattcgaaccctggacccactgattaagagtcagttgctctaccaactgagctaagagtgcattcatttctgatttgcggttgcaaaggtaggtgttttcttttaaacatccaacattttgcaccatttttttaccttttcatcgaaatttattcaaactcataaacatctgaaggtgtattccgctttaaagcaatgacttgcacatctttgccgacgataatccctttgtttcgtagtgagagttctactgtcttgtatgccagttcggggtggttgttgtctttgctaagatgacaaagccaaatgtatttaagactttcattgatattttctgccaaaaaatcggcggtttcgcggttactcatatgtccattaggcccggcaatacgttcttttaaatattggggataaggtcccattttcaacatctcttcatcgtaattcgcttccaataccaaatagtttgctttacatatatattcggcggcagtgggggtgatatgccccaagtcagtaaggaaagaaaatattttaccgtctatattcatgcaatagcctacattgtcagttccgtcgtgaggtacttcaaaggcagtaattgcgaaatcttccaattccattgtctcacctttgtgcagatagtgtacgcaggtcgataatttctcggtcatgcaataacttttgttgattcctgcatgtacttccggagtggagtaaacaggaattccaaatttctctcctaaatgccctactgctttgatgtggtcggcatgatcgtgtgttatgaatactgcccggatgatatccagtccgattccaagttcttttaatgttttttttattgtacggatgccaatgcctgcatccaccaatatgccatatctgtctgttccgagaaaatagcagttgccgctacttccgcttgcgagacttataaatttgattttcattttgttgctctcccaattctagtgaatccccacgttttttgtgttaaaagagccgcaaatatacataaaaaaaggaggaaataaaatagaaacaggctttttcggaaagatgatttagcggatattgttttaaaagaatgcctggaatctggattatggaatacgtagataataaccctttcctctgactgttattaatttatattcttggaattcttttaaaactttccggattgatttgatgtgtgcatctattttttcattggcattatcatccgtaggccagaaactcttttttatttcttcacggcttacgcaagttcctgctttttcataaagcatatttagtaaggtgaggtctaatttctgaatgttgcactttttgtttcctatatacaactcttgtttctccatgtctatgttcatacgggtaaggagtgtttgagtatccttttcctttttaagaaaaatgagtatgaaaataagaatcatcaattgtccgatgagccaaaagagtgtgttgtctatgtgtcgtaaaatagttttgaagtcatagtttacccatgcttgtaccttgatgttctgggtgatatctactatgtatcggggagtattgtatgccgttcggggaattgcagaactttggtcgctgtgttgggaaatggatttgttataataaatagttccggtcctgccggttatgccatgatcggataatatttttctaaaggttgcatttaactcatcgggctttatgggttttagttgggatagaatgtattggttcagcatacgtttggcggtctgctcgtccagactgtctttaaaagtatagattgtttttccttgtctggttcttatggtgtagctttttactttttggtgtaggctgggagcgatagtatacatttttatatcccagtttgtaggttcgggatgataatagctgatgtaggcaagtctttcattgtaatcttccgtaatggcggatttgaaagcgtggtctatttgggtattcactcgttcggcactattatgaaaagcgatataaacagtatatagaacggtgatggtgactgccataaataagataatgtgtgtttttgcccttttcatcgtatgaattttgaatgcaaaagtaaataacgttaaggaaaaaacaggtgttttatctgatctttttctgaaaaaggagaaaattcagaaagagttcagataaatattttgcagagatacaggcttttcttcttctttgcgtcagcaaaatattttgcgaatcaataaaagcaagaaacgtatgagaacaaaagctgttttattttttctcttgttattgccggtgtatgtggtgaatggccaagatgacaagagagagtatttgaaaaaggtgttggataatttagagcagattaagtcagcaacgtataaagtagagagcgaagtctggaatcctggtgatacaattccttccagtattagaaaatatatagtgaaagagttcgatgatccggctgattctacgataggggcaagttttgtgaatttgggaacagatgatggtaaagagttccaattcggttataatggtgaagtacgtgtgttggtgaatcatgctgtcaaggaaataaaaatcgataattttaccaccagaccgttacctttcagaccgttgaccccacctttctttaattattgcaagaatattgtcaggtatgctttggaaacagaagacagcatagttaccacattggaagattgtggggattattttcattttaaacttgtcataaacgaagatacacaagtggagttctttggtaaagcttatcacatgcctccacctcctttttatgtagagccgacctctatttatgaactgtggattcacaagtcgaatggtttgccttataagaaacggagagcgatgtcccataatatatcggtggaaacttgctgtaatgtggaaataaacaaagaaacaattgacaggtttgatgttttcgattatgttccgcaaggttatgaaacaaaaaaatatgattatggcgctccttccaggaatatggccgctaatctgacgggtaagaaagcaccagaatggacattgaatgatataaaggagcatcccgtgtcattgagtgatttgaaaagtaaggtcatcttggtaaatataacaggaataggctgtggagcttgccaggcttctatcccttttctgaaagaactgaaaagaaagtaccaagaagaagattttgaattggtagccattgaaagttggagccggatgcattcacttcagaattatgcaaagagaaaggaattgaattatatgtttttggatggagatgataaagtgatagaagattaccggacgggtggggcggctccgtacttttttattttggataaagaacggattatacggaaagtcatccgaggatatggcatgggaaaaaccgacaaggaaataacggaggctatagaagaattgctatgactggaatgaggatggaacaaaaagtgaaaacttttgcagacacatttgttctatcctcatttatttatattcagcattctgacggttgtcagaattggaagaacttcttggcattattatagcagatatcttccaccatctgattgacgcgttctatttcgcaagcagggatttcgccgttttccacatcattacccagcaagttgcacaaagtacggcggaaatattcgtgacgcggataagacaggaatgaacgagagtctgtcagcatacctacgaagcggctcaacaagcctaacaatgacagtgcattcatctgtttttccataccgtctttctgatcgaggaaccaccatccggaaccgaattgaatcttgcctggaattgtgccatcctggaagttgcctaacatggtggcaattacttcattggcgcaaggattcaagttgtaaaggatagttttggtcagttttccttctgtattcaggcggtcaaggaatttagccatcgctttggcggtggtaaactcaccgattgaatcgaaaccggtatcaggtcccagaagtttgaacatcttggtgttgttgttgcggattgctccatagtggaactgctgggtccagcctttttcccaatccatttccccaaatacgatcagcatggctgatttgaatttcagaatttcttccttggtcagttctgtaccaccatataccttattaaatatagcattgatttcagcatcagtatagtcttcagcataaaactcttcaattccgtggtcagacaatttacaaccttgttcagcaaagaagtcatgacgtttccgcaaagcagccaccatgtcatcgaaagaagatatcgtgacaccgcttacagcagacaatttttccatataagcacggaaatcagcgggaacttctactgccatcgccttgtccggacgccaagtgggaagcattttaatttcgaatccgctttcacgggttttgatgtgatattccaatgaatctaccggatcatcggttgtacaaacggtttccacatgataacgacgcatcatgcctcgtgcggagtattccggtttggcaagcttttcattacattcatcaaaaatctcgcgggcagttttcggattcaatactttattgattccaaatgcggttttcaattccaaatgagtccaatggtataatgggttgcggaaggtataaggaactgtttccgcccatttttcaaatttttcccagtccgtggtgtctttaccggtacaataacgttcgtccacaccgttggtacgcatggcacgccatttatagtggtctccacccaaccagatttctgtcagtgacttaaactgatagtcatcagcaaccatctgggggatcaggtggcagtggtaatcgataataggcattttagccgcatgttcatgatacaacttctgcgcagtttctgtctgaagcaggaagttttcatccataaagtttttcataagtagtctttttatatctatataattgttgtttattttgactttcagtaaaaactcattctaaaaaagatgtcaaagagcatctctttagatttattaaccgttatcgaacacgaaagtagaaattttatttggaataacaaaattatttgtatctttgcggcgaagatttaaagattttaaatgcttggttcaatgatgatatataaaaacttaaatatatattaccatttaaaagaaagcatgaatactatgagtacacaataaaatctgattcgtcttcaataagtacaggtatggataaacacataatataattaaaaatatgaaagcattaaacaaggagacagcagcaaagactcaacgtcccgaaagaatcattcaatttggtgagggtaacttcctgcgtgcgtttgtggattggattatctacaacatgaacgaaaaaactgatttcaacagcagtgtggtggtggttcaacctattgaaaaaggtatggttgacatgttgaacgcacaagattgtctgtatcatgtaaacttgcagggtttggataaaggacaggtggtaaacagcctgacaaaaattgatgtgatcagtcgtgccttgaatccttattctcagaatgatgaatttatgaaattggcggaacagccggaaatgcgtttcgttatctctaatacgacagaggccggtatcgcttttgatcctgcctgcaagctggatgatgcccctgcttcatcttatccgggcaaactgacccagttgctgtatcaccgttataaaacgttcaatggtgacaagagcaaaggtttgataattttcccttgcgaattgattttcctgaacggccataaactgaaagaaaccatctatcaatatattgatttgtggaacttgggtgaagacttcaagcaatggtttgaggaagcttgtggtgtctatgctactttggtagaccgtattgtgccgggattcccccgcaaagatatcgctgctattaaagaaaaattgcagtatgatgacaatctggtggtacaggcagaaatcttccatttgtgggtaattgaagctccgcaggaagtcgccaaggaattccctgccgacaaagccggtttgaatgtattgttcgttccgtctgaagctccttatcacgaaagaaaagttactttgctgaacggtcctcacacagtgctgtctccggtagcttatctgtctggaatcaacattgtgcgcgaggcttgcgagcatgaagtggtaggtaaatacattcataaagttatgttcgatgagttgatggaaaccctgaacctgccgaaagaagaattgaagaagtttgcggaagatgttttggagcgtttcaacaatccgtttgttgatcaccaggtgacttctatcatgctgaattcattccctaaatatgaaactcgcgacctcccgggcttgaaagtttatctggagcgtaagggtgagttgcctaaaggcttggtattgggactggcggctatcatcacttattataaaggtggtgttcgtgctgacggtgctgagattgttccgaacgatgctcctgaaatcatgaatctgctgaaagaactttgggctacaggctgcactcagaaagtggcggaaggcgtgttggcagcagaatctatttggggtgagaacttgaacaacattccgggtttgaccgccgcagtaaaagctgatcttgactctattcaagaaaagggtatgctggaaacagtaaagggtattctctaatcagattaattgttagaaatagtttataaattccttgagggagatttggttataaaactgaatctccctatttttgtatctatacaagatagatgtggcatatggaaaaacaagaattcagacctggctatcctttatggatttgggcagttattgctattatgttggtggcgtgtacatgcctttttatagcgcatggaagatatgcatctttgctggtcttgactcctcctctgttgataacgggggtaaggttattgtctgtttatactattactcctgattcttttaccttagctataagagggatgaagcctcggcatgtttttcctttgcaaaacatcacagagatagaaaaggagtacacaaagtctggtaaactcaagtcgattgtgatccgttaccggaaagaaggaatgtaccacaattttttagttatcaagaaagatgatgtaaatattgaaggtattctgaacgctattttgcactatcatccttccgtgtctgttcgttaaagatgatcattaaggaaaaataaggaaatactcttcttttcagttccgcctgatgggaagaatgatattcttcggctgtcgatatattttcaaaataatgataactgtattgggggtgggactccatgtaatcctgtactatgtctgcacattgagataatttcatgataaccggcacatggtgatggctcagatacatgtccagttcgtccgaagtaatattgcccggaataatgaccagtctttctttttggctgatgagatgtagttttgcggccgcttccgcagcgatgaatgaaggaataccgggaagttgctctacggggattccattttcttcgaggagatccagtacatagtgaacggaggcgtaaattcccgcatcgccttctactgctaccgccaaccgttttcctgctttttgttccagcctcatttcttcgaaaagttgccgatagactttgattgcttttgttctgtctttgctcatcgggagcgagaataggtgtatatctcctttgatgcctagcttatgtaacagggtggcggcacgtgacaagattttgtctggttcccgaaccgttgatggacaatatattatgtctgcttgctgtaaagcatgcaatgatttcaatgtaatcagttcggcatcaccgggtcctaaagaaacaaaatagatcggatgactcatcttttgtaggtatttacagtttttaagcacgcaaaagtgctgaaaaattccgtataaagcaagagaattgattacctttgttggctgaaaaacagaaaagaacatgaaaaaactaatatgggcttcgggccttttgttattattgactgttacagcctgccaaaataagcacaaacagggctccgggaatctggagcataagacattgacagattcttctattgtgaagattattccggaatatgcccaagggtttaaaataacctatacgaatcaggcttgtctgcttgacattcaggaccctcagaataaagaaagtcagtcttttcattatgctttggtgccaagaggtgtggaagcggaaaacatacctgcggattatacggttattgaaactcccatacgaagcgttatctgcatgacttccctgcaactttccaattttatcaagttggaagagctggatgcggtggtgggtatcaccagtacacgtcatttgtttaacaagaaaataaatgatcgtttgaaagatggaagcattcataagataggtattgaagggaatttcgataatgaggtgattatgagtgtaaacccggatttgattttgatctctccttttaaacgaggggggtacgatgctttgaaagaggtaggcattcctttgatgccgcatttgggatataaggaaatgactcctttgggacaggctgaatggataaagtttgtgggcttgttattgggaagagaagataaagctaatgagcagtttgccactattaagaaaagatataacgagctgaaggaactgaccggtcgggtgacaaaacgcccggtggtattcagtggagaattgcggggcggcaattggtatgctgtaggagggaggagttttctcgcacaattgtttaaagatgccggtgccgattattttttgaaagacgatgaacagtctggaggagtcaccctcgattttgaaacagtttacagccaagcggcaggtgccgattattggcgtattgtgaatagctatcaaggagaattttcttataacacgttgaaagaggaagatgcccgttatgttgattttaaagcatacaaagagaaaggggtgatttattgtaacatgcgtgaaaaacctttttatgagagtatgcctacagaaccggaagttgttctggcagatttgattcaaatctttcatccgcagcttttgtccggtcaccaaccgggatattatgaattgcttaaataggaaaatagtatatgaaacgacctgttgcattttatatgctgttaattatggcttctatttttctgtttttcttcctgaatctggtattaggttctgtttccataccgcttcgtgctgtgtggaatatcctttggggaacagggaatgagtctgttatatggcaaaatattatttggaaatcacgggtaccacaggcgcttaccgcattggtggcgggggcggggctctctgtcagcggtttacagatgcagactgttttccgcaatcctttggccggtccgtcggtactgggcatcagttcgggagccagtatgggagttgcttttgtggtgcttctttcgggcagtttgggtggtgttgctttgagcaagctaggctttatgggggaaatagcccttaccatagcagctattgcaggttcactttccattatggcacttattgttttcgtttcccaaaaagtaaggggcaatgttactttgctgattatcggtgtgatgattggttacatagccaatgcggtgataggtgtgctgaaatttttcagtgtggaggaggatattcgtgcatatgtcatttgggggttgggaagttttgcccgtgtatcgggagatcagatgactttatttatatgtatcatggtggtattgttgccactttccttcctgcttgtcaaaacattgaatcttttgctgctgggagatgcatacgcacggaatctcggattgaatataaaacgtgcccgtctgcttgtcattacttgttcgggagtattggtagctattgttaccgcatattgcggtccgattatttttctggggctggccgttccgcatctttgcaggggaatgttccgcacatccgatcatcgtattctgatgcctgcttctttactggcaggtgcgtcattggcattggtatgtaatctgattgcccgtatgcccggtttcgaaggtgcattgccggtaaattcggtgacggctttggtaggtgctccggtagtgatgtcggttttattcaataaacgtcgcaatgaaatgaatgagtaatgatgaatcaagaaactatacatattcggaaactgactaccggttatcccggtaaggggggaaccaagattgtagcgaaggacattgatgctactatccgcagtggggaactgacttgtcttttgggggcgaatggagtagggaaatctactttattgcgtactttgtctgcctttcagccgcctgtaggaggagagatagaaataatgggaaagaaactgacggattacaccgataaacagttggcgacagttatcggagtggtattgaccgaaaaatgcagtctgcggaacatgaccgtggaagaactggtgggtatggggcgcagtccttataccggtttctggggaaatttaagcaaggaggacaagaatacagtaaacgatgccattgcgctggtaaggattgaggatttgaaataccggatggtacatactttgagtgacggtgagcgtcagaaagtaatgatagcaaaggcgttggcacaggaaaccccggtgatttttctggatgagccgactgcttttcttgatttccccagtaaagtggagattatgcaactgcttcatcatttgtcacgttctaccaacaagacgatttttctttccacccatgatttagagttagctttgcagattgctgataagatttggctgatggataaagccaatggagtgactataggaactcctgaagatctttccatagacggatgcctgagtaattttttctcccgtaagggaattgtttttgatatggaaaccggactgttccgcattgacaatgagtttgaaaaagaagtccgtctggtgggacatgggaataagtatgcgatggtacggaaagccttgcagcggaatggtattctggcaagccggcgtgttgagtccgatttttatattgaaacgggagatatgactaccagtggatatattatccacccggtagccgggaggacgataaaggtagataccatagaggaattgttagaacaagtcactgctatattagcttccgtttagcagcagcgtctaaataatcagttattgtatcctgaaaggaatattcccttcttcatcaatcaagaggattgtcaattttccttcgggcaataaggggacgcaatgtgcaaaacaatgttccaacaaacacggaaagaactttccgctgtcttcttcagacagcaaggtccataattcacgggctaatgtcaacttttctatcatgctttcaacatccggagagcatccggcttccattgccacctgccttaggaattctttattcatcaccactttcttactgtgtgtgtccaaatttccttcggccagtttcaccgccttgcctatcataatgcctaaagtaaccaatggaaccttaagcttggcagctatcttgagtgtctcccctataaaatttccataatgtacaaaagcctgagcaggtaatcccggatactccttcttcacaaaacgttcgctttttgctcccgaattaatgatgagtctggatgagcccacagccacacaaacctccacttccctgcggatagcctcgacaaaagcttctgaagaaaaaggacggactatgcccgaagttccaatgatggaaatgccgtccacaattcctagtttaggattgaaagtacgttgtgccaactcttttcctccgggaacggaaatggtaacatccagccctttgtcataaagcgccgataattctttcattatcatttgccgggggatgcgattgatggcgggttccccgatttccaatcccagccccggaagggtgactcgtcccactccttcaccttgcaggaaacggatgtccgggtgattgctaaaacttaccgttaccacaatggatgcgccgtgagtgacatccggatcatctcccgcatctttaacaacggtgcaggtggcactgttcttttctatttctgtatgggctaccggtaaggtcatttcctcgtcatcgggaaggcggaaggatatcattttctgttcttcccctaaaatcagagccgtcaatgctgcttttgcagctgcagtagcgcaggcccctgtggtgtagccgcttctcaacgggtaaaaagcagggatgttcttttctatctgttttctcaatccatattcaccggtaacgatcatgaaatgcctgggaaggggagggcgttttatagcaaagaccgggatttttgcagcctgtgccgctttcactttctccgaaaatcctccggattctccgctttccttggtcagaatggcctgtggatgtagtgtctctaataaaagagcttcggattctccggcatgatagaataccagatttcctttcgggaagccttgttcttgggctaatgtgatggaagtttcccgttccagtacgcggaaccaacaggtatgtttctcccaataagggcgtaacttcccgatggtctgtactccggtcagtgccagcagacgatcggttcctgctttctctaaccggtaaatggcatctgcatagtcttcacaccagatgatgttttcggtgcgtggaggatacttcctttcaaaacgtatgacaggaagatgtagcgtccggcttgtttcatccacagtccggtggagttgggaggcaaacgggtgggcagcatccaccaacaaacggatgttgttttggcggcagaaactttccattttctccgtgtccattcctccggtgatacggatgccgtgcttgcattgtatctcctgccattctcctttggtagagtagaagtagggctttccggcttcatcggcaactttcacggcggtgcgtccttcggtagttcctcctaaaatcagtatcataggctggatgtgaatgattctttttttactttctgaacaagtgtttgaactcgtgcgcatagagtcgggacagacctttccggttgtctatcgcttcgcctactaccaataaggtagtcagcgtcaggttattgtcacgtactatcttagccaaatccttcaactctccgcgataaatcttttcttctttccaagtcagcttataacaggcggcaaccggagtttcgggagggtatgcctgcatcagctcttcctgtacctgttccacaatgcccgcacttaaataaatgcacattgtactttgcgattgcgccaatttatgtaattgttctttttcgggcatcggagtacggccttccccacgggtgaggattatgctttgtactttttcggggatggtgaactgtgaccttaatgctgccgcagccgcctggaacgaggagatccccggagtgatatgataactcatcttgtagcggtcgaagaaagccatttgttcctggatggctccataaatgcaagggtctcccgtgtgcaagcgtacaataaacaatcctttatcataaaactctttcatcaaggcgaactgttcctccaaatccataccggcggaactgcgtacggtcgctccttctttagcataaaaggtcagttcgcggggaacaagacttccggcatacagaacaagatccgctttctccaacattcgttttccgcgtaccgaaatcagttcgggatcaccgggacctgcacccactatctctatatgtccgccacgcatggctgtcgcactgacggctatggcaaaagtgaagtggtttccttctgtcagcatgcccttttgcttttccaatacaagtgttccttcaccgctgcttttcaaggctgtgctttcggccactccatagacgcctgtcacttcgaatgccttttcagacggatggggaactgtgatatctttcagttcttccgcaggataaatatgggtttccgtatcggcccatcgccggtggaggatttccagcagaggctcgtcttttttcagttcgatggtattgagggaggcgagagagaacggacacaaaccatgtctgtgcatcacggcttctatgtattccgcaatgcccgaaggatcgcattgtttccggcaacctattcccaagtggaggacggcgggatggaaacagagcatgggaatctccgcactatatatataaggtgtaacagcaataatcaacttgaattccgattggggcatgtcttcgaaatgatagaacacttttacgtgtgcgggaagcgtgcgttccagatactccgtacctttatcctttatatcgagcagcagcgccgttggttcccggttgacaaaaagtgtgaccagtctgttcatttttgcatgaggaacagttattttccagccatattttccagccagcgtgtccagcgcccataacccggcattgtcactttgggtggtaatcacagcttctcctcctgtaatggcggcaatatggcgggtcagttcattggctccccccacatgcccggaaagtactgaaatgacaaagcgccccgtactgtccacacagaccactgccggatctttatatttgttttttatgcatcctgcaatgctgcgtacacagattcccatggcaccgataaagatgatgctgtcgaagtcattgaaatgctcctctatgaaccgatggcaggatgtgatggaaatacagccttcgcattcgtttttggtataaataagggtatccggcaactctctttgtagtgtttttgccaacggcaggctggcttctgatatcagtatgattgctttcatttgttatctgttttaaatcatttattccgctctcattatctctatcggattaaaggcatccacagcaatacgggtacactgtgttaccttcttgttgatttgcgttataccttttgtgaacagggccttgctctcttccgaaaccgaattgaatacaatgactccgtcaggcaacagcacttctttgattttttgtagaatctctatcatttttcctccatgaccacctataaatacggcatcgggggcgggaagcccgccgagttccgtttccagaaaatcacccatgacggttgtaatgccgggcgtgccgaatttacgactgttgcgttccattagctctttaccttccggacgctgttcgaatgctgtcactttcagttccggaaattggagcttggcttctatggaaacagagccggtgcagaaaccgatgtcccagaatgatttcttttcccttaatgtcagcatactgagagtaagcaagcggacaggcattttggtaatcattctgttgcgtccgttcaacagatgaaattcactttcgggaattccgaacggacggggatgcactttgtttctttgcagtatcaggcaattgggaaagcggaaagcagattgggaggcttcctctaaagagaatgtacgtacagattcttcctcgccattgcctaatgcttcccccacggtcatgcggtagttgtcatatccatactccagcatccgggcggcaatggtggcaggtgtcttttcccggtcggtcaacacgcctatcagtttatctcctctgattaaagcagagtcgaatgcatcccaaggacgtccggtcagcgacaaggtctgcatctcctgataggggagcaatatacggtgtgccagcatttgcagcgagttgaaggtggggaataagataatctttgccgacgggagttttctcatgacggtattggcgaagccgaaaaacaacgggtcgcccgaagcgaaaacgattatttcgggatgttcctcgtaacggcagaataccgcatccagcgggacggtgatgtctatccatacggcatcttccggcaaataagcgtgtaccaattcatgatgacgttttcctcccgagaagactttcccttgagaaaccaagttccggatttcaggagaaagaaattgattccggttatcgcttatacctattatatagaatgtttgcatggacttatacatctcttcccggtttcagttgttccgcatcatcaaaagtaaggatggcatttaccagagtcgctgccagattgcttccccctttgcgtccttctactatcagtttggggatatggctgaaaggtttcaccatgtgtttgctttcgcaaacgtgcacaaagcccaccggagcagcgatgatgccgcatggatgcgctttttctttccgtatcaggtcacacagttccatcaatgctgtaggggcattaccgaatacatataaagcttccggatgttcctctgctgccatacgtataccggcctgtgtacgggtgattcctttttcttttgccaatgctgccgcgcgttcgtcacccagatagcatttcaccccgatgcccatccgttccaaagcacctttacggatgcccgcggcagccatcgtcacatccgtaataattgtacgtacttttccttcattcaatattttatacagacattctacggcaagaggatctatatgcaatatgttttccatctcgaaatcggctgtggtatggatggcatgcagtaatgcccatttgtgatccgaaggaatatttttatttttcaattctttctcaatagtacggaaactgtttatcataatctcctgaccgattcctgtcgcatcggtggtcttttcccggtaataaccacgcggagtgattaatttcccttcccgataataagactgggagttgccaatcaataccactgtaaacatatccacctgttcgggatcgaattcttgcaaagtggtgattgtcacggtttcttccttacgtccggcctgacgcacaaagcctaccggggtttcgggggcacgctctttcagaaaaatttcttttaatctgtagagttgccaataccgcccttcgcttttgggattatagaccgccgttacaaaatctgccgttgcggctgcatggatgcgtttttcaatccggtcccatggtgtcatgaggtcggagagggaaatcacacagaaatcgtgaccgatgggtgctcccaacagggaagccgctttctgaaaagcactgatacccggcaatacttctatttccacccggctgccacgctcgcatttcatttcgtaaaccagcggagccatgccataaattccggcatctcccgagctgataacgcatacagtctttccttgttccgccagctcgaaagcctgttcggcacgtgctttttcacgtttcattccggtgtctatacattcggtgcccggttccagatagggttcgataaactggaaatagtatttatagccgattactacatcgctgttcttgactgcttgtattacagcgggggttatatcttcgggtgagccgggaccaatgccggctacgattaattgggcctttttcattttttattatataattattcctttccggaatctgatttaaaagtttccttcagtgctttcagccaatataatcctctgaatgacaatgcgctgtcctgacagtagttccttcatcttgctttcaggcttttacatagacggactgaaagtggtggctggcatgaggagccaaacttaaccgtacaaagttacttatttgagcgggagaaacaagtcttttctttctataaattatggaaatctttttttatcaggcttaataatgaataaggcatcattcagaatgtgccgtagtcgggaagtcggcaaagcagaggatattgccggtgagaattaaaaaaggaactaagaattatagcgatttgctgatagataagtttgaagaaaaaatgttggcggaatcattggggggcactatggggatggttaagcctttttattcctgcacttaaccctttttaaacctatgatttctatctccatagcctttggagttaactccaaaggctatggatttaactccgcaagcttgggagatagaaatcattcgttcaaaaaggcttagtcacaaggatgtgagagcttaggaatcggcttgccggagtttgttctgtatggaagaagctgcctccgctgtttgtatcatatcggattccgttattttaaggccttgccatccgagaaagcattacccactttttctcctactttcagataatcattattgaacgggtcgaagatgacgggaataactttggaggcatccacttttccattctgatccagtacacgttcatctacacttacattgactatttcgccgcgcaggatacaggtttcgggattgtaatccttcagcttgcattccacagctacggataattcatcaatcagcggggcatccacaaattccgaccgggtggcatggaatcccgcacgggcgaatttgtccggaaccttgttgcccgaaacaatgcctacataatcgcaagcgatgatttgcccggcttctgccatgctcactgtgaatgctttgcgtttcaggatgttggccgttgtcttgtgaccttcgctgatacaaatactgatttcattcatttcactgataccgccccaagccgcattcatggcattgggaagaccgttttcatcgtatgcggcgatgataaataccggttgcggataggtaaaaggttttgctcctaaattctttctcatactatttattttttagtccattgtttaatctcttctttggtagcaccgttcatcagcctgcctttctgccagttcaggctggggtaggctttctttaattcttgttcggcgttagaaatgcggcttccacccgaggtagcgaatggaatgaggatcttgcctgtgaaatcacctttttctataaaactgttgatgattcttggagccaggttccaccaaatggggaaaccgatatagatggtatcataggctgccaagttttggggctgggaacgcaatgcgggacgtgacgaggcatctgccatttccacactgctgcgcgaggatttgtcgtgccagtccaggtcggcggaggtatatttctttgcaggttgtatttcgtagagggctccgcctgtcacctccgctatctgtttggcggctttctctgttgtacctgttgccgagaagtaagctactaatgttctgttgctctgtttctgtgcgtttacggtaatacacagtatcatgattaccgtcataaataatccgagtcttttcatacgatttatgttatttggttcaaatatacgttttaatattttatgatgttgcaaatttaggtatatttgcttgggttctttgtagataaattacgggtatcctgaccttaattacagattctgccatataatatatggatcaggatatcaagctgattatcaaagaaaaaatcagtctattactaacggcaggtgacaaaatcgtaacaaaaaacgaagaaattagcttggtggcgggtttcttatgtaaaggtaataaaaggcgattacctgtccgaaaaagaaataaggcttttgctttacaatagctttctcaaatcctcaatgtccggcaaagcgttacgaagccgttccggcatgtctttagatgcatggtaagtagcaacccccatcggcttgttataatcacgaacggcaaactctacaaaggtttgattcatttccctgcaaaggattattccgatagaagggttttcatgcggcttccggatatatgtgtctaaagcagatagataagtattcagttgtcccaaataagatgtgcggaattttccggatttcagttcgactgcgaccaaggaattaagctcccgattgaaaaagagcaaatcaataaacatttcttctcctgcaacctccatacgatactgattgcctataaaactgaaatcttgtccgaaggtcatgataaacttcttcacattggcaacaatcgccttttctactatcttttcgtctaaatcctcctcctgttcattcagttcctccacattaatgaaatcaagcaagtattcatctttgaatgagcaaacagcttttagagcttgcttggtatcaggcaatgcttgtgcgaaattgttaggaaaagtgccccgatggctgtacaggtctgtttttaagtaatcccttaaagtgtatttactccaatagcgagtggcgcactcatgtatatagaacagccttgcttccaaagtcttagctttggatattatttcagtatgatgactaaagccgattgaaaggaagtctgaccagttaaattcatcagccagtggctggcgaatttctacaagaagtaatttttcatccaatactaaatcgtcagccagtggctggcgatttaaaacagattcccatgcttcataaaatattcgcatgttctttatattcgaagctgaaaatccccttagccccggcaattctttttgcaatagggaagatatctgttcaattgcaccttttccccaaaagccagtacgggaattttccgacacataacgtccgatgccgtaataaagagatagctgttccttgttcaccgatgcggctgcacggtactggctgcgtaggatagcttcttttatgctctttacagcttctctataattctgatttatatccatttgtattttgttatatgtgacaaaagtacaaaaataatgctggcgaaacgacaaaactttgttttcttttcgccagcacatattttgctgtcagtataaataagtttagtttgttcctttgtctatatatccaaaacgaacttgacttaatctgtaacctttttattataatactccaaaaacgccacttcacctatctcacttaacagtttttgattttcaataaaatcctgtccatgcttttgccaacgtttggcaaatcctttaaatctggtacatgggaagttgctgcattggaaacaatgtgttatctttttcccaaaacaacataaatgaaatgttttgcatttttcacaacgagaatgatttaactcggctcctctgcaagctcttttttctctcgtatatatggggcatcccccacaaaagacaccacaagcaggaatacgaccattataaggcttgattttagccatttcccttgccatccaaaagttagtgagagaaagctgattcgctttgcgcttttgttcttcctttactatataaccttttttttcaaagaaagggcgagcagtcaagctcacttcggatgtaatccgcataattccggctgtaattgcatatcgttctatttcttccaaaagcatcgtagcaatacctttaccttgaaagtccttgtgaacaaacatagaatgtaaatagccttgagacgtaatagatgaaaaaccaacgatttgtgactgttgattaacagctacaataaaatagtgggtctttatcatctcttcaatgttagaaaggtcatctccgcaggatgcccaatcctcaacttctgcctgcgaataatccttgctatttaccgcaagaacagtgttttgaaataattcttttagcgcaatagtatccgtctgttgagcttccctgattgtaaagtctgttttcatatctattatatttatggtaaattcttttcagtctttcttattttgtagctattatggaatagaccatcggaatatgattactttaatgttttatcctatatttaaaagtcagatttcagatggatatctaccctgttgttccccggtttatttctaaataatcaaaatccgcattcattcttttaatattaaatggattatatgcaaatatagcaaaaggtacagtatatcattcattgtgaattgcactttttactgtatttcagcaaaatacctttctttacaggctaaaacctttgctccttttctgcacctctttcagttgtatcctttgatagagtttgctaaacagctccctgaaccaatcggatacatttttttgattgatgattagcatcaatttgttcctgccacatcgtcatcgaaaaagcaatgtccttttagctcaacaagtgtatgaatgtgctgccatatatatggagtgggtagcccggcaggaacattccggctcttctttttattcccggatgggataagattcggtaactaaggtaagataatccgtaattggggttataaccttgtccggataacttcttatttttgtgaccggaatatttcaaataactgaaaaagctgtattttagcagacattaaacaagttagaatgatggataagatattaaatttagacagtgtggaccaatataacagtctatacggacttgaaacactgaatccgttggtcagtgtcattgatttgaacaaggctacccggcagatggactatgtgcactggaactatggcgtttatgcactttatctgaaattggagaaagcttgtgatatcaaatacgggcgtcggagttatgactatcaggagggaaccgtggtatgttttgctccgggacaaacaacggaaaccacattgaccaccgaccgtgtgcagttgaatgtgcttggcattctttttcatccggatttgttacgggggaccacgcttggaaaaacaataaagaaatataccttcttttcgtatgaagtgagcgaggcgctgcacctttcggaagatgagcgcaatattatgacagattgcctgaagattatccgtatggaactggaacggggagtggacaagcatagtaagaccttgctggtaaactatatagaactgcttcttaattactgtatgcgtttttatgaacgtcagttcgccacccgcagtcattcgaaccgtgatgtgttgacacgctttgaagggttgcttgacgattattttgagggcgaacttgccgagcgtgacggattgcctaccgtgaaatactttgctgacaaactgtgcctttcatccaactacttcggggatatgttcaagaaggaaaccggcaagactccacaggaatatattcaggaaaaagtgatagaactggcaaaggaacggatgtccgacaggagagaaaccgtcagcagggtagcctattcactgggatttcaatatccgcagcatttctgccggttgttcaagaagcgtgtgggctgtacaccgaatgaatatcgggcacaaaaccttcttttatagtattctgtcgtaacaagcaatgcaagagactatgttggacttgaggactgtatatgaatgtaaccgctgtctgggttgcaagacattgcatccgcaggtgggcatcatcaatctggagaatccttcattggaagaggatgcggtgaagtttgaattctatgctgtcttgctgattgaggattgtccgggcgattgttgctgctgcggacggaaatactatgattactccaatgctaccatggtgtttctcactcccggcgagatctttcgtatgagtaaggagaatacgttgccggataaaggatatcttttggcatttcatcctgacctgttgttccgcacctcactgaagaatcatattaaaaattatacctttttccattatcgcaaggaagaagcgctgcatctttcgcggcgtgagacagagaaagtgacgtgttgcctctcgaatatagaggatgagttgcatcatcccattgatactcatagcagtattattctttcccggcatatagaacttctgttggattattgcacccggtattacgagcgccagtttattacccgtgagaataagaacaaggctcttttggaaaacatggaacgtttgtttgtggaatatatcgcatccggaaggttgcaaggcggcaagttgcccacacccggctatatggcgggagagcttgatttgtctgtcgcttacttcaatgatctgctgaaatttgaaaccggcaagactttggaggaatatttgcaactgaagcggctggatatagccaggcacatgttgttgcaggacggtcatacgcctgctgctgtggcacggaagttaggctatcctaatgtgcagtgcttcagtgtgcttttcaagaaaataacaggtgtcgcccccagtggttaccggctctcgcagaattgataaccgggttgcagtaccatgtttttgtgatacagttcccttctgtaaaaatggtaattctatctgtaatttatctacaaagaatgaatggggcctggcttatctttgcattgtgaaatgaaagcggctttgtccgcatcggaatgaagcaagacaacagatgaaatcatttaaacaggtagaacgatgtatattgaacaagtaaattctccgcaagacataaaacagttttctgcggaacagttaagacagttggcaggtgaagtccgcaatgcattattgaccaagttaagtgcccacggaggacatgtgggacctaatctgggaatggtggaagctacaatagcattgcactatgtattcaattcaccgacggataagatggtatatgatgtatcccatcaaagttatacacataagatgctgactgggcgtaaggatgctttcctgaatccggaggattatgatgtggtgtccggatacaccaatccccgggaaagcgggcacgattttttcactatcggccatacttccacctctgtcagtctggcttgcggtcttgccaaagccagagatctgaaaggcggacacgagaatatcatagccgtgataggagatggctcgctcagcggcggagaagcttatgaaggtctgagcaatgcgggagaaatgggaaccaaccttattatagtggttaatgataatgaaatgtccattgccgaaaaccacggcgggctctatcagaacctgaaagaactgcgcgacacggagggacggtcgtcctgtaatttcttccgttctctggggttggattatctttatgtgggagaggggaatgatattccgtctttggttgcggcttttgccaaggtgaaagatacatcacgtcccacagtggttcatattcacacacagaaaggaaagggatacgctccggcagaagccgaccgggaggaatttcattgggagatgcctttcgatctggaaacgggtaagccgaaggtggattgcagcggtatggaggattaccatagcctgaccgggaagtttttgttggagaagatgaaggaggaccacacggttgttgccatcagttcgggtactcctactgtgataggttttactcctgaacgccggaaacaggcagggcgtcagtttgtggatgtaggtattgccgaggaacatgccgtggcattggcatcgggtatcgctgccggtggcggacgtccgatgtacggggtttacagtacttttatccagcgttgctatgaccagttgtctcaggatttgtgtatcaatggaaatccggcggtgatcactgtgtttatggggacagtagccggaatgaacgatgtgactcatctgggtttcttcgatattccgcttatcagcaatatcccgaatatggtttatctggctcctacgtgttccgaagagtattttgctatgttggaatgggctgtccgccagacggaatatcccgttgccatccgtgtgccgggagtggcagtggtgcatcgtaaggaagagtttgacacggattatagcgagttaaaccgctacaaaatgacagccaggggagaaactgtcgctattcttgcattgggttctttctatgatttgggacaggctttgaagaataagcttcgggaagagtcgggtgttgaggctactttgattaatccccgttacataacagggcttgacgaaccgatgctggaagagttgaaagtggggcatcgtattgtcgtaacgttggaagacggggtgctggatggaggattcggcgagaagatagcgcgttattatggtaattctgaaatgcgggtgctgaattacggacttcgtaaagaatttgcagaccgctataatctggatgagctgatgaaagccaaccggttgaccgacaagcagatggcggaggatattgccggtatattggaataaccttttacggaatggctgaagtccgagacttcagccatttttgtaatagtgaaatagataagccggattaaaactgtttgttaccataagcatgagaactggaatacttattctttttccagaagcgaataaaacacaggatgataatcgggaagtagttccgggtgaaaagcttttatcatgtcactcagaagaacatcgggtgagaggggaagattctcatacaaaggtatccattccagattgcaataaataaccttcttttctttaaaagcccggaaatcagcatattgtggattggaagcttttaatgcttcataagagaattctcctttataaccattcatcactctccagtagccggcattatatcctttggcgtatacggtttcaaaatccatgagtacacctcctgtttcagtattatccttcataaagtaatcggcccctgcgtcggcgaacaagcgggcatagaaactttgtcctccgggtacataccaggtatctcttctcatttctccactgaatacactgggacgctgttttacattggaaactttggctttcaacaggttatagcgttgttccatttgtgcaaataattggcatgcctcttcctctttaccgataaacatacctgctaccttgatccattcggacagccccaatggtgatgtttccttgaaagcccaataggggaccaaagggatgttcagctctttcatcacttcataccctccccggcggttgggagatacgaaaatgatatcgggttgggatgcaatgatgatttccgtatcaaagtttccttccattcctatctttttcacccgtccgtcttttaatcgggcaagccattccttattctgcatccggcgggtggtacttgtcgctaccactttgtcataagcgttcagaccggtaaaacctgccagttgcggcgtggtcatgcagatcactctgtctgtcggagtcggaataacggtatagccatcgggtatctcggcttttgttcctttagggactaaggcgaaaagttcgggtattgcatggttattgttcggctccgagatggacagaagctttactccatccggacgaacagttatcttgaagcctttggcataacggggggccagggctgtttgtatggtatctgcggaaggtagcccgttttcactcaccgggttgcggcttttatagccgcaacctgccaggcagaaagttgttatgagcagatagacaagtctggttttagaggtcatgctaaaaatagttttattgcttgaaacgaaccagcagactgacatagaaagagcgtcccggtgtcagagttgcataattactgttataaggacggtcatctgtgtaattgaaaatgttttcaactccgacggcgggttccagagcaacagattttaaattgaatgaatggcgtgtgttgatatcccaaagctggtgggcgggggcgttgccgtaagttttagaccagcgtgtaccttgatagcgtccgttgattgcaatattgaatgtataatcattccatgtttttcgccagctggcattgaaattactcgagtgacgtactgttctttccaaacggatgtcttccgtacggttgcgcccgtccgtgtaaatatagtttgctccgaacatgaagcctgtgaagggacggactgaaaaacctatgtcaaagcctttcacacgtgccttttctatattgcggtactggcgtctgcgagtgatgccgttttcaatatcttcgggcgttgttcctatatcttccgcttcgatcttgtctttcaggtcattctgataaatggacgcggcaatggagaacaaacgatgattgtattctatattcaaattatagaaattgctcttttccgggtccaggccagggtctccgaccgtgatttgtccacggctttcagaaacggcatacatttgttgcaaggtaggtgaacggaatccggcagcgtaggatgcacgtacattcagttctgaatattggtacatcaaggatagtttgggcgtgaactggcttttaaacttttcattataggcataccgtatacctgccactacgctgattgcatccagtagttttacttcgtcctgtacgtatgctgccagtgtataaacactttggtattcattattcagcatcttgctggtttcagtcggctccaagccttcgaatacatagtccagtccggtaaaaagtgtattgttcttgtgggttttgaatacaccttttagattggcattggtgtaagtctggtctttactgaggacttcgtcaccggttttatgcgtttttgcatcatttatatagtcataaaaagaacggaaattggtggtgcttatattcccttctatatatgaagcccgcttagccaacagatatttggctgttccacccactgtataggactgatgccggttgttgtaatcgtaggctccggtacggtcgttctcgctgataaaaagattaccgttcaaatgaaggcttaaacgctctgtggctgcgtagctcaaggtttggctcacattatgcgaatgattcttatagaccggtttctttgtggtttccaccagttctcccttgctttcctcatacggattcagttgccatccatccgaagtgcggtaattatagttcaagtgtgcggataattttccatcattggcgtctgcgttgactgattctgaaattcgtccgtgagaacttacacgggtattggaagatacattcaatgcagatttaggatcatcggtaatgatattgattactcctgcgatggcgtcactgccataaagggcggaagatgctccttttaatacttcaatacgttttacggcatccatattgatccggtcgtaatctatagatcccgaaatatctccggctacttttttaccgttaattaatacgaggaggtatttatcaggcagtccgtttacgtatagggttgttcccatagcggtggtttgcaccgagatagagggaaccagtttcaccaaggcatcctggaaactggatggattggcattttgcagatcacgttgggaaatgacctctacgggtacaggactgtctttcagcttgtggtgagttccggttccggttaccactacctgatccatgttgaaagtggtacttttcagccttatcaccatttctttttgactttgactgactttctgagtgacaggagcataattcaggcaactggtacgcagggtatacgttccctctttgatgtctttcaacaaaaattctcctttaggattggtagcacatcctattgtagtttgttccaaacgtacgttagcgccttccaccggctttcctgtacgggcatccactacttttccacttaacgatatctgggcggatgcacacaccaccatgcagccgaataaggctgtcagtaaacatttctttttcatcgaaataatttaagaattaataattagctttcctggccccgggaaagcgtgaattatctatgttcagacctggcaggtttcctggcttcaccctgaaaagcgccttcccatttcttacaaaggaaacagtggcatggcgagagttgcttttcattgacgggtttcacagtagcgggcactgcttcggattctatgaccgaattcccttttatgcaaatacggaaagtacttacatcaccaaatctgatgcaaaggtagggttttattttaaaatcttttgggattctgaaaataaaagaaacattttgtgatgtttgatactgatttataggcttcttaatatataaggaagggacaactaaggacgaatgggcattttctttggcatgataagaggcttgttttcggttttaaatccataactactattaataggtattgactgctattggaaatagttctatctttgcccccgttacgatgaagaagcatttgattcatattctaaagcttttccttccactgatatttattgcctatttgggaggtattaccctttttactcactcgcatgtggtaaatggggtgattatcgtacactcgcatccgtttaaaggggagcatcaacatacagaagtggaattggaaactatctttttcctttcttcttttgctgcttccggtagtttgttcactccgtcttccacaacggtcttttgggtattgctgtgtttgctggctgtgccggctgtagaacgcatcaaactgatacgaaccggttgtggcatttatttgcgcgcgcctcccgctgtttgttaaatagtatatttttatgttggtggagtgattttccgttacattatctgttcgcggattcattcttctgactgctatccttttatttattaataaacagaataacaacacatgaagaaatatatatttttcttgatgggagcagtgtgttttctactctcatcatcggctgtgcacgccaatgaattgaataagtccgatgccaatatcataggtcatgtattggataagaatacggaagagcatctttcttttatcagcgtatcgctgaaaggaactaccatagggactatgactgacgccagtggacactattttcttaaaaatctgcctgaaggagaatttaccatggaggtaagtgctgtcggttacaagacggtcagccggaaagtaactttaagaaaagggaaaactttggaggagaacttcgagatagaagaggatttgatagcattggacggagtggtggtgtctgccaatcgtagtgagaccacccgccgcatggcacctacgttggttaatgtgatggatgtgaaagtgtttgagaacactaattcctccacattgtcgcaaggactgaattttcagcccggagtgcgggtcgagaataattgtcagaactgtggtttccagcaagtacgtatcaatgggttggatggcccttatacgcagatattgattgactcgcgtcctatattcagtgccttggccggtgtatatggattggaacagatacctgccaatatgattgagcgtgtagaggtgatgcgcggaggaggttcggctttgttcggttcttcagccattgcgggaaccattaatataatcaccaaggagcctgtacggaactcagggcagttgacacatactctgacaggcataggcggtacttcttcttgggataataatacgacactgaatgcttcgttagtgactgataatcataaggcaggattgtatatttttggacagaacagagaaagaagcggttatgacaatgatggcgatggctacaccgaattgccaaaactgaaaaatcagacagtcggttttcgttcttttatcaaaacaagtacatattcaaaactgacttttgaatatcatcatctcagtgagttccgtcgtggcgggaataaactgaaccgacctccccatgaagcggatatagccgaacaattgcagcatactatcaatagcgggggagcaaaatttgattatttctctccggatgagaaacagcggctgagtgtatatgcttctgcacagcatacaggacgcgacagttattatggtggaggacaagatgtgaatgcgtatggcgcgaccacggattttacctgggtcacaggatcgcagtatatctatagttttgataaatgtttctttatgcctgccgattttaccggaggactggaatataatcaggataacttgacggatgatatgtgggggtataaccgttataccaaacaagaagtccgtatagccagtgcatttttccagaatgaatggaagaacaagcagtggagctttttacttggagggcgtttggataaacataatatggtggatcatgtaatcttcagtccgcgtgctaatcttcgttacaatccgaccgaaaatatgaacctgcgtgccagctattctttcggattccgtgcacctcaggcctttgatgaagatttgcatatagaaaatgtaggtggaactgtgtctatgattgaactggcaaaagacttgacagaagaaaaatcacaaagtctgagtatatcgggagatttgtatcatcgttggggagattttcagggaaacttgcttatagaaggtttttatacttcgctttcagacgtatttgccttacgtcagaaaggagagcgtgacggtattattatcaatgaacggtataacgagaaaggagctaaggtatatggtttgactttggaaggaaagattgcttaccgttccttacttcaattgcaggccggcgttaccatgcagaaggccgaatacaagcaggcacgtgcatggagtgatgatgaaacggttccgatggagaaaaaaatgttccgtactccgaatacttatggatatttcactttgtcatacaaccctttcgtaccgatgactattgcattatccggtacttataccggtagtatgatggtagaacataaagcaggttttattgataaggacattgctgtgaatacacctgatttctttgaattgaatctgaaagccggttatgatttcaatttgtataaaggcataaccatgcaggtcaatgctggagtacataatatctttaatgcgtatcaaagtgactttgaccggggggcaaaacgtgattccggttacatttatggaccgggtatgccgcgttcttactttgccggagtgaaattgagtttttaatttgtatatattattgccgggagaggagcgctgtccgccctctcccggcaatttgcgtcatagaataaataacctgttataggactttcgaacaggttattttagataataattcttttgatactctttatttagaataattatctaaaataaaatgatttattggatgtaaaatctgctattcctatctttgtgaagaaataaatctgaaatgtgattaatataaagataaatcttctatatagctgtctgttatatggatttatcggaattaataagtaaaaaggtcaaaaaagatgggtattgctgagttgataaataaggaaaagaaaacagcattttctttcgaggttcttccaccgttgaaaggtactggaattgaaaaactatatgctacaatagatacattacgggagtttgatcctctttatgtcaatattaccactcatcgcagcgaatatgtgtatcgcgagttggggggtggtttatatgaacgtaatcgttatcggcggcgtccgggtacggtagcggtggctgcggctatacataataaatatgatattactgttgtaccgcatattttgtgcagtggtttctcgcgtgaagatacggaatatatattgcttgatttgcaattcttaggtattactaatctgttggtactccggggtgacaaggcaaaagatgaatcttcttttgttcccgagaaagatggttatgcccatgctttggagttggaagagcagatcaatgcttttaatgaaggcaaatttattgatggaacgccgattcaggctcctttaactccttttcgttatggggtggcaggctatccggagaagcatgaggaatctcccaacatggaacaagatttatattggttaaaaaagaaagtggaagccggagccgattatgtagtgacacaaatgttttatgataaccgaaaatacgttgactttgtggagcgtgcaagaaaagaggggattaatgttcctatcgtaccgggcatcaaacctttttccaagctatcacaactcagtgttattcctaaaacattcaatgtggatttaccacaggaattggttgtggaagcaatgaaatgcaaggatgataaagaagcgcgtgcattaggcatagagtggtgtatcaatcaatgccgggagctgatagcatatggggttccggggatacatttttatacagtgggtgcggtggataatgtgaaagaggtggcgacagctgtttattgatagtctttaatggaaatgtttctgtcaggtcatttattgctccgtatcttaacggtttaagatgcggagcaaaattattttgtaaatgggttataagtcatcttccaaagctgtgcttttggcataagccgtactctttgcttcaaaaaaatcagtctttaccatattggcattggaatattgagatacccagtgcatgctttccggctctttatggttttcttcgtacagagggccaaaacctaaactactccaacggagattgcctaaatattgaatataatcttctatcattttccggttgagtccctgtatattgtctcctattacatattgtccccattctatttcctgcttgaccccctcacgcatcatgtattcatatatttttactttatcgggagtgaataaatccggtttctctttctttaattccagaataatgttgcggaataaccacagatgcgtgttttcatctcgattgatatatcggatttcttgtgcggaacctgacatttttccattacggctcaagttatagaaaaacatgaatccgctatagaaatagattccttccaatatatagttggcgataagggttttcatcaatgtgaatccatcctgactttcctggaattcgttatagcaattgcctataaaggtatttcttttcagcaggtgtccgtctgtcttccattggtaaaggatctcgttacgcttttcggggctacagatagaatccagcatgtaactgtagctttggctgtgtacacattcctgaaaggcttggatatggaggcatagattaacttcattggctgtgatgtattcgctgatggtgggcagattattgctttgtaaagaatcaaggaacactaaaaaactcaggattttatcataggcggtgcgttctgcctggtccaggtgaggataatccttggtgtcttgggtgagattgatttcttcgggaatccaaaaattattcatggcctgacgataccagtcactaacccatttgtagcgcatattattgaaatcattcaaattggtggtgtttcctccaatcattcttctgtgacggaggtcggtatctccctcaggattgaaaagggcattcttttttaattttattgtattcatgatttattgttgttttatattctgtcttcttgttttactgctaactcaaggctgtatattaaaaataaatttgttattcatttcttgtaggggcgcaagcatggtgcccctacaagaaatgttttagcatgacaattcagtactggagtgtttacgaaaagatcaggaagcacagctttcacattcttctacttccaatgatttgctgcggacataatatactgtttttacgccacattcccatgccagcaaatacaggtttaatacttgtctcagggtaaattcattggtaatgtatagattcagactttgcgcctggtctatatgtaactgccggatccctgcggcacggatactccatgtctgatctgtcagataagcacttttatatatccaataggtcttatcggacaatgccggtgcaacacgtggcagcatggctcctttcttttcttccaagaagaaacgtttcattaccggatctgttccggcagtggttccggcaatgatactggtgctgctggtgggggcaatggcaagaagataggcatttctcattccttgtgtggaaacctttacagccaatgctttccattctggcgaattgtaaccccgttttataaaataagctccggtctgccagtcgctgccttcaaaataatgataggcccctttttcttttgccagttcgctacttgctgctatggcagcatagttgatacgttcgaaaactttatccataaaactgagatgttcctcgctttcccaacgaatgccgcgaacagcaagagcatgatgatagccgctgactcccaagccgatactgcggtagcgatgattggtaatctgagcaaaaggaatcggataaaagttcagttcaatcacattatccaatgcccgtactacagttgccaccttttctttcatttgtttttcatcctccaagggcaaatgtcctaatgaaaggctggcaagattacataccacaaagtctccgggccggattgttttgactaccactgtatcaccatcttccgtacatatctctgtagaaactgtttcaatggaggacatgttttgtgctatttccgtgcaaagattggagcaataaatgattccccggtgcgcattgggattggcacggttcacggtgtcacgattgaatgtaaagggagtacctgtttctacagccgaacgcagtatcagtctgacgatatctttgatgctcatgctgcgcttggagagtcgggagtcatttacgcaatccatgtatctttgttcccattcctctccgtagtagtcttccagacagtatcctttgacggtcattatttcattggggcagaataaatgccattgctggtttaaatcccgtttcgccatacgccagaataagtccggatagcatacggcggggaagatgtcgtgcgctttcatccggtcatctccattattggtccggagttgcagaaactcaggcaagtctttgtgccatacatccagatagacggctacggctccctgacgcatacctaactggtcaacggctacagcagtgtcattcaccagtttcatccatcggattacacctccggccacacctttgaatccgcgtatgtttccacctgcggcacgaactttgccaaagtacattcccattcctcctccaaatttgcttaccatcgcaaaattgtctaagctgcggtaaatgccttccagactatcgggcactgtatcaatgaagcaactggataactggtgataaggttttcgggcatttgccagggtaggagtggccattgtgacttccagacgacttaatatatcatagaacttttttacccattgcagtctgttctgtttttcgggcatagcgagatgaagggcaatccctaaatacatttcctgcacagactctataggttcgtgtgaacgggtacggatcagataacgtttggcaagcagatccagtcctgaataattgaaaagcttgtcacgttcgggacacatgaagccggctgccgtttctatctcctgtggagtataggaggccaagatataattaccatacaagccctcgtcggtgaggtagcgtaatttatcataaaatgaaaagatgccggcagcttccgcctgttcggtcagtttctttgtcaatcggaaattcagcagacgcgctgcaatgaattcccagtcgggagtttcttgtgttgtcagttctacagccgctttgacaagtgccgccaaccgttccccggatgtcatatccggtttacagaaacttgtgaatttctctgcgagaaaggttagactatattccttcccggagaagtctttttgtatctctttcagtatatttgctatagtatcatcaccggttccggtaatgatttgactgaggacttttcttctttctgtgcgctgccaacggtaaagtatatagtttttggcttctgcgtaaaagccatgttccatcaagctacgttccacttcgtcctgaatgcgttctacactacgatttgcttcgttttgatgcagaaattgttccacttcatctactatggtgtagacagcttcatctgttatttctttttgggtactgataaaacttttccgtatggcaacggctattttttccctgtcgtaggattctgttgtcccattccttttaattatttgcatgagatgctgttggtatgaattattgtatattttcgtaccgcttccctaaccccacgagtagaaacggcctttgatgaatggcaggtcttctgactggctcctcatttccgatgccttcccgcgttctcgttatgtggagtcaggcagtggcaataggtacgtatcggaaattttatcggagtttcacagcagcgggactgtccgggatttacacccgattcccttttaatccggatagaggacatctattcggaaccgattcgggaacaaagataatggaaattggaattattacagcattgagttagtttaaaaatcagaaatgatttataaaagttggatggtattaaacattttggacaagttctactaccatgcttccaagcagcacagctactattgttatgagtaaccaattgatatacttgcttttcgatctcgtcttttctttttctgaatgacactgatttttaccatataaccgaatgattccccaatgcgattggcactgcgtatcactcgtgaagtatgtacaccacatcccatcatgtgagcggaatattcagaaataaatccactgacatctatcaaagtttcggctgtcttatccatttaaatgaagttatgtttttctttttttagaatccatagacacgacatggctttccagtggaaggcatttccttgtcaatttcaatctttaatttttttatattcaatatttcttctccttcaagcatcaggcacataataagaaaacaaccgtttttctcacattccatatcgaataaccggtgttgtgaaaacatgcctaacccatgtgagtcaataagaataaactttggatggttataaagtaatgcagccagagagtcccaattaagcttcatgtcaaacataaagaagtctttggttgcatagtcgttggttgccatattgccggtatataaaaccaatgctttaccttctatgtccaagttattaaagtattcgtcggctggtagtccgttccgacaatctaccacgacggcatctgttacatattctttatagcggggagcttccatatagcaatccatgtgggtgccgatgtgtccgagacgttccgtttctttggcatcaagttcgaactgtgccaaatcttcatcacttaactgtaaatgtagttctttggtaatcgtttcttgttggtacatatttaaagaattttaaagtttaacctaatgagagtatcaataattgagccgtaagtacgcgtaggaacatagcaagcggatatacggtggcatatcccacggccggagcgtcacatgaagtcagatcattggaataggcgagggcaggcggattagtatttgctcctgataatacaccaataagggtataatagtttaatttacaggcataacgcccaatgagccccgttatgattaatggtacggtcgtaataatagctccatacataatccaaatatatccaccttcatttacaattgtctctataaaatctttcccggctcccaaccctacacaagctaggaataaggaaatcccgatttctcttatcatcaagttagcactcatcgtggtgtatgtaatcattttatattgaggaccgaaacgactgataagaatggatacaataagcggtccacctgctagaccaagttttactggttgtggaatacctggaaacataaatggaatacttcccaagatacatcctaatgcgatgccgaaaaaaatggggataagattgggatgattcagtctcttcatggagtttcccaaaaccttttcggcatgagtgacagcaagttcactaccaactatagttacacggtcgcccatttgcaactgtaaatgtggggaggctaccaagtctactcctgaacggttgatacgggtgatgctcgcaccgaagttatttcgtatcttaagttgtgagagcatttttccatttaactcaggctttgttatcaaaatgcggcgtgagataagtttcttgtttaactgttcccattccatttctacctgtttgccaaaaaatactgtaatcgcttcaatgtcaatagggttcgagataaccagaatcttgtcatcaatatgtaatatcgtttctgaatttactagttccacttcctgctgtccgtcatgatggcgtatgcgcgaaatgacgaagttgcggtttaccaaaggacgtatttccttaatggtcttcccatgtattgcttcattttttatctctaatgtaacggggcgtacggtcagttcctgtaaatgtcccaatcctttttcggcatcggcttcttcttgtgatgttttgatattaagaatgtatttcagtgcaagcaatgagagaatggcaccaaccacccccaagggataggcaacagcatatcccatcgcaatctccggtgcatctatgccatttaaatcactatttgcctgttgggcggcaccaaggccgggagtattggtaacagcaccagagagaatgccgaccatggtggttatgggagttccggtagtaaaatgtaaaatgatagtaatgactacactgataaaaatagcccccatagccaacatgttcagcgtaaatcctcctttcttaaaggctgagaagaaaccgggacccacctgcaaaccaatggaatagacgaacaaaataagaccgaattcttttagaaaatgtagcaggtgttcattcagattcagattgaaatggccgaatacgataccgacaaaaagaatccatgtgacaccaagtgagatgccggatatttttattttacccagcataattccaaaggcgataactagtgacagaatgagtacggagtgtgctacacctccgccccaaagattgggatatccttcaaagaggtttttaagaagttccatagtattaagaaatatatttatttttaactaagtcatcattttatatttaaaatttcccatcatgtgggttggtaaaagtatccccggaaaaatcacttctgcggggatacacacacattgaacaattacaacggcatattgccgtgctttttaggcggattgctttggtttttgttgtgacacatttccaaagcctgaatgagtttatagcgggtgtcacggggcataatcacttcatcaatcaagccgcgttctgccgcacaataagggttagagaatttatcttcgtaatctttgattatttcttgtttttcttcaggagtggatttccgatagaggatatttacagctcccgcagctcccataacggctatttccgcctgtggataagccaggttcacatcggctcccgtcggtttgctggacatgacaatgtaggcacctccgtaagctttacgggtaattaaagttaccttgggcactgtagcttcggcgtatgcataaactatcttcgcaccgtggcggatgatgccgttgtgttcctgtattgttccgggcaggaagccgggaacatcctcgaaagtgatcagaggaatgttaaagcagtcgcagaaacggataaaacgggcagccttgtcactggcgtcaatgtcaaggacgccggccagccaggcgggctgattggcaacaatacctacggaacgacctcccaggcgaccgaaccccaccaccacatttttagcaaagtgaggcatcacctcgaagaaatactggttatccagcaccggttcgatgatatcctttatatcata

SEQ ID NO: 4048 - DNA, 490 bp, Unknown
  gut microbiota DNA sequence
tcacaccgcttttgctgctgtgggtataggcaccgcccagttcctccttgcccacctcctcgttagtcacagtcttcaccacatccgggccggtgatgaacatgtggctcttctcttttaccataaagataaaatcggttagtgctggtgagtagcaggctcctccggcacaaggacccaagatggcggaaatctgcgggataacacctgaggcgatagtgttctgatagaaaatagaggcatatccggcaaggctgttcaccccttcttggatgcgtgcgcctcccgagtcgttcagggcgataacgggagctcccgtcttcaaagccagttgctgaacctttacaatcttggcagcattggtctcgctcagcgagccgccatgtgcggtaaaatcatatgcatagacaaacaccggacggccgtctatctttccgtaaccggtgaccataccatctccggcaatctgcttcttctccatgccgaagtt

SEQ ID NO: 4049 - DNA, 3282 bp, Unknown
  gut microbiota DNA sequence
taaaaagaaatcttacgaagcgattgtccatacattccgtgccatcaacctggcgaaaaagtggaaggcggatgtggtgcatatccatgccatcgggcctgcgctgttagtgccatacgccaagatgctcggcatgaaggtggtgttcacgcatcacgggcccgactatgaccgtgacaagtggggctttgccgccaaaagtgtgctgaaactgggggagcggttggggtgcaggtttgcagatgatgtaatcgtcatatctgaagtaattcaggatctgattgcccggaagtaccatcggcgtgagagggtacatctgatttacaatggtgtgccgaagcctgaaatttgcgactatcccgaatactttgaagaactgggtattgagaaaggaaagtacatccttggcatgtgtcgttttgtgccggagaaaaacctgcatcacctgatagaagctttcaagaagttggaagctggagattgtaagttagtgctggcgggcgatacggattttgaagatgaatattcactgggattgaaaaagatggcgcaagaggcaggcgtggtgctgacaggattcgtgaagggacataagttgcactcgttgctgacaaatgctcgctgttattgcctgccttcatcgcacgaagggttgcctattgcattattggaggccatgagttatcacttgccggtggtggtgagtaatattcctgccaatctggaggtaggtctttcttctgactgctattttcattgtggagatgtggatgctcttgccgctcgattgcagaaggtgatagacgaggattatcatagtgtgcagtatgacatggctccgtatgattgggacaagattgcaaagcaggtgatgggagtttatgagggtttgttgaaataagaataaaactgatgatgataaagaagttgatttgtgcggcggcattattgatggtagcaggtttgcagcatacgcgggcacaatatgtatatggcaccacggggcttcttcacgcccccagcgcggatatgcagcgcgacaagacttttctgtgcgggttttcctatctgcaagtggcggctaccccgaagcattggaattatgacacgtggaattactacataaacatcaccctctttccgtggctggaagtgggctatacctgtacgctgcacaaaataggattgccccagtatggttattcatataagttccgcaatcaggaccgccagttttccgcccggctgcgtgtatggaaggagggatggtggaaggagtggacaccgcagatagtggtgggggcgaacgatccgtccaccaacgatgtgctgggcgaccccaataaggacgattatggttttacgggtacgtcttcggtgggtaacggacactggaaccgctattacatagttgccaccaagcatttcggggtgaagaatgtgggggagttggggatgcacttcggttatgtctataacaagcggctggattatcaccggaacggacctgtggcgggggtgaattttcagtttgccctgccggctacctctttttggatgaaggctgtgaatgggctgaatgtgatagcggaatacgatagttattcggtgaattgtggtatcgggtataacttttggaaggattatattagtggtgtggtggaactgacccaatgtaagtatcccagtgcagggatggtattcaggatacatctgaaataagggatgatgtatggcaagaaacgacggtctccgtgactaccagcaggagatgaagctccgcctctttgaagagtgggagcttcaccggagtgtgatggtacaaatgcctacaggcacgggaaagacacatctgctggctgcggtggtgaaagagtttctctgtggtggcggtgtcggtatgcgggtgtggatagtggcacaccgcagggagctggtggagcagatagaggaaaccgtagcccggtatggaatgggaaaagaaccggacaagtcggcaaagaacggaaggacggggaaagacagtatgccggaagaatccgggagggtgagggtattttccatccagtggttgtcacgaaaccggaagattatggacggacagccggatttgatcgtcattgacgaggcgcatcatgccctggcggaaacctaccgggagctttggaagagatatccggaggcgaggaaactgggcatgactgctactccctgccggctgaaccgcaagggattcacggatttgtttgataccctgattacctcatggagcattgcggaatttatcgggaggggctggttgtcgtcctttgactatgtgtccatccgtgcgaacagcagggaacagcggctggttgactcgttgaagaagcggagtgcggacggggattatcaggtgaaggaaatgaatgcggtgctgaaccgggagaccggtatccgccaattgtatgagagcgtccgtcgatatgccgccgggaagaaagggatagtctatgccgtgagcatcgcacacgcccgacagattgcggcttattacagcctgcatggcgtggagtctgttgctatcgacagcaggacccccgctctggaacgcaaggaactggtagaggatttcaggcggggaaagatcagcgtgttggtcaatgtggatattttttccgaaggttttgactgtcccgatgtggagttcgtgcagctggcacgtcccacgctttcgttggcgaaatacctgcaacaggtgggccgggggctgcggaagtcggataataaggaatcatgtgtgctgatagataatgtgggattgcaccggatattcggtctgcctgtccgtgactgtgactgggaggcgatgttcgaaggacggatggcgggaaatgctcagccccggacacggatggagaacaacgggctgtctgtgtccgttccgctgccggaggatggcaggcggaatgaagaactggaggtcgtgatgacacacgcccgtctgctggatgctgtccggaacggggacttggttcgtctgggagaggacggtccggccggtggggagcaacggacggccttgaaagcctgtcgtgaccggcagagtggtttgtggggcttgaggtgcgggaacaaaatcaccgtgctccctcaataccgggaagtatttgatctttgtgcggaccgggctgccgtccgttttgaggacggccggacaggggtggtggataagtccggagtcctcatggtggtgacaggctgttgccggagattgagattcctgaagggagaacttctttc

SEQ ID NO: 4050 - DNA, 415 bp, Unknown
  gut microbiota DNA sequence
agtgattcctcaataccgggaagtatttgatatttgtgcaaaccgggctgctgtccgttttaaagatggccggacaggggtggtggataagtccggagtcctcatggtggtgacaggctgttgccggagattgagattcctgaagggagaacttctttctgtcaccaaagaggatgggagtgactgttataccgatttgaagacaaacagaacttatcaggagaggccggtggttttttcatacggcggcatagagttgctgcgggtgggggagactttccatagccgcacgcggaaggcgtatacctctatgcatggtttgcacaaagacagtctttgtttttatggtttctacttgaagataccggattaccgtgttccgaagtcttgccggctagttgatcctgtgtggtct

SEQ ID NO: 4051 - DNA, 1071 bp, Unknown
  gut microbiota DNA sequence
attgtttaactgtaataattagcaggttgttgaaacctgcatctgaagaggaagaataaaatgaaaataacctataagacgcagggcacttgcagcagccacatcgaagtggaagtagaagatgacgttattcaacaagttttcttttggggcggatgcaatggaaacttacaaggtatcagccgattggtgaaaggaatgaaagtggaagaggtcttacagaaactggaaggtgtaaaatgcggaaaccgctccacctcctgcccggatcaattatgtaaagcgttgcgtgaaatgaaacaataaaaaagaagctgtctcatcttgttattcaagtttgagacagcttctctttttttcaatatattatcttacttccggatcattgttccgtttcattttctgttctcttcaaggcccttcaaaggttgatggtctttaccttacccggaatgatggtcagatgcaccgttccatccttttctatctccaccttctgatatctggcctccaccaccacttttccatccagcgccattactccccactggcaggcattcccttcaaaagcacaataaccgcctacgggaacacagatattccggtagcagggaggcacaacgatgcgatctccccatttcagcccccacttcatccccatccggaaaggaaggacatcttttatttcctccagcctcttccgccttttctcttcctcattctgttgccgttcccgctgtacgctctccgcacgccgcccggcttccttcctcagaccttccaccacggaggcaaaatccgcctcgcccgccttaggaacattacaagctatataccgcttcccctttcctttctccacatgataatagtttccttccccgtccatcaccacgatgctccgatccgccaaacaaccacaacaccagtacacctcttcatcatccccttccagcacgcaggcgaagacatcaaatatagtagaccacacaggatcaactagccggcaagacttcggaacacggtaatccggtatcttcaagtagaaaccataaaaacaaagactgtctttgt

SEQ ID NO: 4052 - DNA, 474 bp, Unknown
  gut microbiota DNA sequence
cagactcttcgtaaacaatacaaggagaaaatcagtgattaccggaactgggaccaactcgaacatgcgcatgactacctcctttatcctgaaaacattggagaaaacctttctttggatgaaacttgcctgagcaatggagatgtttatacgattctgaccaataaagcagccaaaggccgtaagggggctttagttgcaatggttcgtggagtggccacagatgcggtaagcggaatcttgcgcaggcttccgcaccggaaacggctgtctgtcaagactgtcactacagatttatcttcagccatgatgctgacggtcagaaaggtgtttcctgccgcaaagctgatcaatgaccgttttcatgtacagcagctcatgtctgaagctgttgaccggttaagaatacgctatcggtggaaagtacttgatgcggaaaatcaggctatcagggagcaccgtcaaaagaagaaa

SEQ ID NO: 4053 - DNA, 399 bp, Unknown
  gut microbiota DNA sequence
ttaaaataacgtgagttcgaaataagaataaatatatttcacttataattagaaacatagcgataaaagtattaaatttatagtgctgaattataacatttaaacgattaccactatgtttccagagtctaaagttacagagatttattgtatggccgatgatttttgcaaggaatttacattgcaacaggaaaaatatatgattaaggatatgaagaccatgcatcgtaacaaacccaaccgtatgagtgatgcagagattatggttattctaatcctgtttcactccggtggtttccgttgtttcaagcattactacaaggagtatgtctgtaaacatctgaaacacctttttcctcgtcaggtttcttataaccgttttgtggaactggagaagaa

SEQ ID NO: 4054 - DNA, 459 bp, Unknown
  gut microbiota DNA sequence
atacaaatacaagggaaattaccacactattctcacttgatgtatgataaataccgaaaagtattctatcggtttgccttaatgccggatgataatataaaaccgttctccaacaatccgcatcaaagtttctccatcatcattctaaacaaagactatgaaattatcggtgaaacaaaatttcccggcaacacctatgcccatcacttgtgcttcgtaggtaaaaaaggcctgtatatttcagagaataatgaaaacaatcctcagtttgacgaaaacaaactggtattcaggtgtttcacacttcaagaccggaaaaaatgaagaaaaagaactactcaatcattctatgtgaaggactgttcctggcaagctgtatgtccaataatgacaaatgccttcaaaaactgtttgatgaagtcggagttgagataacttcctagctatttatagcgagta

SEQ ID NO: 4055 - DNA, 14302 bp, Unknown
  gut microbiota DNA sequence
tttcctcgtacctgcaaatcgcctccttataatcctcggaaatcaatttcggttctttggtagccaggtcataacctaccatcaccgtgcggcactcacacttcacctcatgggtatccgtagtcacggcacgctgcaacaaggtaaaactcttatgccccaaatgtaccacagccgtttctatcaccagatgatccgagaaaaataccggcataaagaagtttgcattgatattggctaccacaatagccagcttgctccagtcggcactgcctaatacatcttttatataagtagtctttgccaaatcgtacaaagaaaagtaaactgaattgttcatatgaccaaactggtccacatcgctgaatcgtatctgcaccggcatagtatgcctgaattttatatcctctgccatagttaagcttattaaaatcgttcaaatataacacttttcccagtaattgaaccctaaatgacagattattcttaattttgctgcgaaataaatgaatatgtaattttaataacaatataaacatggataagaagtatagcagggagaccttatgcgtacaggcaggctggactccgaaaaaaggcgaaccgcgcgttttgcctatttatcaaagtaccacattcaagtatgacaccagcgaacagatggcgcgtctgttcgatctggaagattcgggatatttctatacacgcttgcaaaaccccaccaatgatgccgtcgccgcaaaaatcgcagcattggaaggcggtgtgggtgctatgctgacctcgtccggccaggctgccaacttctatgccattttcaatatctgtcaggcaggcgaccacttcgtatgctcgtctaccatctacggaggtacattcaatctgtttggcgtcacgctgaaaaaactgggcatcgagtgtaccttcattgacgccaatgcatccgaggaggaaatagacaaggctttccgcccgaataccaaagcgttgttcggcgaaaccatctccaatccgagcatcgacgtgctggacatcgaaaagttcgcacgtatcgcacacaaacacggtgtgcctttgattgtggacaacaccttcgccactcccatcaactgccgtccgtttgaatggggagcggatatcgtcacccattccacaaccaaatacatggacggtcatgccaccagtgtaggaggcgccattgtggacagcggcaactttgactgggaagcccatgcggacaaattccccggtctgacccagcccgacgaatcttatcacggactgacttataccaaagcgttcggcaaaatggcttacatgacgaaagcaaccgcccaactgatgcgtgacctcggctccatccagtctccgcaaaatgcgttcctgctgaatctgggattggaaacattgcacctgcgcgtgccccgtcattgcgaaaacgcacagaaagtggctgaatggctggaagccaacccgaaagtgaaatgggtgaactattgcggactgaaaagcagcaaatactatgatctggcacagaaatacatgccaaacggctcgtgcggtgtcatcgctttcggcttgaacggaacccgtgaggaagcgatagaatttatggacaggctgaaattcatctgcatcgtaacccatgtggccgacgcacgtacctgcgtactgcatcccgccagccatactcaccgccagctcaccgacgagcagttgcgcgaagcaggagtcgctccggacctgatccgtttgtcggtaggtattgagaatgtaagcgacatcattgccgatattgaacaagctttacaataaggcgaagcggatgaaaagaatcattatcattggcgccacttccggcatcggactggaagtggcgcgatgctatctgaaagccggctggcaggtaggcgtggcaggacgtagagaggaagaactggaaaagctccggcagtccgctcccggacaggtatgtacccagcggatagatgtcacccgcgaggatgcccctgccttattggagcaactgattatgaaaaccggcagcatggatgtgttcctgctcagttcgggcataggcaaacaaaatctttcactctgccccgatatagaattacagaccgcagccaccaatgtttcgggattcatacgaatggtcaatgccgcctatcactatttcgaacagcaaggcaaaggacatatagcggtgatcagttccatagcaggcaccaagggactgggatccgcccctgcctattcagcgaccaaacggtttcaaaacacctatctggatgctttggaccaattggcgcacatgaacaagctacacatttccttcaccgacatccgtcccggatttgtcgccacccctctgttgaaagatgacaaatacccgctgctgatgcatgctccctacgtggcatcacaaattgtaagagccatctcccgaaggaaaagagtagctgtcatagaccggcgttatcagatgctggtgtttttctggaaactgattcccggatggctatgggtgaggctgcctgtgcggaaccaataaagcacttagctcccaagctgaggcattgcctgactaaccttattcgaactaaattcatatttttacctgaacgtcttttcattatctcaaacttatcactacttttgtaattggattttaggattatttttcataataaaatgtcgaattgttcttaagaagaaccagcaactaagacatcattaaaagaacaaacattaaacatcaaacaaatataagattctatctgacaccaagcattcaattatcaaatcgctaaaatccgaacagagaaaagataaaaattatgatacgagatattataaatcaaaatgaagaagcgcaacctactgacagaacgttaggattgctacaccgggactttccgcaatgtttcaatgcagaaggcaaatttgatatagctgcttttcgtgagctactaactgacaaagtagaccttataaaggaaggtagcggctttaactttcttggcaagaactatgccagtctgttggcctcgatggatacgactaccgtattagtgcccgatctggaacataacagcaagccggagaatataaatagtcagaatgtgtatatcagcggcgacaatcttgacgcgctgaagcatctggtaaagtcgtatgccggtagagtgaaatgcatttatatagatccaccctataatacaggtactgacggatttgtatataatgacaaattcaactttacagtggaagaattgcaagagaaattgagcatcggtgaggaacaagcaaaccgtattcttgcaatgacaacccgtggtgctgcttcgcactcagcatggcttaccttcatgatgccccgtctgcaatacgctaaagacttgctctctgacgatggagtgatttttatctctatcgacgataatgagcaggctaacttgaagttgctgtgcgaccatgtgtttggagaggaaaattttgtggctctattcccatggcggaaaagaacggcaaagtcagatgttccattcggagtatcaaaagattacgaatggatagtatcatacgccagaacagattcttttttggctggtatcgatggaaagggaagaaaatattacgaaacagaagattttcccggacaaccttggagagtgcatgatttgacaaagcagactactgcatcggaacgccccaacagttttttcacaataaggaaccctcaaaacggtaaagaatatccagcaaacccgaaacgtacttggtgcattacacaggacacatttgattcttattatgcacaaaaaagaatcgtattccccggtgattacgatttcctaaaaatagataagcccgtgctccgctattggaaagacaatgatatgcaaaaggctggtgaccgcttcggacaatatgccgtcagcactcatcttccatcccatatcggcatgagccaagacggaacaaaggatttagacgagcttttcaatgccaagattttcagttttccaaaacctgtaagtctcataaaacaccttatagatggagctgtagaaaaggacaaagatgaaccgatcatcatactcgactttttctccggctcgggcaccaccgcacaagccgtaatggaactaaacagtgtggaagatggttataacttacagtacatccttgtacaattgcccgaaaaaataaaaccaaacacagaggcatacaaagagaagtataagactatcgaccaaatcggccaagagcgtatccgccgtgcagcagccaagataaagtcggaaaaccatgccgatatagattatggcttcaagcactacacactccaggagccggacgaaaacacgcttgaccgcatggaaaagtttgttccgactgatgcttttggcaatgatttagtgaaagctttcggtaaagaaacggttcttgccacatacgccgtgcgcgacggttacggactgacaccgaaaatagaaccggtaaagtttggcaactatacagcttggctctgcggcaaacatctctatatgatagaccaagggtttgatatactgggagatgatttgacagagctggttgataaatacaacaaagaccattcgttcacagccgataccgtcgttatcttcggttatagttttaacttcggccagacggacgccataaagaaaaatttgggtgccatcaccgaccgcagccgcataaatatagatattcgctactaaaaccacctgcaaattatggaactgaaattagaaagcggattgccgcaccaggagtatgcggtagaagccatcagcgaggtgttcaagcaggtggagataaatcaacaggtggcacattactcaaaccctgttatagaccttcgttcaaaccgttttattggaaatatataccgcatacagcaaagggagcggcagaatgtggcggaaaaatacagaaacgagcagccggtgggcaacaccttgtgtctggacatcaagatggaaacaggcacaggcaagacatacgtatatacacacaccatctttgaactgcacaaacgttatggcataaacaagttcatcattgccgttccaagcattgccatcaaagccggcacaagcacttttctgaacgaaacgtatgtcaaagcacattttaaaaacacgttgggctatgatgcggagataaacgtgggtgtgctggaagctgtgaaaaaacagaagaaaggcaggaaatattttcctaccgcagtgcgtgccttcgtggaaggatcaagactgaacagaaacaagatatatgtgctgatagtgaacagtgctttgctcactaccggcaagatgctcacacgcaatgactatgatgtgactatcgaaggatacgaccggccgtttgacgcactgcgttccacacgtccattcgtaatcattgacgagcctcacactttctcgcgtgaccagaaggcatataaagccatcatcagcgaactgactccgcaatgcatcatccgctttggtgcaaccttcccgatgactaccataggcaaagggaaaaagaaaacaacagtacgcgattatgagcatctgctctatgaccttaatgcacaacgttcattctcttcgggactcatcaaaggggtaatgaaagagcactttgaacccacttcaaccatcaacgagaaggtaaagatattggatatcaatgacaaaaaagcgactttccaacatatcactcaaacctccaaggccagtcatgtattgagtgtcggagattcgttgtcaatcctaagtcccgaactcacggggctcaccattacaggtatcacaaaagatttggttatactcagcaacggcatggagaagcacaaaaaagacgagtttgatgtggacatatacacatcgtcctatcaggaaagcatgctccgccttgccatacaacgtcattttgaaacagaacgtgacaatttccatagagaaaaaggcagaattaagacactggctttattctttatagacgacatactctctttccgcggagatgatgagggcaacaatgcctggctgagagatttgttcgacaggctgcttgaagcacaattgaaaacagaacttcaaaaagaaaattcgcccggatatgcaacatacttgcgtgcaagcctcaatgatcttgccgcttgcagggccggctacttcgcacaagacaacagtgacccggacgatgcagtgaagaaggaagtggatgacatattgcacaacaaaactgaactgttgtcgttcgtaaacaagaaaggacaacccaatacacgccgtttcctcttctcgaagtggacattaaaagaaggctgggataacccgaatgtatttacaatagccaaattgcgcagcagtggcagcgaaaacagcaaactacaggaagtgggacgaggattgcgcctgcctgtggatgaatatggcaaccgggtaaaagacgaatcgttctacctgaactacatcgtagactttactgaacgcgactttgcagaccgtttggtgatggagataaatgaggatatacagacgggtagtatcacacacatatcccttgaagatatgcgaagagttgcagcactgcgtggaacgggagaaatggatctgttcatggaattgtatcagaaaaaatatgttcttgacttggatcgcacacttgacccaacaaaggtgatggacttgtttaccgaatatcctgagtttaacaatgttacaggtaaggtaaaagaccgcaacaaaggtacaaaggatgtggtgaaaatacgcaaagcccgctatgaagaactaaaagaactgtgggcgcaactcaaccgtaaatacattgtattttaccaaaacgacattgaccagcagattagagcagcattacccggtattttaataaatgatgtttttatacaccaatccatacaaagcctgcgccagcaagtgacaacggccgatggtcaagttgtgacgatgcagcaggctggccagcaatacattctggcaggtaaagagatgcactataacgagttcctgaagcgtgcatgccgacagacaagcataccgatgactatgctgcattccgccatttgtgaatatgccagaacgcacccgatggatggatatatcaatgaatcatcactgagcgcatttatcgccaagttcaacggatggaagataaagaacttgcaaaacctggtgaaatatcgtcaggcaaactattcgtcaaaatcaacagcctttacctatgccgacggttcgctgaaggaagaggtgttgcagtggacgataggcaaaaatgtactaaacgcagaaccttcaaaaaagtatctgtatgacaaagtggtatacgactcaccactggaaaaggagaatatcatgaatgaagtcgaccatgtaatagtgtatggcaaaattccacaaaagagtatctgtattcccaacattaccaacgacctttacagccccgacttcatctatgtggtgcaacgtgccgatggcaaaaaagagctgaacattgttattgaaactaaagatataccaaatgatgaagccaagagaacagtcgaagacgcgaagataaataatgcagagcggttcttccaacagttaaagattgatggatatgaagtaaaattctgccgccaattgcagaacaagaaaatggcaaacattatcagcgagttattagaagaagacgcttcgaaccctgtataaacgaacagagatacggtatatgccctgacacctgccaacaagggtcagggcatttgatttattattgtgacagacagccccataccatgaggagaaaaatacctcctccccgcattaataacataaaaaaaacggttcctctttgtaacaactttcccgcttcccccgtctatctgattgaaagcgctttcaaaaacaaattcagttatgaacaaaaacaaaataaaaccatgaaaaagtttgtatttactctattgctagtcttcgtctgccatctgggctacgcccaaagcatcaacggtcttttcaatgaattcggcagcgaaaaaaatgccgattgtgtcaaagtatcttctttcatgatgtctcttggaaaaatgttcgccggacacgatgaagacgctgagataataagaaaaataaagtcaataaaagtactggacctggaatcttgtacggcaagcgtaaaagaacggttcagtaaaaaagtgaacaggctgagcctgaagggatacgatgagctgatgcgtgtaaacgatgaaggcgagaaagtccgcgtgctgatgaaaaccaaaaaggaaactatccgcgaactgctattcgtatgcacgggaaaagaggattgtacactggtacagataaacggaaaattcacaaaggaagatatagacaaattagtaaatcaggaaacaaagaagaagcatggacgccgctgagtttaaacaacaattcctgccttaccaccgcaaactctaccggacagccttccggctgacagaaaaccctcaggaggcggaagatatggtgcaggaggcgtatctgaaattgtggaacaagcgcgatgagctggcgggcgtgctgaacaccgaagcctactgcgtcacccttgtcaagaacctgtgctacgacgccctccgcaggagccggcccgatgaagacggacatgcacccgaagagctgaacctccctacggacaccaacatagcgcgggaagtggaacaacgggatgaggtgaaccaggtacgccggctcatcggcagactgccagagcaacaaaagcgggtgattctgctccgtgatgtcaatgactgctcctttgaggagatagagcaagccacaggactgaatgccatcaacatacgtgtgttgctgagccgcgcccgcaaaaagatacgtgaacaatataatgcaataatgaactatgaaagtaaatgaaatagaaagactattgacccggtattacgatggagaaaccagcgaaaccgaagaaaaggaactgaaacgcttttttaccgaagaggacgttccggctcatttacttgccgagaaggaaatcttcatgcaactggcagcacagcccgctcccgaaataccggaaggactggaaagcaggctgagccgcaagatagaccaatgggacacaggcgaaagacgcacgctgaaaataaaaaaacatacacgggtcctccgcttgcaatggatagggagcatagccgccagcctgctcatcctgctctccgtaggactgtacctatacaagccctatccggcaccgcaagatacctgcgccacccccgaagaagcatacgtacaggcccagaaggcacttatcatgctttccagcagcctgaataaaggaatagaaaaagtggaatcggtgcaggaagccaccggaaaaattcaagagaacgtaaacgaacaattaaaccgattaaataacataaaacaatgaaacgtacatatatcattaccttattgctctctctgtgctcactgttcacctacgcacaggacagttttttcgacaagttcgctgatatggacggggtaacctctgtctatatctcaaaagccatgctcagcctgatgcccgacatgaaaacggaaggggtaaatataggcgaagtagcctccaaactggataacatccagattctaagttgtgaaaaacccgacattatcgccaagctgaaaaaagagacagctttcatcagtcccaagaacggctacgaggaactgatgcgcataaacgatgaaggcgaaaagaccatcatttatctgaaacggaacaaaaacaaagaaaaggaatttgtattgatgagtcaggaaaaaaatgaatttaccatcatcgccatcacaggaaatctgaccctgcaagagatacaaggcatcatcaacaaggagtaactccacacatcccccaccataaggccttttctcccgcctgctaaggtctgaagaaaggatatatactatctccatagcactatggagttatctccaaagcttgcggagttaactccaaaggctatggagataactccgcaggctttggagatagtaaccggacggtcggaaaggcttaacaatagggctgcgaatgcttacgttatctccggaaaagggttatccgcccgtagaagccccgccaatgaaggaacttatttctttatccgtttttgggtaggcaaagtaaactcatgcgcttcggtcaccgccccgttgctctctgttgcaaaaacacggaattgcgcctggcctgttttcaacttcctgcctccacgaatggtggccgtgtaccttatctgattcccgacaggcatataggcaatctgagccgaaggtgaaatcaaaatatgtttcatgccgctcatttcctctattaccggagtaacattgtaagcgggcacatcaccatcattcaccacatcgaacaccagtttgctgtcttcttccgcatcaataacatggttacggttatcatcgataaaacgcaggttgataatcctcaatcccgatgaaggctcataagaggaagtgtgctcatactgcgaagaagaaggataagtctttacgtaatactcctccacctgataagtttcctcccgaggtgtagttatggcatttcccacagcagcccccgttacagttcccagcagggcgccgaattgcgaaccgttgtatccgccggccctgtcacccacaatagcgcctaatactccgccgatggccgcaccggcttgtactgccgccggattgccttgcattccggatggtgagcaagccgaaagcaaagcggtcggaatgcataaaatgaatatcatttttctcataccccaagtagtttataatctttatcagacagacaaatatactttttcctattgacaatgggttcatcggctatgttaaaatttcatttcctgtcatgcatcctcatcggtctaaccgccatcattctggatggaaggctcttcttcctaaaatgaaaagataagtctaaataacacaagaaacagaaggagacgttttttttttctatatatttgccggaaaacaaatgaaaagttcttcgccatacccttgcatcgccgcagaaggcttcccctctccgctgcaaaaccgcgcccggtatggcaaggaaatatttataacctatcattatggaattgaaagcaaaatacgaacagcgcattgaacaggctgaggcagaactccgccaggtaaaaaataagattctccgcatcagcacgctgagggtcttgttatttgcagcagggattataggaacaatctacttctatcaggcagggacacccactatatgtctaaccatagcggtcactttcgttccttttctggcattggtgaagtatcacaaccggttgtttttccgcaaagactggctggaaacctgcatacgggtgaatagtgacgagctttccgcactggcggacaactatgagccatttgaggacggaaaggaattcacaaacccggcccacaggtattcttttgacctggacttgttcggaaggcactccttgttccaggccttgaaccgtacctgcacttcattcggaaaggaaaaactggcagaatggttgcaaaatcatctggagataaaggaagagataatccaacggcaggaggcgacaaaggaactggctgcttattccgatttccgggaaacattccggatcaccggcctgctctacaaaggggcgacaagcgaccgcgaagaaattaaagagtggacggaagcacctgcctatttcagcaagaaatggtggagccgcccgttattgggaatcgttcccggagtcaacatcgtactggctatgctgggagtggcgggggtcattccgatgacatggttcggactggccttcggactgttcgtgataggtagtttcggactgataaagcctgtcagcaacctgcaaagagtgtatgacaagaaattacgtatcctgtctatctacgccgaactgatcagcctgatagaaaaccgggaaatgaacgctccgctactcagacacctgaaagctgaattcggcatgaacgggaaatccaccacccatatcttgaaagagctttcacgggaactggacaaactggacttgcgcaacaaccaactgctatatgtcttgctggaaggttccatgttctggcaactccggcaggtaatgcgcattgagcaatggaggcacaaatatggaaaatatctgctccactggctggacgtattgggtgacattgatgctctttgttctctggcgacatttgccggcaaccatcccgcatacacctatccgaccattgccggcaagccttttgtattccttgcaaaggatatgggacatcccctgatgcctgcacggcaatgtgtgaccaatgatgccgatatcccctcaagaccgttctttgtcatcatcacaggagccaacatggcaggaaaaagtacttatctgcgtacaatcggagtgaattatgtattggcatgtaccggctgccccgtatgctgttcctcccttgaaatatatcctgccaaactagtgacaagcttgcggacttccgattcgttgacagacaacgaatcttacttctttgccgaactaaaacgattgaaacaaattatagaccgcctgaataagggagaggagttgttcatcattctggatgagattttaaaaggaaccaactcgatggacaagcagaaaggctcattcgccctggtacgccaactgatggaactgaagacgaatggcatcattgccacacacgacctgctattagggaaactaatagaatatttccccaaagagatacggaattattgctttgaagctgatattaccaacgatgaactgactttttcatacaaactccgtgaaggtatcgcacaaaatatgaatgcctgcttcctgatgaaaaagatggggctaatcatcaacgactaaccccacccgacaatttatcacattaacgtcttaagcaaataaagcagaccttcacaggcacaccttatttcataacataaagagtcatagaaaatcaaaattcacttgtttccaagcaatgtacaaacgcacttgcatcatctcccgtgaaataaaacacagaagatgcaggttcgtatgtataggggatgaaacggaacagctgggccgcaacgaatttcttgtcctgagaaatcatatagtccatacgtacgtttccgtttgtctttactttcacgtcattcctggtttcaaaaccttttttctccaacgcatccgtcaaagcctgtaaatcgcatacatcaaagaagcaggtcccttctttagctacgctgccggtaggtgcatatacccattccttgcctcgccagaaaaagcggaatacggcccacagaaacaaaatggttccaccggccataagcaccatgctcatggtggatgaggaatcccccatctttaaagaggttgcaaatgcacccgcacctatcacacaaaggatagcggatatgataatagaagaaacactagtacgttttacgacatcagggtgtgttgttgaaaacaaggttgcttcagtagaaactgtattactcataataatttaaattttattctttactaattaaaaatacaataattcataccaaggtcacatctcgccaatcacccagcaagacagaaccatgaaaaacaaattggtaaaagaataaaagctaaataagaatgcgcctcataccaaagatatagtgctcgcaagcactatcccagggaagggaatgggaagaggcatacacatgggtatgacagcttgcaagactggccatccgggcggccatcttacgcaacaaaattttgataaattgggtagtctccatggaggaaaaacggtacatgcgctctgcagaggcactgacacgatgtgctaaagtatgagcgtccccaaactccatatctgctattcccttattgctatccaagggaatgacacgatcttcattgatggagtgctgcggagtagtatccgtatgctgtacagtacataccgtcattgatgcagctggaactgcatctacatattctgttccggcaaaagccaaggcaaacagaaaaaataatatgactgtaacaaatcctttcattgcttactgtttggtttacaaagataacataaatagcgttttaggtttcatttcatacaataattaacacatatcaaaggtattttgttttaagggagctatgaaggattatcgtaagcgtctccgcgattctatatagtatatt

SEQ ID NO: 4056 - DNA, 197 bp, Unknown
  gut microbiota DNA sequence
agggacattcattaaatattacaaaatcagccaactaattcatacacaaagtattgcgaattagttggcttttttgtatctttaggtattcccccgaaaataagatttgacggccaaaacgggggaaatatccaaactaataagatatggcaaagatagtgaatatttcagaaattcaccctactttgggttttaca

SEQ ID NO: 4057 - DNA, 263 bp, Unknown
  gut microbiota DNA sequence
gccatccttccggatgtgcttatagacaactttgatattgtcaatttcgacaagagtgctgaccgttttgatatttatcttgatgaaaaaaaagttcagctaaaagaagataagaccaacccggatatcatatcctatggttttggtgagtaccgtacaatccaagactatcctattcgtggtcgcgccacttatctccatgtccgtaaacgtaaatggcttgacaagtcttccaatgaaatcttcagctatgactgggattt

SEQ ID NO: 4058 - DNA, 189 bp, Unknown
  gut microbiota DNA sequence
tgcttctgcttactatctgtggcagggtttctccgttctccattctttcaggctcccatttccctattctctccctttccgccttactctttgcttctttcttcttttgacggtgctccctgatagcctgattttccgcatcaagtactttccaccgatagcgtattcttaaccggtcaacagcttcag

SEQ ID NO: 4059 - DNA, 554 bp, Unknown
  gut microbiota DNA sequence
tgtcgtatctgtgcggaagacacggagaacaacttcatgccttcgccgggtatcatcaaacagctgacggagcctaacggcatcggcgtacgtattgacagctacgtgtacgaagggtacgagattcctgtcttttacgacccgatgataggcaagttgatcgtgtgggctacaactcgccagtatgccatagagcgtatgcgccgtgtgctttacgagtacaagattacgggcttgaagaccaacctcagttatctgaaacgcatcatgcatacccccgactttgtgaagggtgagtataataccttatttatacagaagaactcccgtatgctgctccgtggcaacggcaacaatgaggagattgaaaacatggccatgatcgcctcttatattgactatctgatgaatctggaagagaacaagagtccccagctgtctgatgcccgtcccatcagccgttggcgtgagttcggcttgcagaaaggagtattgagaatctgattcttcatttaattaagcaaaagtatggaaatacatattggagaccgcgt

SEQ ID NO: 4060 - DNA, 292 bp, Unknown
  gut microbiota DNA sequence
aagatatccacattgaccagcactttcaccttcccccgtctgaaatcctccaccagttcccggcgttccgaagccggagtcctgctgtcgatagccacagcctccagtccgtgtgcgctataacaagccgctatccggcgggcatgggcgatgctgacagcatatacgattcctttctttccgcgggcatatcgttccacgctctcatacagccggccgatacttgtctcccggttcagcacctcgttcatctcctttacctggtagtccccgtccgcaccccgtttcttca

SEQ ID NO: 4061 - DNA, 669 bp, Unknown
  gut microbiota DNA sequence
atcctatataagatatgacgagaatatgcttacctgaaggaacttccaaagaataattaccgtcaaagtcggtaatcgtacccaccgttgtacctttcaccagtacggatacaccaattaacggctcccctgtgtcatctatgattttacctgtaacagtacgtccttgctggacagactgaaccaattcaccggcaacagggtcacttgcatttgcataagaaaatgcagacggcatacataatgctgccgataaccctaaaataatgggagtacgtctgatattactttcccaattttgtttcggactttttttcatgctttttatttctattataatagtcaacaaaagtttattttatcatatctatttaaatgacgcatgtaaaaagcccctgtacccaagcttaatcataaaaatacgttaaaaaaaagtacgtttcctttcatttggtgtttatttttaactgaatcacaaacttaaatttataaatacctgattttagccgataagattctaatacaggtagccccacgaattatctccctccaactcccattcgtgcacaatttatatctaccgtagtgttactgtgaggcttcaattcaaagccatgctccgattatttataagatctactgattataagcaatctcaatcggttattt

SEQ ID NO: 4062 - DNA, 288 bp, Unknown
  gut microbiota DNA sequence
acgctccctttaaacccaataaatccggataacgctcggatcctccgtattaccgcggctgctggcacggagttagccgatccttattcatataatacatacaaaacagtatacatactgcactttattcttatataaaagaagtttacgacccatagagccttcatccttcacgctacttggctggttcaggctaccgcccattgaccaatattcctcactgctgcctcccgtaggagtttggaccgtgtctcagttccaatgtgggggaccttcctctcagaaccc

SEQ ID NO: 4063 - DNA, 198 bp, Unknown
  gut microbiota DNA sequence
ggtattaatctttctttcgaaaggctatccccgagtaaagggcaggttggatacgtgttactcacccgtgcgccggtcgccagcaaagaaagcaagctttcttcctgatgcccctcgacttgcatgtgttaagcctgtagctagcgttcatcctgagccaggatcaaactcttcattgtaaaagtattgttatatatc

SEQ ID NO: 4064 - DNA, 23950 bp, Unknown
  gut microbiota DNA sequence
agaaataaaatggtacaataatttgtcctgttacttggtggaatgaatattttttcgatcttccttgtttgtcggataaagcagatttgtgtaaaaaacttagaaataagtaagaaggataatatggtgtaaaagcagtccggcatatggatgaatatctgtgccagactgcttttttatattgcggcggaagaaatggaacttttgataaacctttcggacacacgcttgtttatgataagttcatgtttttgacatgagtgacataaatctattgcaaagactaatgaaagaaaatagacctccttttttgccgttttcgcaatcttgctttaattattttaaagtaaggggctttattggattttcggaattgtgtatcagaacatttcatcctgattcacaaagatatatatgtccctatttgcccgatgcgcatattttggagttccggcttccggcagcgactatagagtgtgttatcaataaacaaggtatatgcattgaggctatcatgtttaccgattagtaagtgcttaatcttcctttttcatttcttaataattaagccaaagcttgaatgaagaaagtttttcttcactgatggtgatttgggctttgtaaggaggaaggacactgactactatcttgccattaaaataaggttcggcatggtctatggaagcaatgctgataataatctgacggttggcgcgaaagaactgttctgggtccaactgttccattaatttattcagagacaggtcgattatgtgttcttgtcctttttgggtgacggcaaaagttattttattttcagaatagaaataggctatgtccgttacttgaagagaccagaaacggtcggctccataaataaggaagcgtgtacggtaacgtctttctttatgttgcagggtatccagcaatgtatccagatattcttgggggcgggagattcctttgttttgtaaagtttcgtatttgatgatggcatcgagcagacgtgtttcgtcgatgggtttcagtatataatctatgctatttactgtaaatgcgcggatggcatattggtcgtaggcagttgtaaaaataattatagaggaaggatgcacggccgaaaggaaatcgaatgcgtttccatctgccaattggatatcgaggaagatcaggtcgggttgtggattatctttaaaccaagccacagcttcgtccacactgcccggtataatggtcagtgtccattgcgggcgcagacgggtaatcatggaatgtaataaacgtgctgctggcacttcatcttctataatgattgcgtttagtttattcatatgctaaaggtacttttacggtaaacaaattgtttgctttagtgacaatgattccttcgccgagcagtagtttgcaacggttggaaagattattcaatcctactcccgaagaggtgtcattactctttttaggttggatagggttacttactgtcaggaaataattttcaatttctatattaatttgcataggcttgtttgaggtgatggaattatgcttgatgacattttctaccagcagttgcaaagttagtggcgggagcatggcttcaggatagtcttcgggaagatgacatttgtaactgatgcaatttcctaatcggacttcgtgaagaaagaggtaggatttcataaattccaattcttcgcttaaaggtaccaagactttatcttgactttgaaggacatagcggtaaacgctggacagatgcttagtgaagcggactgcattggcgggattgtattctatttctgcaatcagcgtgttaagactgttgaacagaaagtgtggattgagttggttttgcagggcggtgtaacgggctgtgttattttctttttgaagttcggcagcttcttgttgcagttttaatgtgttctgaatagaacggttagataaaagtagtcctacaataactaactccaccaaccataccagaaagaggatgcgccagccgccatttgggaaaataaatatgttgtaggaacctaccagaagttttccgacaatcaataaactataattcaaaagaaagaacagaagagttacggctatataaatggtaataattttccaacgtttgcggatattcaatgcatattgactgtttagccaggaactgagccgcaacgttgagtagccaagaatattgaaggctgtgatgaagaagataaaagcacctttggaaaatagcatatctgccacatggggtgacaaatcggaataattggctagaagaagataggaaaatgctcctagtccggagaataaaaggccatataatgtaacattccatttcatgtgaacaaagctacaatattttacagaataatcatagactggagaggtgttaaattaatattttccattcactataggtacggataaattccgttccttggtgaatggaagaatatgcttttcatgatggttggttttatctaatatttgtttaaagctttcagcaatgcggaatagtgtccttgtgcagaaactttggcttgtacatagttggtttgtgaaatctgccgatagttttgtgcctctatcatttccactattgatactttcccttctgtatatctttccaatgccatttgttcgtttttgcgggctttttccaatgagtttctagttaattgtacttgttccattgcttgagacaaggatacacgggctgtctgcacttccagatttacatggtcacttacttggtgcagattatcagtcgcggcaccgatctggaaagaggctgcccgtttttcgttgcgtcgttttccccattcaaaaataggtacagataacttagcataaacggcatagttgggatcaaggtcggatttaaagttatatcctggtgaagagtaacttccttctatgccgacatacagttgcggtttatattttgagtcagtcagtttctttgagctttcggctatgcctatttggtcgtatgctatttttagttccggtcggttagaaccgtcttgcttccataactgctcattcattacgatggaaggaatggtatcttccacttccgttatttcatgaagtgccgtgccaatcagtgaattaagtgccattcttcctgtttccaaactgctttttgcttggagtaattggtattcggcttcatttagttttacttctgccataagcaagtcttgcgggtcaactagtcctgcttcgactcgctcacggatagttttggtgagtgaggcgatagagtttcgatagtcggtagcaacttgcagaagttcggcacgggctacggtattccagtattgcatatcggtttggtagcacagggcggaacgaaagtattccgcctgatgtgctgccagactatgttgatgttttgccatccggatggtttccagtagacgcccgcctgtatagaccggctgtaacagggtaagtgaggcaccatatttcatgtccttgccttcgaacgtcagtgggttttgcatactgggcaagtccagagtgagctggatggggttgccggtatattgaaagttggcgtcacccgaaagtttgggacgcaaatcttttcgggcggctttttccagttcgatacttgcagagatgtgtttatccgccgccttcaggtcgtggttgtattccacagccatcgacctgtacttttccaataaatcactttgttgggagaaagtagcggacggaacactaaaaataaagataaacagtatattaattcttttcataggatgcatatttagaattactcttaattttataaaacatggcatataatgccggggttacgaataacgttagcaatgtggcaaacgtcagtccgaaaataatagtggctgccataccgccgaatgctatatcgaacaacaacggaaccattcctaaaatagtagtggtcgctgccataagtacaggtcttgttcttgacactgtagcttctatgatggcggtataaggtgcgattccatttcggcgctgtatatttatttcatccagtaacacaatcacatttttaataatcatacctaataatcccagccatccggcgatggggaagaagccgaaatcgaatccggtgagcagcatacctatggcaaccccgataagggaaaggggaaggatacacaggataatgaccggttgtctgaagttaccgaataatgctacaagaattacaatgagcatcagaaaagccaaaggaaagaacttggcaatggcctgcatcgcttcgccttggtctttgtattgggcatcccagaagaaggtatatccttcgggcaattctatttcttctatctcttttcgtatttctccgtgtacttccgccatggtgtgtcccggttttactccacacatggctgccatggataactgacggttataagtacgtatttgcggaaattcccaagtggtttcaattttttccgttacttgtgacagaggtgccgaatgctccccgttccaaacagagaaatcccctaaagatcgttcgtctgtaatatgaaccccttccgattttagtaatacaggtactttcttttcattatcccgataaattcctacaggagttccatcactgatagacttgacggattgcatcatttgtgttttggtgatacccagtgctccggcttttaccggatcgtaaacagggcggatcattaaactcatgttgccccattcgttgcgggcgtccgctactttgggattgcggcgcatgatttctattgctttccctgccagtgaatctagtacagcaggatccggtcctagaaaacgggcttcgatgacggcttctgtcaaagggctaagctcgaatttgttcacttttatcaggggttcgggatatttctggcgaatggagtcttgcagtagcgcatgtaattcctttgaatctttggaggtcttgcattttaccagtatttgtgcataattggattgaggaccgaaagatacattggataaataatagcgggggggcgtgcgacctatgtaggtagaaaccatttctgtttcttcgtgtccgcgtatatagtctgccagactgcttgccatgcggtctgtttcgttaatgtttgttccttcgggcagccacatatctacggtaaagtattgtttttccagtgcgggtacgaatactttaggaataaatttgaaactccaggcagagagtatcagcataatggccagtgagccgatggtgaccgaccggtggcggagcacccaatgtaaagcattgcggaaacggttgtaatattttccgtcaaacagtgccgctttcagttcctcgggacgtgggcggcggacaaattcctgtataaagaaaggtgtctgtgtcagtgcgaacacccagctgaacatcagggatactccgataaccacgactaatgaggataacagttcacctgtgatatgtggtgaataatagataggaaggaaagtaagaatagcgattacggttgctgccaacaagggcagggcggtagtcgagcaagcctgcatgatggctacacgtttccgcattccacgctccatattgattaaagcggagtctgacacaacaatggcattgtctaccaacatccccatggcgataatgatggcggccagtgacattcgctggagtgcgatgccgcaagccatcatgacaatgagagtggcgaagatggaaaaaatcagtccgctacctatcagcgtgccattcttgaacccgatgaaaaataatagaatggctataacagttaaaacggaaatgatgagattcaagacaaagccttgattggcaacggctgattcatatccttgatcgtagatagaggtcagttcatatccttcaggcatggattgggataattcgtcaatgcgttttttcacagcttctgccatatccactacatttccggtggggacggtggagatggcaatacctatggccggattaccgtcaatgcgcatcagattgctggtaggtgtctgataactttcttctatttgtgcaatgtcggcaaggcggaaatgttcaccggagcgtgatacgatagtcaggtttcttatatcatctaatgaataaaaatttccagtggattcaatgcgcagccgattttgtccggcatcaatacctccggcatccaccactttattttgtgcttcgaaagcgcgggctatatccgaggtcgtaattccgctttgtgccatgacggatgggctgacagacacgtcaatggtaggtgtctgtattccgtagatttctattttagcaacatcttttattttcaatagttcgtttttgataatcttggcttcgtcttccagttcccgataggtatggctctttccagtcagtccatagaaaactcccaatacatctccaaaatcatcgttaacaacagatggacctgctccggcgggaagtttgctttgtacatcatttactttacggcgtaatttgtcccaaagttgttgcatttcgtctgcccggatttccttttttacataaacggttatttttgaaagtcctgttcggttttctgttttcagataataaagttcaccaagagattggatggattcttccagaacatctgttacttgagattgtacctcggagggggatgctccgggatacggagtcagtacgagtgcttgtttgatggtaaagggggcgtcttccagttttcccattttgatataggagaacagcccaccggccaatatcaataccaacagcaagatagtgactgctttcttctgtagaaaatattttacgagtttcatgattgtttatttctgtgatattattcgttttctacacttattttcattccatccgataggaagcggagcccactgtttgctacagtttcatcaggatacaagccttcggtgatagatacataaccgtttggcaatagatcccctttctttacttttctcttagttacttgttgggttttggaatttactacccataaataatctccttctgtagggcgatggcaaagggctgtttgagggatggctgctccttgggaaagagttgaaacggaaggggcatttaggcttgctttaccagacatacctgccagtaatttcccttctttattgggaagtagagcggtcagcagataagagaggttattgcgggtagtccctttggaaatttccattatcttagcattatatactttatcgggttgggcgtcaaatcgtacttgtattgtatctagtgcttgcgctgcacgggcaatgtcttgagtgacataaatctccagtttaagttggtctatatcaataaaagaaatgatgggctgggttgctttcacatcttgaaatttctctatatatacttcacccacataaccattgaatggagcgataaggcgtgtgtcttccagttcataggaagctgtattgaaagttgtttttgcagtgatatagtctgcttttgctttttcataagtacttgcagaaacatttcctttgtcgtataacttttgtatacgttcgaattccgcttttgcctgatggtagattgcttcggcacgttctttacggatgcggaaatcgcgcggatctatttcggctatgatgctgccttgttggtatcggttacctgcgtatacatcgaaacggtcgatgggaccgcctactcggaaagataactcggaagtgcgaaaaggtcgggcaataaaagagaattctttgtcaccctgatgtgaaactggaacagcttgtgttgtttttacaataaggtcttgttttttatcattgccttcggcagcacaggaagaaagtagtgcggcaaggcttaataatagcatggaatgtacgtttatcttcatattttgtcttttaagtttgagacaaaaataaagattgaagggagaacagatggggaagaaaatgctgaagccggaaaaagaagaccggaaaaagggaaaatgcatcctgaataattttatcaatgaagtaaaaaaagatttattcaggcaactttttatacagaatagctgtttttatcagtaagatgattaactataaactctaaagaataaagcgtatgtattttatttggtacattattatcggaattattgctggttttgttgccggtaagttgatgagagggggaggtttcggtctctttattaatttattggttggtattgttggtggtgtcctgggcggctgggtattcagtttgtttggtattgcagcaactggtattattggcagtcttgttacctctattgtgggagctatattattgttgtggattgtttctttgctcaagaggtctgatatttcttgaattataagagtaaaaaagaaccgtcctgacgacacgcttgccgggggcggttcctaaccaaacaaatcaaaaaatataagtatattaactaattgcttccacctcctaaggcacggtaaagcatgatatgcagtttacaagattccacattcagagcgatacgttccaattcacaatccaggaaacgttcatcggccgacagtacatccagatagcctgcgaatcctactttaaacatttcatttgcattataaatagatcgatgatggatacggctttcttcttctttcaactttttgcgctggtgcatttgcgatgatgcagtaatgaggtttaatacttcttcataggcttttaataccgtatcgtgatatcctaacaaagcgatgcgttgctggcttttcgcatcattccataatgcacgtatagtattttgtttgaatataggtgctgtgatacctgcaccgagattgtaaaccagggatgcaggagcagtaaaccatttatccagatcaaatgcgttaaaacctccgtttcctccaatcacgatggatgggaagaaagcttttcgcgctgcagatacgtcggatttactagctaataactccagttcggcagcctttatatccgggcgatattgcaaaagttgtgacgggattcctgcatctgtgggaaactcataactacatgcagtttcaaatgacactcgtttcaccttgaaaggcagtcgtcctaataaggtggcgatggcacgttccttttcacttatttgctgttcgtttgcaagcagcatttcttccaatttaaggcgtcgtgaccggaattggtctacagaaagtcgggttacttcaccttctttcatcagttcattggttaaattataagcatctctggctgttaggatggcttcgcgtagcacatatcgctgtttatccagtcctattaattcaaaatagtgtgtacctacttctgatatcaataaggtgcgtgccagacgcatagcttctacagactgcatccagcgggatacggccgatcgttttttatcggttagcttaccccatatgtcagcttcccattgaaaattgagtcctaggttgaaattccggtagggatctggaatatgtttgtctttttctaaatcgggagtgttggtggtgctgttaccaactccgtccatagtgtactcgccaaaacgttgtactccaccatcaatgcctaatgaaagatcgggcagcagcgctccttttcctactcgaacttgtgaacgggcaatggatatccgttctatagtttgaaggaatgaatgattgttatttaacgcttcggctatataactttgcaataacgtatctggaaaaaatgttttccatgacatggaagagatagtagtgctgtccgtttccctatccatatagaactcgggtaactctatcttttctgtcggagtaagggaaggggctttgcaacttaccataatcagacagaaagctcctattattaaacctgttttgtttatattgttatttttcatcttcttcatcatagctgactttattacggttaagatgtgcagaccaactctcgaaaataaggtaaagtccaggtacaaggaagattcctacgaatgtaccgataaacatacctccggcggcagctgttccgatggaacggttgcccaaagcaccggctccgcttgccattaccaacgggattagtccgcatataaatgcaaaggatgtcatcaggatggggcgcagacggcttacggaacctctaacggcagcatcaaagatgctcattccctgtttgcggtactggttggccatttccacaataagaatggcatttttgcctagcagaccaatcaacattaccaaggctacctgggcataaatattattttccaagcctgccagttgcaggaaaaaataagaaccgaagatacctgccggcaatgaaagtatgacgggaaaaggcagtaacagactctcgtattgtgctgccagcaacaaataaacaaacagcaggcagataccgaaaatgagaacggtttgtccacccgaatctttctcttcacgagtaactcctgaccattctatatcataaccgcgaggtaatgtctctttggcaatttgttccactgcttcgataacctctcctgaactgactccttcggcaggttcacctgtaatcaaggccgaggtgaacatattgtagcgtgtaatctggttaggaccgaatatacggtccatcgtcataaagttagagtagggtaccatattcccgtccttgttcttggcatagaacttatacagatcttcaggattcatacgatactctggagaagcctgtaacatcaccttatacatttgtccgaaacgaataaagttggatgagtagaaactgccgatataggattggagtgtttccatggattcatttagatttactcctaatttagctgctttagcaatatccactttcagcagatattgtggaaaattaggattgaatcctgaggttgctcccacaatgcgcggatcttcattcagtttttctactaatgtattggcaacatcggcaaattctgcaaagctgcctgctgttttatcttgtaaacgaagttcgaagccgctggcattaccgaatcccggaactgtaggaggcaggaagaactgaatatccgcatctttgatatgcgaggtgcggtctttgtatatctctataagttcggctgctgtttgatcgcgttcactccacggggtgagattaatcatacccataccgaaattggcaccttccgtttcagtcatcaaactataacctgctaatgtggagatgctttcaatttctttgaaaggaagcaatgcagcttgtacagcgttcaaggctttttcgctgcgttccaatgttgctcccggaggcgcatctacattgacataaatcataccttggtcttcattgggaataaagcctgaaggaagtacctggctcatgccgaaagtggcaaggaagaaaataatcagtgtggcataagtgattattttccggctcaaatacttgtgtaatccgatattgtatttcttttcaaagcggtcgtaccggcggttgaaaaaaataaagaaacgacgtagccatcctgcttttttcttcttttttccatcagcgggtttcagtaacaaagcacatagggcaggcgagagggtcaatgcgtttattcctgagataacaatggctaccgccagtgtcaatgagaattgccgatagaaaatacctacagttccctgcatgaagcccaccggaacaaagactgccgacatgactagcgtgatggcaataatggctccaccgatttcattaatagctgctacagatgctttataaggagagagtttctcatgatgcatctttacatggacagcctctacgacgactattgcgttgtctactacaatacctattgcgagcacaagggcgaataaggtcaacatatttatggagaagcccagcatttccataaaaaagaatgtaccgaccaatgaaactggtacggcgatagccggaattaaggtggaacggaaatcttgtaaaaatatatacaccacaataaataccagtatgaatgcttcgagcagtgtcttcagcactgactgtatggaggcgtcaagaaagcgtgatacgtcataggagatattgtaatccatgccaggcgcaaaactgctttctttgatttctgccattttggttttaatattttggatgacttcccttgcattggagccggggcgttgtttgatcataatagatgccgatggccttccgtcggtcatagaggtcatgttataatcttcagaatcgaattcaatagtggcaacgtctttcagacgtagcagtgaaccatcgggaagagctttcaatacaatctctccatattcttctgctgtgctgaactttccggtatattgtaatacatattgcagttgttggggtaatttgtctgaactgatacctgtcttgccgggtgctgcttctatgttttgattacggatggcttcagttacatcttgaggtaccatgttgtaggcggccagccgattaggattcagccatacacgcatggcataatcacggctacccatgatttctaccaagcctacaccgtcaatacgttttaattcgcgcaaaatattgatatcggcaaagttataaacaaacttttcggtatgtgcactgtccgtactcatgatgttcaagtacatcaacatactgtttacttctttttctgtaataactccggcacggattacttcttcaggcaattcgtctagtacggtagtcacacggttctgtacatttacggcagctacgtccggatcggttcccactttaaaataaatagtagtaagggacataccgtcgttggtacaaacagtggtcatgtaggtcatgccgggtactccgttgatggcacgctctaacggggtggcgactgttttagacatcacatcggcactagccccggtgtatcgggcggttaccgttacagatgggggtacgatatcgggaaactgagtgatgggcagtgtcaaaatagacagtacgcccaagcagacgataatgacggagattactcctgaaagtatcggtctttttataaatagcttaaacataaactgtccgttttattttacgataggttgttttaattcaacttcttttctgattgcttccatatcaatggtatcagtcttgatggtaatgccatccttcatcatttgcactccctcgtatacgatggcagtgttaggagagaagtcttgtgtcacatagtaattattatagcgttccagcggttggaagctgcgtacttttactacactggcactatcaacggtatatacataggtgaaatcttgaatttcgaatgttgatttctggggaactaggcagatgttgtccatttgggtcatcatacgtacttttccagtcactccatgtttcagcagtccgtccgggttcggaaaacggacacggaaggcaatggagccggttcctcgttcaaagtcaccttctacagtttctaatgtgcctttgtgggagtagatggaaccgtctgacaaaatcagttccacattattttcttcgtgctgtttttgtccgctaagttgttggcgcttgtattccagatactcgctttcgttcactttatagtaagcaaagatctcggaaatatcacttacggtagtcagtaagctttgcggatttaccagacttcccgtcttataaggaatacggtctatgtagccgtcaaaaggggcagtgatagtggtgtaagaataatccatctgtgaacgttgcatttgtgcttttgcctgttccactttcatttgggctacttctttttctttattggcttggtcgagtcggatttttgataagatttgtttgtcaaccagccggcctattctttcggcttcataatttgccatttcatattgtgcctgtgcttgtttgtaattggcttgcgcctcttttaccgtttcgctatattggtcggaactgagttggaataggggctgtccttttttgactttctgtccttcgtctacatatatttgttgaacaaatccttccactttgggcttaatttctacaaactgtatagcttgcacatcagctacatatgagcgtggaaactcaatggttgtggggtgaagaatggtgatgggaatgaattctttgtgatgttcctgcttgttgtccgattgaccacaagagcatagcaatcctgtgcatgtacacaggaccgcaattttctgaaaattactcttcatgaaattacgaatacaatttaaaaagattaataattgagtttgagtaaataaaagatccggcttgcattcaaatctttcagaatacaaggccaatatgtatgaatatgctttaatgtgacatattaaatgcggtacacacaaaagataatgtgatgatgtaccactttccccggattttcactgacaggtgtgtaactttgtaccggaacttggggaatagcaaaaagattgaccagcatgtcgatagtgcagggtaaaaaacgactgtttggcagttgtgcacgtcccgactggaaataataagtttcttctcctctgctttcttcattgttgtcagaaggcagggtgggttgttccatcgtttctaccatagccagattggcatcaatcagtggagcgcatacatcaaattgtacgagtaataacataattacgcatactattcttaccacatattttttgataccgttgaacatgaaagatactttgtttgtcaattcgtttgcaaatttaatataattgaacactgttttcaaactaatcatccaaaattagtgagttttaatatatcctttctcttttttggaactactatcctttatactgactgaaatctgttatttttgtactcagtattttaaataatcagataatattacttatgttacaacccgaattgaaatttcgtcgagataaaatacgctatttgatggctcaacaaggcattgatgctgccctgatagcttgtaatgtaaatttgctttatacgtatggtgagatagtgaacggctatctttatttaccgcttcattcaccggcacttctctttgtaaaacgtcctaataatattgtgggagaatttgtattccctattcgtaaacctgagcagatagtggacttgttaaaagaaaatggtatacctgtagcttcaaagataatgttggaaggcggggaactgccttatgcggactatatgcgtcttgcatctctttttcctgaatcggaggtcgtggatggaactgctattattcgtgaagcgcgtagcgtaaagactccgctggagattgaactttttcgtcggtcggctgctttacatgctcgagcatatagtaagattcccgatgtataccatccggggatgactgatcgtgaactatctgttgaggtggaacgcctgatgcgactggaaggttgtctgggaatattcagagtatttggtcagagtatggagatatttatgggaagtgtgttggccggagataatgcagctactccttcgccttatgattttgccttaggtggtaagggattggatccgtctttgcccggaggaatgaatggaactttgttgaaagaggggtatagtgtaatggtggatatagggggaaacttttacggatatatgtgcgatatgagtcgtgtgttctccattggaaaattaaatgatgaggcttatgcagctcatcaagtctgtcttgaagtgcaggataaggttgcctctatgacggcgcctggtgtggtgtgcgaggatctttataatgcggccattgagatcgtgacgaaagccggatttgccgatcgttttatgggggtgtcccaacaggcacgttttataggacacggcatcgggttggaaatcaatgaggcaccagtgttggctccgcgtatccggagggagttggaagagggaatggtgtttgcccttgaacctaaaatcgtattgccgggagtaggaccggtcggcattgaaaattcttgggtagttacagaaaacggagccggcaaactgaccatttgtaatgaggagattatagagctttgattccttggatgtaaatattgaagcggaaatatcaaaaaaacgaaaaattttatggttcttgttctagtgtcattgggggcaaagtgaagaacttgaatataaaaaagatcccgaaacttttagtttcgggatcttacatggtttgaagtatattttttattcccactcaatggtcgcattgggtttgggcgacaggtcatagcatacgcggttcacattctttacttcttttagaatacggtcggtaattttcatcagaatggaccagtctatcggttcgatagtagctgtcatagcatctacggtgttgacagctcggataataacaggccagtcaaatgaacgggcattgtcacgcacgcctactgatttgaaatcgggtactacggtgaaatattgccatactttcttgtccaagcctgccagttggaattcttcacgcaagatggcgtccgattcgcgaacagcttccaagcggtcacgagtgatagcccccaaacagcgcactcccaaaccaggaccagggaacggctgacggtagaccatgtcgtatggtaaaccaagttccactccgcaggcacggacttcgtctttgaacaactggcgtaaaggttctactaattcaaactgtaaatcctcgggtaagccacctacattgtgatgggatttaaccattttggctgttttagtaccactttctacgatatcaggataaattgtaccttgtcccaaaaagtcgattccatttagcttacgggcttcctcttcgaacacacgaataaattcaccaccgataatcttgcgtttctgctccggatcagttacattttccagtttactcaggaaacggtctgtagcatccacgtaaatcaaattagcgttcaactgatttttgaaaacttcaattactgcttccgattcacctttgcgcattaatccatggttcacatgtacgcagaccagattattgccgatggctttcagcaacagggctgctactacagaactgtctacacctccggaaagtgccaataatactttcttgtcgcctacctggcggcggatcaattcaatctggtcattgacaaagtttgtcatattccagttagcctctgccttgcaggtatcaaaaacaaacgattgtacagcattctttattgcttccacatcatccgtcagttggggaagcttcacttcgcaacatgctttgtcatgaccggcagccattacggggatccctgctttgtaaatctcgggaagcacgtcaatatccactccgtcaattacatggttgggaccgccattgataatgacaccctttacattgggcaatgctgtcagctcggcggctgtgatatcgtgcgggtaaatttcactatatacacccaaagcacgaatggctctggcaagcacggtgttttcggtgcttcccaaatccaagataacaatcatatcttgtttcattccgttatgttgtttttaagttattagttggttgtctattattcccactcaattgtggcaggcggtttggacgagatatcatagcatacgcggtttacaccttttactttattgattatgtcgtttgaaaccttagccataaattcatagggaagatgagcccagtcggcggtcatggcatccgtactagttacggcacgtagggcaacggcacgttcgtatgtacgttcgtcccccattactcccacactttgtacgggtagcaagattacgcctgcctgccatacttggtggtaaagggatgtttcgtttccgtccgagtctttcactttccagtctctcaatccttggatatagatatcatcggcgtcttgcagaatacgtactttctcaggagtgatatcacccaaaatacgtaccgcaagtcctggtccggggaatggatggcgtgtaatcagatgttccggcatacccagttcacgacctacgtggcgtacttcatccttgaatagcagacgcagaggctcgcatagtttcaaattcattttttcgggcagtccacctacgttgtgatgacttttgattacagtgccggtgatacttaatgactcgatacagtcaggataaatggtaccttgtgccagccatttcacatctttaattttatgagcttcttcatcgaatacgtcaataaaacctttgccgataatcttacgcttcttctcaggttcttccacacctgccagttcactgaagaatttttggctggcatccactccgattacattcagtccgagacattcataatcatggagtacatttttgaattcgttcttacgcagcatgccgtgatctacaaaaatgcaggtaagattcttgcctatcgctttatttaataatacggctgccacagatgagtctactccgccactcagccccagtactactttgtcatttcccagttgcgctttcagttcggctacagtcgtttcaatgaaagaggcagcgctccagtcctgtttccccccgcaaatgtcgactacaaaatttttcagaagctgggttccgtcttcactgtggaacacttccgggtggaactgtactccccatactttctcttcctttatttgataagcagcgatggctactttatctgttgaagcgataattttgaaattctccggaatggcggtgatggtatctccgtggctcatccatacttgtgagtgttcacggacgttcttcaatagtgggttctcttggtcgaaagtggaaaggtgtgcacgtccgtattcacgtgtgccggccggttccactttcccaccgtttgtataagacatgaactgtgcaccatagcagatacccaaaataggatactttccgcgaatgtcactcaaatcgactttaaaggcgctttcatcatacaccgagaaagggcttcccgaaaggataacgccgattatggacggatcattgtgtggaaatttgttgtaaggcacaatctcgcaataagtattcagttcgcgaacgcgacgggctatgagctgtgtggtttgtgaaccgaagtcgagaataatgatcttttcttgcatatatatattaagatatgtaaatgatttcgtgccgcaaagatactcagaaaaaataaaaatccgtcatgctgttgaggctttttataattgaattggaaaaactttgttcttcctgcttccttgtggaaaaatatgcaaaaaaaagattggaatgtttaggaaatgtcggctggtatataaatcacgggctgtccgacaagcatttgagggcagcccgtttttttgtgtggataatattttattttttgccagcctgttccttcaacaagtcacggatttctgtaagtaatacctcttccttgctaggggcaggtggggcggcgggagcaggaacttcttctttcttacgattcagcttggcaagtaatcttataaataagaatatagaaaaagcaatgatgataaagtcgaaagtagcttgtaggaagttgccataattcaacgttacggcagctttttcaactccatccactacttcggccggctttaattgtagtttcaaatctgtaaagttcacgccacctaccagcaatccgatgggaggcatgatgacatcggccacaatggaagatactattttaccgaaggctccgccgatgatgacaccgactgccatgtcaatgacgtttccgcgcattgcgaacgccttaaaatcttgcaagaagctgctttttcccatttttttttattttaatatgaatttatgtgcgaatataaaaacaaattcttatttttgcaccgcgtttaggaaataaatactaaacgtttaacaacattccaacgtagagtgtttaaaagctatattataaaacctttaaaatttaaacaaaatgattaaagtaggtattaacggatttggtcgtatcggccgttttgtattccgtgcagctcagaaaagaaacgatattcagatcgtaggtatcaatgacctttgcccggttgattacttagcatatatgttgaagtatgacactatgcacggacaatttgacggtactatcgaagctgacgtagaaaatagcaaattgatcgtgaacggcaatgcaatccgcgtaacagctgaaagaaatccggctgacttgaagtgggatgcaatcggtgctgaatacgtagttgaatctactggtttgttcttgactaaagaaaaagctcaggctcatattgaagctggtgctaaatatgtagttatgtcagctccttctaaagatgatactccgatgttcgtttgcggtgtaaacgaaaagacttatgttaaaggtactcagttcgtttctaacgcttcttgtactactaactgtttggctcctatcgctaaggtgttgaatgacaaatggggtatcactgacggtttgatgactacagttcactctacaacagctactcagaaaacagttgacggtccttctatgaaagactggagaggtggtcgtgctgcttctggtaacattatcccttcatctactggtgctgctaaagctgtaggtaaagttattcctgaattgaacggtaaattgactggtatgtcaatgcgtgttccgactttggatgtttctgtagttgacttgacagttaacttggctaaaccggctacatatgctgaaatctgtgcagctatgaaagaagcttctgaaggtgaattggctggcgtattgggttacactgaagatgcagttgtttcttctgacttcttgggtgatactcgtacttctatcttcgatgctaaagctggtatcgctttgactgatacttttgttaaggtggtttcttggtatgacaacgaaatcggttactctaacaaagtattggatttgattgctcacatggcttctgtaaactgctaatcagttaaaaaccatatagcgaaagccgtctgaagtaattcagacggcttttttttatgtagttttgcgtgctaagttgcacattttcgttatctttgtgcgactgttacaaaaacttaggatggaaaagtacgatttgataacgatattaggacctaccgcttcaggaaagactcctttggcagcggctttagcttacaagttggataccgaaattatcagtggagatagccggcaggtatatcgccggatggatttaggtacgggaaaggatttggaagactatgtcgtgaatggacagcaaataccttaccatctgatagacattgtagaccccggatataaatataatgtatttgaatttcaacgtgattttttgaatgcttatgatcaagtgagatggaaagacaaacttcctatattatgcggaggtacggggatgtatcttgaatccgtgttgaagggatataggctgcttcctgttccagagaatcccaaacttagggactcgttagcagataaatcattagcggaactcacccggttgttgtcaacttacaggaaacttcataactctacggacgtagatactgtaaagcgggctatccgggccattgaaatagaagagtattacaagcaccaatcagcggaataccgtgagttcccgcaaattcatagtttgatcattggagtagatatagctcgtgagttacgtcgtgaaaaaatatcccaccgtttgaagcagcgtttggatgaagggatggtaaacgaagtgaaggctttgttggatagtggtatttcttccgaggatttgatttattacggattggaatataagtatttgactttatatgtcttgggtaaactttctttcaatgaaatgtttcatcaattggaaatagctatccatcaatttgccaaacggcagatgacctggttccggggcatggagcggcgagggttcactatacattggctggatgcttgcctgcctatggaagataaggtggaaaaaatcattaatttgttacacactaaaaactaaatgttatggctgtagaaccaaacagatgggggattatttataatccgaaagccggaagccgtaagactcagaagcgttggaatgagatacgtagctatatggaaaaccgtaaggtggtttttgactacgtacagtccgaaggttttggatcggtggaacgactcgcccgtaccttggctaataatggttatcgaaccattgtgattgtaggtggagacggagcgatcaatgatgctattaacggtattatgacttctatggtggaggataagacaaatatcgcttttggaatcattcctaatggtattggtaatgactttgccaaatattgggggttggatgaagataattataaagcagcggtagattggattatcaatcgtcgtctgaggaaaattgatgtggggcgttgtaattattttgatggagagaagcacacctcccgctatttcctgaatgccatatatataggtttaggtgcgcgtattgtacagatctcagatggtacccgccgtttttggggaatacgtgagttgtcttttgccgcttccatgttcctgttgctgtttgaacgtaaattgtaccgtacacatctttgtatcaatggcgaacatattcgtggacgtatcatgacggtatgtgtgggaagtgcccgtggatacggtttgacacctagtgcagttccttataatggctggttggatgtgtcggttatttatcgtccggagttaattcaacttttctcgggtatgtggatgctgttgcagggacgtattttaaatcataaaatggtgaaaccttatcgtacacggaaagtaaaagtactacgtgcgcagaatgcttctgtcagtttggacgggcgtattttagaccgccattttcctttggaaattacgatccagccggaagctataactttgattatccctaattaaaaactatagatatccatttcttgctttaaggatagaggcagagtagatatctcaatgaatagacgtaagataatgacaatttcagatttaagaaagacagataatttctttttactggctggcccttgtgtgatcgaaggagaggaaatggctctccgaatagcagatcgtattgtgaaaataacagataaactgggtattccctatgtgtttaaaggatcttatcgtaaggctaaccgttcccgtttggattcgtttacaggaataggtgatgaaaaggccttgaaagtacttcgtaaagtacgggaaacttttggaattcctgtggtaaccgatattcatagtgctggagaagctgctatggccgctgaatatgtggatgtgttgcagattcctgctttcctgtgtcgccagactgatttgctggtggcggcagctcataccggaaagattgtcaacatcaagaaaggacaatttttatcacctggcgccatgcgttttgctgctgacaaagtggtggaggcgggtaatgatcaggttatgctgaccgagcggggaacgactttcgggtatcaggatttgattgtagattatcggggtattccggaaatgcagactttaggttttcctgtaattctggatgtgacacattctttgcaacaacctaatcagactgccggtgtgacaggtggtatgccgcagcttattgaaacggtagccaaggctggcatagcggtaggagtggacggtttgtttatggaaacccacgaagacccttctgtcgctaagagtgacggagcgaatatgttgaaactggatttgctggaagggctattgaccaaactggtaagaatccgccaagtgttataaatgttattcgttggggattcacaggtaagatgggttaatttatttggactatggggcaacttgcatgaatagtataaaataaggtcggtttttgcagtagaaaccggccttacctttctttctccgtcaaaacagaaaaaagaatagggacattcattaaatattacaaaatcagccaa

SEQ ID NO: 4065 - DNA, 185 bp, Unknown
  gut microbiota DNA sequence
cgtgaggagattatcattcccatgccggaaggcctttcgttggagggagcgacgaagctgggagaggaagtgagcgaacaatatgctgtcagtcccgcccgattctatgtgaaacgcatcatccgtcctaaataccggctcgccgacggtcgtatcataaccgctcccatgcccgtaatggcaca

SEQ ID NO: 4066 - DNA, 1056 bp, Unknown
  gut microbiota DNA sequence
aaagaaagatgcggaggatttcatcgccaacaaatccaaattcttcggcttggtaatcacggacgaggaaataatcgtcaaggtgcttgaaagcatagacgagtattacaacgagggcaagacgcagggcatctgcgtgtttggcagtggatactacaagaaagccgacaccctcatactatcggcaaggattggcgatgagattattgaaaccgtagaggtggacttgcgaaccctcgaagtggtgcagtgccacggcaagcacaaccaggacaccgaatatcacgagcgcatcatagaccttgtgaacaagaacgccaaccttatccgtgagcggatgaaagcggcatagcataacccctaaaacaacattgatatggaagtaagaattgaaagtatgatttgtgtgtgggatgatgcaatccccacgatgttccttgaatttgtgaacctcctcactctcacaacgagtgagggggaattgagaaagagcgtaaaggagtttgccgagaagcacgaacttgacaagtttttcctttacggcttcggctcacaccatttctacctgcaccaacgctacacaagcaaccccgaaatggtgatgaagaacagagttctgtcagtacatttttaaccatctaaaaagcaacattatgacaacacgaatgaccatcaacggagtaagcacctgcgcggaagcaggtacggagaaatacgagcgtttccaatcgggtatcggaagacgcaggcggacacttgtgcagtacgactaccgccaccccatagacagagaattgttctcttgtgtcaaacccacgttggacgagtgccgagccgcacgggacaagtggctgaacgcaaagaagggaaaggaggacagactatgaacacgacctatcaaacgctgatagtcaagttcagcgaacctatcacggcattggacggtatctttgacgataccggagcgtggggaacggacaccctcaaggggtggatagatgattacgaaagcacacgtttcaccgccaccgacagccatacggcagtcatcacgag

SEQ ID NO: 4067 - DNA, 354 bp, Unknown
  gut microbiota DNA sequence
gaataaggatcggctaactccgtgccagcagccgcggtaatacggaggatccgagcgttatccggatttattgggtttaaagggagcgtaggcggacgcttaagtcagttgtgaaagtttgcggctcaaccgtaaaattgcagttgatactgggtgtcttgagtacagtagaggcaggcggaattcgtggtgtagcggtgaaatgcttagatatcacgaagaactccgattgcgaaggcagcctgctggactgtaactgacgctgatgctcgaaagtgtgggtatcaaacaggattagataccctggtagtccacacagtaaacgatgaatactcgctgtttgcgatatacagt

SEQ ID NO: 4068 - DNA, 192 bp, Unknown
  gut microbiota DNA sequence
cgatctccccatttcagcccccacttcatccccatccggaaaggaaggacatcttttatttcctccagcctcttccgccttttctcttcctcattctgttgccgttcccgctgtacgctctccgcacgccgcccggcttccttcctcagaccttccaccacggaggcaaaatccgcctcgcccgccttagga
